United States Patent Application Publication US 2014/0230087 A1 - sequence listing, part 10

SEQ ID NO: 6675 - DNA, 6825 bp, Ricinus communis
  Intron number 6 from transcript 30162.m001270 (locus 30162 .t000015) derived from phytozome v7.0 (chr-ID 30162; pos 9 65323 to 972147)
attttgacagatctgggcttagttcttctgctgctgtaagttttcttgttgtttcttccttttatgctattggataacattttgcttgattaaagaaattagattgctagaaaagggcagcaatgatttgtttccaacaattaattattttttcaataaaatattccttgaagtgcaacttttcagtcaagttcatgtggtcaataaggttaaacaccgtaaaccttcatatgtgattctacatttgaactttaaatggtttttgttttaacaactaaaaccccctttcagctgtgtttggaacttagagggagatactaattgcaatgatccttttcaaatttacttaaatagaccccctggatggaaaagtgggatttgtatacttaataagtcgtcaaattcttgaaaaataccagacggttgttgtcttgcttggttttggaattgctcttatctgggtgcaaggtgcatcaaaaagataaatagtgaagctcatttagggttgtaaatttggttcaatttctatttgaatcttgcttttaaaataaaaaagtgaggtaatgttggtaggatcttattattaagaatattttgaaaaaggcttgtatggtggaaaaggaagtgtttgttaacgaatggtaccctcattcttagtgccgcattttaaatttttcttatgcacttcatgttcatcttttaaaacatccaatttggccacgagagaaacatagttctttgaaagggattgccatagggatgtgcatggatgaactttagtattatttgattaagttgagggtagtttatctttctggttataagggaggtttagatatattttcattttcgtctttcttttgaagaacactttggaagaatggttaagtatatttattttagggaaggaggatttgtaggatgaagctaaatatggagaagaggttaggggtagtgttaatagaattttagtcagcctatggaaacatagaatgtctaaattggaggatttttttactatatcattttgatgaaggtgtttgttccctctatttggcatgaactggtgctggcatcattcacctcttggaatcagttcctatgctttacttatgttatttcaatttggataagtcggttttcccaccatcggttctctagtattagtgaagaagtgtttggtaactgaattttagttttgagtgcagataaggtggtttgaaacccaatttaaaatagaaatttcatgactgagatataaaggtgcatgtctgaatcatggaaatcatatgcgttgaaaaggttagcttgaggttgataaggaaaggagatttttatgttgaagaataagcctctttttttttcctttccttttctgtttctattggtgagggaagagtaggggcatgaggaaagcaatctttggaaaatgcttataggaaagcctttctgaatttttgttgggaagtgccttcaagattgacaatttgatgaaaaaagggaattgcattactgttaactgttttttttttttttaatactttttcatatactttttgggctagaaaggaaataagtgaatcattttgttctgatagtgaacggataggaactatttagaatgtcgtttattttagtcttggcattaacttggcctctttagttaatatttttatattcaaaacttaatgctttgagggtgtctaattataaagccaaaatgtgaagagatgagatataaagtacagtttattttatggattacattgatcaaggaatttttgtgctttagaaagtgtagattcttcattggataatcaaaagacaaattgttatgctctttcactttaaatggtaacattattagactgagatccgttttatcttaattttgtgtagtgttcttttcaattgggtatagattgtgcactcatcatgatcctgggtaagaccaaggcccgctttgttatgttttattgctaaagtttccctctattatgaggaaaaatcctcgcaaatcactattttataataaaaagtgtcacagttaattatatcccacagttggaggcacaatcttgcttaacaagcaagcttttttggcaactaattgtcttattttatcctaaattccctgctaagctgaagggtaaattctacagacctgcaatccgggtaggtataaattgtggcaatgaatattcaaaagtgaagaaacatgctgttaagatgaaggggcatggataaggatgctaatttagatttgtggtattcaagaatgaatcagatttgggctgaacacattggtcaggaagtggaagtggcacctattcgaaataagttaagaggggcaactgagatgctttagttatgtttggcttagctaatttaactggtgtggaaattgagtataagttgcaataatgaaagatgtatggtagagctaggatattggatggagtggttaataatgttttcatattgcatgaagcccaaattagccttaaatggcaatatgcaatatagtacgtctagttacattttgttcatttaaatcattatattgactttttaaatacaaattttcagtaaaatattttttagggataagtaaaaagaagtactttgtggttcactgttttacaatttttagtatgtgttttttctttttcagacagaggtacaaatcatgactaaaaaaaatctcaccgctaaaatgtctcgattcgtaatgattcgaccatctttattagccatcattattgtgttgctcgtgtctgataacatgagcttagagcttaataactcttaattttattgtttgaccattaatcacagtttaagaagtcactgatttgatgagatcgattgacggttaaacaactatgttttgagttgttaggctttaaatccatgtcctcaaacatgagcaatatgataataatggttaatcggagtaaagatggttgaatccttatgaattgccactttttaacagtgaaatattttattttgttgcgaattttaactagatacctctttttgttttgcgaaaaatcacatattgaaaattattaaatggtgaaactacaggggactcttttatacttatctttacttttaatgttgcatggaatgatgctatgacattagcgaatcaatttttccatataatagacaattgagatgctttggtcatatttggcttaggcaatcgaacttgtatagaaattgagtataagtaagttggaatttcaaaaaatatagtgttagagatggagtactactagatggcgtggttaagaaggctctcgatgcccaaattatccttagacggccaatatgctcgtttagttcatttaataagaacatcggctttttctatcaatcaattaaatacagttttcgataaaataatttcttacattgcatcagatgatgcagtgacatcaatgaatcaattttcccatttagtaattccaaaaaaagaataatataataaaaaatggattaatagagacaattaaaagaattattaaataatgattgtaatattagctcattcttcaatttcatgcctaccatggggcttctctttgaggagtaattttgggatgtaaacattgggccattgagcaaatgctaatctaacaccttctagttgggcaccaaggtgataatttcttccaaaagtaataaggaattcaattgcctgcatggagttcctcctcttgtttttcttcccttatttccaatatggttttacagactatacatgtctaaatcactcggccaacttctagcatttgaattatatgtactctaaattacacaagctgatgcattcatattttgtaatcccaatggctgcttcactgaggtttggagcagatctttggtagtgtgggaaagggttcaatgttcctgttaattcacttctaacgaaatcaaataaaacctaaacaaatcattacggatatcatagttgaaaacctattcttgtgtctccttgagccacacctacctcgagtattggtttgttcaattgataccacacaagggtaattgccttcttttattcttagtgaaaaaattgctataataggaaaaagataaaattgcttggtaagaagaaatccaggtcattattttaagcggtaaaattatatatctaatgagaaatacatgtttaaatgattattaggtataagtgaccaaataatggaaattatagtttagttgatcaagtaaagaaaaattaatcaattcattgaacaatttttcatggtgttggctgtatatttagtttgagcatgccacgtgtgtgtgatacacaaaccgtcactctgattgtgctttttcgactttttctcagatgattgtggatgtccaaactcctttaccacaatttgtttcgtattctaatggctgaaattaatatctgactgaaagaactgagattttattgcttgtaaacaaaagcatggtgaaaagcttgattgccaaatacaaagaatttcttgattgagtttttgtgtgtgcgatttatgtgtcttcattacagctctttcttgtgtttatttcacgtgacaaactccatatgcataaccactccctgagaagtggaggttcagaataaccacaatttgaattttcctcctataccaagttccctcctaataaccaccattttgaatctccctcctgtaccaagttccctcctactcactattctcgatccttcccattaattacatgacttaaattaattaattaaatatcttcaattaattaacttaattaattaattaaatataaaaatacttgtgttggatctatagctttgtagaaatatggtacaaacacatggtcaatttgtgctttctcccatttaatattactgggcctctcctaaattctataccatgatggatgaatactgacttttctagttgatcccaagtagattggaaaaagctgtggtgagctgagttgcaactgtctctaattgggtcttgctgagttatttgatggaggaaaatcctgttcacgtctagtggaaatatgttccaagttttatgctctacgccagatgacaaagatgttgatagtatagcatagcagtctaaaaggttttctcttggtgtatttatgagggggcaaaaaatacaacaattggtagatactgttgagtgaggactcaactacagcatgcagattgaactaaaagctaatgatcttcataaattgatcggcttactaacttgtaaggaaaagaaagagagaaccaaccatgtgcaaaatataatgaagaagatagcagtcaggctagcaataatacctgcctaaacttcctaattcgaaatgatcaaagggcctatgcccacctatgggctaaggaagtaaaatgtcgttgttgtccagtagacagttgacaagcaagcagctggtgatgatgaactgtagaatactcatgattttatgaacacaagcaaattagtctagaactgatttagcaaacagattattgatcctgttgaatatctaatatcctccatactgacttcctgggctcttgtgtcgctatgtttcatcatttgaagttgaacacctaagagtgaaatccaagttttatcaggtttatttgtggagccaaaataggtttgttttgctggtgagccacttaatgtggcatcgcttgttctggcagcagcttatttaatcccaaatattaataagcttagcaatggtggcaattttatctaaaatattttacatgcatgagaggagaatgttgagtcaatgcctaagtgggaatatcttcttttacatttgtatggtagtgatgtaggatagatttagatagcctattctacattgattttcatggaaaataaggacttcaggttgcattccaggtctgatttgtcagaaattcagatctgaaatagaagagaatgaaagaaaatataagaaaacttctacgagtcaacacttagaaggtttatgtcacacttaaagaggattgaaacacaattctagagtagcaaattgcaggaaattatttgaacaaaactctaaataataattcttagaggcctagatatttatggactatgttaatcctaacactacttggattagaaatcttaaactaggaaaattataaactaatactaactagaaaatattaaactaactaaaacttttaaatcacacttaaaataaaatactcgtaaagtaaattttaactactgtcccagcaaagctgaaaattacagaaatacccccagcaaagcaagaaattacaaaaataccctttgggtattgaaattgtaaatattagatcagaattccaaatctcttgattctttgaattttattttccttgatattttctttatccgcatcaggtagtttgaaggttttattcatatgatggttttcatattggagtacagttggttaactatggaactttttttgtaactacacaattcagcatggtttagtttgcaatatacagaggtctgttaaatcgattttttgtgtgtggtgaactttgtctgagaaatatgctacttttaatgtggtagaggctgaatcatatcctttcttctacttctaagatttcaaggataaaccgtctggagctatagccctctttctacccttttgggatattacatcctttcttgataaactatgttactttagcaattttagacaatttgttttctcctatccgtagtattatacatgatactaatccatatagttgcatatgcaggttggagttgcttatctgttggctttggaaagtgc

SEQ ID NO: 6676 - DNA, 980 bp, Ricinus communis
  Intron number 12 from transcript 30093.m000353 (locus 3009 3.t000004) derived from phytozome v7.0 (chr-ID 30093; pos 56571 to 57550 reverse strand)
cacgcaaccgaggagaatagcggtaggtgtgcgatttaatgaatgcatggatgactgtttatctatctcatctcctagttcttgctatacaaagtttaccctccaaataaaacatccaaatattctgttctggttctaacaacagtggaaagagaatatatgtaaaacatccatatattctgttctgcatcaggttaagatacacttcctctagtcactcgcatatcaattgtcaaagttgactgggtaaacctcattctagtcctacctgttttatcatcttacagcacccctaaattagtgttgtgatctctgtttgtgatgataaaaactattaagagaacatcaggtatatcttatatatgtccacctctgtgcttcaagacttttcttgtccatgagcttaagaaggactgcctagatgatgataagcttggttatcttcaatttggaatcttaagatgcacacatgcccaacatagtgaatatggtgctgttcttctttccttattttagtgcccctggaagagagtagtatttcatctctaccgcatgtctttttgcaatcattttccatattctatttgttgagaatgaacaaagaatttattgggcttatgtaactgttttctttatacctgcaactagttatcatcttatggtcgtaagatatttcttttatttgtttttgttgaatgctgtgtgatattagtacttgtgggttatgtttggtgcgttgctatattattgtctactttatagtttttaattctgtatatttattgtttcctttttagaatacttgtatatacacacagtgctgtgaatcacaataacatacattagttatttttccacttatgaccattggtaggttaagcagtatgatggaagctgatttattcgtgtggtaactcataatcataaatttgatttctgcattttgttgtaggctatttctgtggctgaaagagttgctt

SEQ ID NO: 6677 - DNA, 2297 bp, Ricinus communis
  Intron number 2 from transcript 29733.m000758 (locus 29733 .t000022) derived from phytozome v7.0 (chr-ID 29733; pos 5 23480 to 525776 reverse strand)
tttcagaacgtctgaaagagagggcagttgaacaggtactataggcattgtttggcgtaaatcattgcaaattgatgtcaatttttatatgctgaaagaaatgaattctaggaactatgagcttcccaaatatcttcagttcagttgcaactagattactaccggcgcgatcggggttaattatttttttattacaagtatttataaaaattatgtgattaaaatattaaaattctttgatcataaataatataaacatataatactaaacaaatataaataaaaaaactataatatttttgaattttctaaatggtcattagtttcaataatggtaactaaaaaaaaattattctctccttttacacgatgtacttgtctgtttttagtttacactcttaaatttgtttatctgctttattcataacatatatttaaaattaaataattaggagtatctaatagaattgaataaactaaacattttaaaaatttaaatcaaaccaaattaaattatttcattttagcttggtttaatatttggttttttcatatacttttcaaaagtttttggttgatttaatattttgtattttttaagcatataattcaataatattcttttaatttatatgcatgaaagtaaaaatactgtacttaatttttttaatttactgaattgcataaaatctaatctagaaaaataatttttgtttattaatataaaaatcgagttctattaattgagttttttccttgaaaatgaactgtgccaatttgacgaaatatatgtgagatacaatggaaaagagatgaagggtgtgaatgaatacaaatataataattagaaagtaaagagtaaccgttctttatttaataaaataatatttccactatgagaataaaagttctttaagaaatctaatctaaaatggaaattataaagacaaatttgaaaagaaagagggctataagataattaaaattcataatactatactttaaggtgttctatgttgtaatactatactttaaagaaagattctaaagtggaagttatacaaaaatattttaaaaggtaaaggaatatgaaataatcaaatatcacaattaaggtgttggaagctgtaacataaatattctctaaaatagtagaaaatatgttaatgtagcttgattatctaagaattgaaaaaacagacttaaaaaataatataacatgccatgtaggatagagaaaacaatgttagatatatataaattttagaatttccaaacaatgggatagattagttaaatatggactccataaattgtgtctattaattttgcttatagtattagaattacgcattattgttttgctagtgacttgcgagaacagatattggtatttcttttaactacaaagcgtaatgtcctttagagttgagagacttagtttagcaagaaacacgagctgctcaccctgatgcgattcattaaatgtttgtgcatgggaaagtctatagatggcttgaattgtatgtttgctttttttattcttttttaggtggatgcttaaatattcaacatgctgcttaataaatttgacagtgtaaaactgtataacatattttgaagtttgaaattcttttttgatattattttgcacagaaaaattccttgcacaaagatgattggttgagatcaaatttaggtagtaaatctttaaaataattcatagcagaaaagagttcttagtctgaggatttgtttttcaaccatacatgtaaatgtttcctgaataaaacaattgcagtgttacaattgttaatttcatgataaatagtgatattcttttcacttgcttttgacctctacgtgcaattgttgcttggttctttatcatcctaagaatttatagttcataaacacagcaatttttgcagggaggactcaagagtgaatggttttatgctttttttgctacctctactctggcaatcgaatcttcttcaacctaaaagtgattggaatattatcaattttcaaattggcagtgagcttggcaactattgtatcccatttccagcatagttaatatgttaaatttgttgatagataaatgtcgatgttctttccttcaacactcgatatcactgttgaaaagctttgtgatacagttttttggatagtgataatctcaaatattttgggcttgatgtgttgcaagatatttaatgccaccccacggcaaggatgctcattttttcattctatgtaatctcagcttacagaagatctaaagaaagtgg

SEQ ID NO: 6678 - DNA, 960 bp, Ricinus communis
  Intron number 2 from transcript 29594.m000267 (locus 29594 .t000001) derived from phytozome v7.0 (chr-ID 29594; pos 5 727 to 6686)
aagacaaagccattgttgtcactgtaagtcacttttcttaaataactagttgcacctgttaaaaataattttagaataattactgtttatctcttaatttttatttaatatataaattatctatttatgttgaatttattatattaattatttttatattcttacaaaattaactactaacatttaacatcaattgagttaaaagactcaattaaaaaataaaattataatttgtttctcaaacttttactaaatataaaattcatctaaaattaatttatttctattctgttaaagtgaaattattaattttagcagaaataatagttagttttaaaataaataaataaattaatatttttacttgctctagcttttagcacaactaaatcctaaaaatttaaatattttaaaaaatctatatttagagaaaaattgtcaaattaacatgtaatttaatttgaattattaaaatagaatacatatttatagttagagatatttatttatattattatttaataatattagaattaaattatactgaaaacaagaattttatttaaatgtgatgaaattaattttagaccattctaatatttaataagaagtttaatgattaatttgtaattttatattttatcatagttctttcactttcagatgcatggagttattagttaattttataaaaatttaagggaagtttaattttgctatagtaaaatttacacaaagagcaatttgtataatgtattaaaagtcagcggcacaatgtagttacctcattattttatctatataaaggaaaaaacagagaacagattataatttaccctttttgttttacctcgtcggtattcttttggtgtctgtaaagtcctcaagttcgcatctccttgttctgtaatcccactaactgttgctaatgacattgcactaataacgatgaataggtga

SEQ ID NO: 6679 - DNA, 1026 bp, Ricinus communis
  Intron number 4 from transcript 29908.m006002 (locus 29908 .t000053) derived from phytozome v7.0 (chr-ID 29908; pos 9 76357 to 977382 reverse strand)
tgcttaaagctggtacgggacctacctcctgttcctctttgtcgaatgtaataaagggaacatgtgtttgtgtttttttagcatagactggtagatattgccttatttctattcaggctgtcagcattatctctggttcatgaattgagattttggaccataatgatcttatggtctagtgtccagtcaacatacatagaccatggttttgcaccaaaagtctacgtcaatatgtaataggtccatactctacattatggtagtcctatgagtgaactagtgtttggaagcttattatagttgagtttgtaccctcttttgtaacattggatactctaaatttactttggtgctctagtgactggacttctgagtcatgactaagatttagattattgcattaatgctaggagtattattacttttgcctgttctagaactagtcttttttcctcactagtccttgtaaaaggggtggaatttgggtgcattactacagtaagcagactcgcttcacatgtactctgcagtgagcctgcatttgatgagttgtttgtaacacataatcaatggaagttggaataaggtttagcttcaatttaaatgaataaatatttgtataattaaaagctgaaattcatgttattgcatcatatagtctgcattaacaagaaaaataactgttctatgaatggatcaataatgtgatggaatattcattgttctcacattgtcttggttcccacttgaatatatgttaggacataggggatgcagagaattatatgcagacatgggtatggggcatatcactcttaagttaataaataaaatagttactctttttcagtttctgatcttcaaattttataatatgctgaagaattaaattttcttttttaattagatagatcataagatacctgcactattcataagactttttatttaagaaattcttcaaaggaagtatgtttctttattctacaatcgtgtttaaattttggttatcaaataactgcaggc

SEQ ID NO: 6680 - DNA, 1185 bp, Ricinus communis
  Intron number 1 from transcript 48822.m000017 (locus 48822 .t000001) derived from phytozome v7.0 (chr-ID 48822; pos 1 945 to 3129 reverse strand)
ttttcataaatcacaatttcaggttcgcttctattgtttttctttttaattttactttattcatttatttatgcccgattttatctttgattgtatgcttttcagttacttagaaagttttataggttgtctgctgctatatgccaaatgtgtttgtttgattgatctgtttagatttgttaataagattttgatgcgtccgtcaaattcattatgactcttagaaccctgaaattttttcattaaagctcgcctatcattcggtggtttgtttatgtgtgatcccaattcgctgaagtgttggccgtctagaaattaaattacttgttacaaatgttatcttgcatcatccactttgatcactgttatgatatgttgtttgtagtcaattttggggaattagaagtcagaaacaaaagtttctaatccactagttagagtggatggtttcaatttcactgtgcacaggagtaatgttctcaaattgattttagcctaggattcttttcaatggatatgtagactatgtcttcaatgtctttgccatagtagattagacaaggagacctgatgcttaaaaagtgttgggcaataaattctttcatatttaaggttagggttttagattagagaaaataatatgtgctacttttcttgctgacaagaggatgctaggtgagatgagaaagagagcctttcgaaacctaggttgggttaacttagttctaaattttgaatgttttctaaagcaatagtgacctgtgtagttggttgttcttaacttcctaacctgagcatgactgaagtacgttaaagaccatttgattttcaactggcaacccccatttctaatattctaaaccacggtgtacttgccaaccataacccctatgttgggtgctgtgctgcaatctatctaaaattttagtagattttctgctcattaagcctatcgaagtataacgtgggtactatagggaagtactgagttggaaaagctatgatttccattattaatagattaggaagtgcatcaactctgctgtaatcaggatgttcattctcacttcttctgagtaaaggattatgccttttcatttttttgaccctttgcagtcttgactacgcgtcagcttcattggcataaaaaataaaaatacttagctgtgagcttttggttgcaag

SEQ ID NO: 6681 - DNA, 289 bp, Ricinus communis
  Intron number 2 from transcript 29726.m003967 (locus 29726 .t000079) derived from phytozome v7.0 (chr-ID 29726; pos 4 76889 to 477177 reverse strand)
ttgctctagctgctagagattctgtttccttccaagtaagttaattctatattttttaaactaactagtaaactgtgtatgtcagagatactaaattatttattatacatgtggttcaaactactaattcttagtccagtggccaaagacgagctagttctaatcgagtcccacccttctttccccaatatacttctaagcaaaattctttatctaatttgcatgatttggttttggttgtttggtgattgcagtttaaaaagccaatttgggaagtgctaactggtag

SEQ ID NO: 6682 - DNA, 2694 bp, Ricinus communis
  Intron number 1 from transcript 28196.m000204 (locus 28196 .t000004) derived from phytozome v7.0 (chr-ID 28196; pos 4 9265 to 51958)
gtgtttttgccgtccaggtctgtaacctttctcataaaccctactctcccctttcttcatcaccatctctccaaccgtcgctttcaactgtcatattctggttatcatgcgcatttgatgcaaatatggacatgtatccacatcttcttttttacccgtaatgatttcttaaaaaagaaaactataagaaagttaacaacagatgaattatactacagagttgttatccctttaaactcactagaaaaagcttaagaaacccatataatatatagaagggataattcaaacacttttctaatttggaaggaataataatttagtaccctccgaatcattcatatatatttgtaataacatgcaaacaattaattatccaatgaggcagcatccaattaataatttcttgttaattgtaattagcatcataattcatattattttatatcaatgaggggaccgaaatcctcgaacttgaagtcttacgaaagttacgggtgtatcagtactcttatttaatttaaatccaataattttcatttacagaaccttactggtttttatactgtttagaaacatataaggcgacatcctttccacccattctggagaagaaaataacatgtttgttttcaagaaaattagttgcatcattctcatgtttaatacatatgtttatttttgcctttttttctttatcgaagataactaaattatggcttttaattcttttaaatatatatatatatattatgaatcgaatagcactaaactttataatattataactctagctataatctttccacaattaatgtttctttagatactactgaagaacatgagtaacatctgcacatgctccccaccgaatgatccctatacatacatatatatatatatatataattcaaattgtcggcagtataaataaccctagtagcttcattatattattaattgtatacaaattgatttgattaaacaacttatttttttttttaaaaaaaaggaagataaatcatacatttggtaagacttgaacttgtctaatctaaaactaatcctttctttttcacggaaacaaatgcttaatatttattcttcttgcttgactattcttggttaacaattaaaagggaaagtaaattaagtctttgtaagataatatatttttctggttgtgttgcgtgtaattgagaccttggttaaccattatgtttaaagtaaactcccaagttgcatattaattaaaattaattaattaaataatttgttttcaattataccgctgcttcgagtatatctatcgtcattttataaatatttaattagtcattataacactatgtacatatttattatttcaattttttttaaaaataatttatttacaaaaaaagtgagttattacatctatacgtaaaatactggagcttttattttttaaatttggtgatgtttcaagtttgtttattatcattatgttaattcattacatattcaacccctattgctcatgtaatgagatacgtacgcctatattcaaatattagaacatgtttctctaatactcttgaatactcatctctagtacaaagcatgcgaaatagataaagataaaaagtgtttaggaggtggggttaggcttaatctaaaagtagctcaaaagttgttaatcatttcgttgttaataaatattccaatcattagctcatattttagtaatcaaatagggattggccaccataatttgtcttctttcaacattacaatacatgatcgagtttaatcatatttgtttgaactttacgattaatccttgtgctatatgtctaattttcatttaaaattaaaatcaatatcaacttatgtttgtaagaaaatgtctagttcatttacgcacatccaccaaaatatcagatattggtaaaagagcccaaacttttatatttatatacatgggaatatagtataaataaataaacacattattttgagcaagtacatatgtatgtataaacatttttttcttattttatatggaggttttcacttacatattaaattgatagacgagtgatatatatttattaattttaataataaatatttattaattatttagtataaaaatattgaatacatagatatctgtgtaattgacatgcttgttacaatatatacatctcatatgggcaattcgttattatgtataaacaagattggttagatgcatatttatgtctctaaattttgattatttagtcaatatagtattctaactttcaatttaacttaacggatacataaacttttttttttgtgatattataacattttttgacatatgtcttcattctgcacatttatatatatcgcacaaaagtatttaaatattattaaaaaataaagttgaagtgcatgttaggttaaattgaaaattaaaaagatatttagatattgaaaatgataaaaaatcagatatctataaaattaagtttgaagttaaaatgttaaatttactaattcagaagcataaataaatatgtatttagctaacaagatttgttatgttttattagtaaactgctctatttttatatgataatgcatggtagattaccaagcagcatatatcatttgacattttccccttgatttggtaatcaattttcaggcgacagaattgaa

SEQ ID NO: 6683 - DNA, 3218 bp, Ricinus communis
  Intron number 1 from transcript 29950.m001123 (locus 29950 .t000007) derived from phytozome v7.0 (chr-ID 29950; pos 4 5659 to 48876)
gccctctcgagatcttcccaaatccccctctccaggtacttcctatttattcgtttatttggtcgtatattctgatgttaatatttttttattatgttttttgtttaattttgtatgcgggttctttatattttatttgtttgatttgttaacttgatgagatttcttgttgctcttagtttatattgatccactcagttgatatttgtttatgggtatttgtatttttaggcttagtttgcacggtgttgttgattgttatgtgccattttgatttactattgtatatgttaggcattttgattttgtagtggaatttggctagtggaacaatgattgatgattgaccattgcacatgttgattttctgttctgtctgtttgtatttttgtaaaatttgcttcttgttctgaatttaactagggaaacaactactggttgttaatttggattatgactccttttaaagtgcttatgtgatgtttcacaggcccttttgcttgaagatgggcaactatagtaatgtattgtacagctgcaaggacatgtgtaatccttgatttttaaagctagatatgattttcatgaaagaatcccaagataatattatggtctttgtcctgtgcttctaagcagtatcaatttatgatttatgagctagcatgcttgtagtaaatgtgtgaagaatctaaaggagactagaaactgatacatacagctgtcaaattttggcttctagaataatgtgtgaatcgtttcttctcactaatattgtcaagagcatcgaagttttgacagaacaagaggttgcaaggtgattgtgtgaaagaagaattttagatggtctggagatatttgttgtattctgcagaaacttttctcattttctccactttctttttttttctttcccttaacctgacctgctcaaagaaatgcaagagaagcttcaagtcttcttactattgaagcttaaagtacataactattatgaacccattagttatgcgtgtgaaagtagttgactggaaataaatttcaaatttagttggaatagctataagatatcaccttctggggtcataaaaattctggttgtcttcttttttctagtgtttttgtgcttatctcttcagcttcttatgtatgcatagatgaatcagattattacatttttaaacattcttcatcctgtttcaggctttcgggtacaaacaaatgttacctccctctatcataaaggttaatggtcaggtcctttttgttacttctggagggctacctttgatgatcataagtagttagtagtcattttagaagcatgattctctacttgccttaccttctgaatgtgaactcccacaaacctataaatgccactaatttgcttattgtttactcattcattagtactccttctatgggcctacaaagacactggcaattcaataccttagtagaggtaagggatgagaggaatacttcaaatagcattaattttgttcacgggaataagagggcataataagattatggccctggattttgcattgctcttgttagcaagttgtatgtttctgttagaattgaatttagaaataggatcagtgacggtgaaactaaggatgttagttcagtgtacagtcaggagtagtacgaatttaaatattggagactcgccaaagttagaggagcaactatagaaaaatacaatatatatacatataacttttctaaacctaccctttcctcaccctgcatcttttgttagtgaaggaaatgtggaagtggaagaagagaaggtgaagggagaggagagagcttataccctactaaggattgagaagatgatagcagccgaacgcttgagaaaagagagtattgttcttatgtccttatactctgtcttatgctgagttcttgtggcaatatggaagccagtgacaggaatcttaacttgtttatttggccactcttctgtagtgggacaaggctctatgaaatagcaattaactaatttctataagttagtgtatgtgtcatgtaaacagaaaccgtgcacattttgatgcttttcacccttttcactgtttctgctggtagaacctcatgtaattgcatttaaaaactaggtagccaaatcaatttcttcctcatatgacttatggaaggtcaaggttagtagtgaaatgctcgttttatcaaatcagcttggtggttattggcgtaatatgcgcatgaaagaatagaggacctactacctctacaatgatgtggtggaagcctaattacctaagaggagagagacatgtggctgtaaagaataaggtattatgatacgggttttggaaccacgacagagatgcaaatgccatgtaaggttcagatggctacaaaaacttgaataaatgaaatagtggaaactctatgtatcactaaggtagcataactgaaatgaagaagtactatgtctattgtaatcatcaaatatcctctaattgaagggaaagtactaaaaactgcaatgtgatcagtaatgctgcatggtactgaatattggatcggaataaccaacatgcctctaagatgagtacagtagagatgatgctgaagatggtgggtacgagtaagataaaattaggttgcatgtatccataaggaagatagatgtagcactctttaagggacttgtggaggcaataactgagactgttttattatgtccattattcattggcagatgcactcatatcaaagtctgagcatgttcgaattatggaagggaaaaagtcaacaaatgtaggatgacgtcattgacactgcatgaagtggtaaaatatggtttggcatcttgagacctttctgaaaacataatcataaagggctactgcattggagttaaccacaatttatatgcctttccgtccctgaccttttattcatcttttgtgctgtattttttcttcttgccattctttcttttatataaaaaaggtcactggctttgatctgcatttgcacatatgcagtatccacctgtactgcattttgtggcttacttaaattctattcgcatcgtgtttcctgttctattatgacatatataatgtttccttcttctcaaaatccatgttttgtattgtttcctaatgctgaatggcttgtttatttgttgtcaacccagtgctgaattagctattacctttttgaataggttg

SEQ ID NO: 6684 - DNA, 5420 bp, Ricinus communis
  Intron number 1 from transcript 29804.m001536 (locus 29804 .t000067) derived from phytozome v7.0 (chr-ID 29804; pos 9 52636 to 958055 reverse strand)
caagcactaggtcagattctctctccctttctcttctaccttttcttttcttttggaattttttctaataagcgcatcagatgatgaaaaattcccttacctaaaaataagccatagaggagcgcattactcatgatactgaaggaaaaaagataaagataaaaccaggaaagaaaaaaaaagttgttttctttctctctctctaatcattcacttgttttgatgggtgatacactttctttgtttttaagaaaaatggatcacataaatatatgtatatatgttttcttgtatgctattatgtatagttttatggtttttagctaagactgtatatacatgtatatatatatatatagggtttgtgtcatgacataaaataaagctgcctctttattcatccaaggaaattttctttttcttagctcgctgatctgatagcctgcaggtagattattatattatgcatgttgatcattctcgtataaattgattgatctagtctaagagttccaaagatattcaaaagatccatgaatatgataattattaagtcttttttttgctagaccatgtgatgagttagccgatattagctaagaagcatagtagagatttatttccttcagagaaccttgtcaatgaaagtattccttaagtagtttccaacaagaagcactgtaattaggacaagaacaactcctatcaatttataccatttatttctcaaagaacaaatcctgtcaattaggaaataatgtacatgtatatatattattctctgaaacctggaagaagggttcgaaaagcatccatgttactatgtatgaatgaacatgcgagtctgcagctcttttactaggtctaatctgttttgagtgttttgtccggattttttctttttcaagaaatcttcttcactataatttacaacaatgcatacggtttcttttttcaggaaagctaaatatggtttaattaggatagttacacatttttttactttattaattgctactttagaagtaaaaacgaaaataaagaaatacatttagttaaaatgaaaaggcaattattaataagaacaaaagaaaaaggtaaaattaacacttcagatgtgaatatatacttctgtcatatgaagtataaactttagtataatttcttattgttcaaatgggtatatgttatagatcgatctactatatcaagagcattaaataataaataataaataaataaaattaacacaatatttacataatttatcctctaattaggactatggtcttaagagaatagcatgtaatctcaatttcctttagatataactaagttatttattatatcaacccccctactaaattacaactaataataaccctcaacgttgggctagagctgaataatctctttctcgatacttcaattgatagggataattgcatttggtcctcccctattaaaatttcgtgctcgattaggatataacaatataacaagagttctgacaatatggaaaataaaccttcataaatttaaggaatattttttgccacttaaactaggtaattacctttttcaagtcctagaattgtgagtcatttctcaataataacttcatcagaagacaataatcaaacgactatttaaaaaaaaaaaaaaaaaaaaaaaattctctctctctttttcccctccccctcctcttgatgtaattatactaaccgtcgctaaacatttcatttagtttcaatttagtcattgaattttagtttatattgttttagttattcaacttctatttttgtacactttaatcatttctgtcatagagagattgacacatctcattattctcttctaatcacttcttttaattagtataaaacaaaaatgactgaattataacataacaaaatgtgaatgaataaattaaaaattaatggtcagattgaaactaaatgtataataatcatttctagatacttagcccgattaatatacaagcatttggtatacctaaggaaaaccaagttagatagcatctagaaaacatggataacaataaattttactgatgaactggaaaaaggaaaaggaactgtctggaagccatggagaatacaagtaaaaaaaaaaaaaaagttactcttgaatccaatgttacatatcatggaacgactatttaaagctctccttattagggttagtctagttgatctttcaatagtgtggggcaatggggagttttccatattcaatctgcaatctattaattttcactaatgaagtatattacttttatgatgagaattatgctactttgaggaaggtcatctctttatatacggagcccacggtaatatctatctttcttcataataaaatagtgcaatcgatacataagtactatataattattagtattaaatgattaaatatgtgtcactcattcaatatacacatttaaatacttatatcatatgtaacttacctattcatttcagtgtatacactgaaactttaccctaaaataaatcctaaggcaccatgtataaaccctgatccccattagcactcaaaattattgccatatccaaacgaaatcataaacaaactaacttcatctaaatgatcattatattttgatgatctaaaaatcttaagtggctctaagttaaaatagttatctctaaatctatatcttttattttcctagataccaaaacctaaaatagaataaagaaagcaagctttgtgataataccatccgccctcatacatcacacaatcttattccctctttaatactataataattatggaacatatgatcaaagtatgatattacaacctcctatatgctaatcaagcaaatatgttgaatacatagttttggtgcatcagaacttcaaatgtactaaacttgaattgctcatggttcagttaatagaacagtcgaactgttagattcagtttaaaaatatatttcttcaacctaaacctaaacaatttaactcaaaatcagagcgattaactaatatttcagcttttcaatttgtaagcattggaatttcaacttaagtttcctctatttagtacaaattcttcattctttatttatttgtctcttgaaattcacaagtaaaacagtcattaataattataacatctttacatatatactctatgtacaaattttattttatttttaaacaagctcttactataaataaaataaattgccaaattaatgagttgaaaactctattagcaatatctataaactaccaaattattccgtaatgattaataaattagcatccaactatacagaaaataataagagtttgaagttgatatctccttgattctataacttttctataattctactcgatttataactatgattatttgaagttgctgtgctgtttggaagtagcatgtacaattcttattctttttttcttagaaaaagaaaactctttctctaaggtaacttagggatctttgccagcttacccttcatctgcaaattgtgttttggtcatctccacttaggatatatttagctgcttttgctagctcttgtgagcttcaattccactatatatttgccacttggggtttaggaggactcttattcaggttgtgtggtggtactctttctttggctatcattttctaaaattatacatttatcgaatttttcatgtcagtatctgatatagagtgataatctaataagagactaacatgtaaaaaatagtgaatggaatttaactaagtgatagaaacaaattgttctctttttgttagtagtttgttttgcctattttcttattttattcttttacatgttagctttttattaattagattgtcactctatatcgatattcacatggaaaatcgattcagtgtacaaccaactctctttttattttccttttctatgattggtcgttttgtttgttcaagattgctaaactatatgttaatagaatcttagaatcaatttaaattgtaattaattgattttgattttgaaatgctaggttccttgttgataatgagtagtttgaatgaactcttgtttgcctaatttgcatatattgatctagttttatataaagtataatttatcatgaaccgatgtgttatattgttttgaacttaaccttaaatggataatcttttgtatcagcatgtgcaacttgttcatgaacacatgaatctttaatcaatctgcatatatactttaggaaataataattgttctatttgggctagttgtgatttcttatatcggactttcacaacacaaatagtttattacaataggttgtatatattacttctgaacctcaaaatacttttagtatcaattgaattatgcccaattaatatcaataattaaattctaaaatgaagaataatgacttgttaaaataaatgttaatttttttttttttactttatacattacttaatatacatgatattaaatttccttatgcatgtgtgagatggcttgtcatttgtggagaaggtgaacttctatatagataaggtgtatgttttatatacaactgatttaaaacccattaattgttaatttggagaatagtcgactagaaattaacctaaccttacggtatgtttgattggaaggatggataaggaggaaggaaaaaaataaaataagagggaaggattacaaaatgcattattttttatatggttggaggaaaaagaaactagaaagaaaaatggtctttgaattgaaattatagccttctaacatttggacaacacttgtttctttttattatttattttttttataggtgtttttttcattattaatcatatttttaggatgtaatgaaacacataatagaattacccttacactatttaaaataaaattcatttaaatttattgcgttatattagcttgtacttatatctcttgatagtttagagcccattagttttcaaatttgattttaggtagtcaagaatcttcaggtgattaattaacaccatgctaccacaaattagtttttgtatgaaaatacggtattctacaatagggacaagttgaactaaagaaataagtatagcagtgtacaatatgatcaggttaaaaaaacattttcataaattaattggatgaagtactggtatttgacctataatttggcttgataatatttgaaactaaataagctttaatgacctctctttctttctaatcagtgttcctctttttctttttcttgtttcttttttctcaaagggtttggtctctgaattttttaagtgtatatgtctacttataaatgcttgtccacttgtttggtctgtgctcctcggtgattttcttgactccctgcttcttcactttcagt

SEQ ID NO: 6685 - DNA, 1534 bp, Ricinus communis
  Intron number 7 from transcript 30143.m001185 (locus 30143 .t000024) derived from phytozome v7.0 (chr-ID 30143; pos 2 08440 to 209973)
cgctccttacttttggttggggactctacggacaggtagtttagactactaaacttgtcgcaatttatattctctcttagtcctcacccaaatttcttgcacgctcaccagtatgtgcattcatttgtgcgtttgaggaagttcttattcttatctcttctgtcaaagtgcttgttgttgctgtcattcaagatgttactggggtagattttgattttgcttatgctttttgtagcattagcatcgccaaatggtttttgcaggagtatcactgtttcagcaaattgtctttctacatgttaaccctgtttattttaagtctaacagaatcatatgaagtttatcaccatttaataattggttacttactgtactggtctgttgaatgtgtggtcaatgactcactatttttggttatctagagatgaatccatctgctccactttgtactaggttattcttattaatggcaaaattagcttttccgtcaccttacttatgaagtaacattttgctttttggagtttaagaatattcacttgtactttttttattttcttttatctatatactgtagctttattgattaacttcctggccttgggtttgttatgttttagttatacatatttactaaaatgctgatgcaggatagcatgcaggttagttgtttaggactaaatttgaagttcatgaggaagtgatattagagtacaacctctagtggactagagaggctgaatttataggcggaagctagcagttattgcggaattttaattctggtttctgtgaaaagtaaagaaaaaataggagaccctcgtgtcacactcacttctccttagggatcccactgagaatcccataaagactgtatcaagactagaaaatgctcattgaaatcccaaattagcccatttgaccccaagctttttaaatttttcaacttgaattgtcattctttcttgagatccttgtctgcatattaagataacttaaaaaaaatccctgaatgatatataaagagatttgcctcctatagtatccagtgcttgcttgtttatagttaaagcctataatgttgtctgaatgtgcagttgatttaatccattaactattttacctgttgttggagttggaaatcattttgtttttctgcacatttgatttcttgattatcaaattagtttatggtaactctgggattgggtgatactctcaattaactgcttgctcaaaacatttcaatctttgcaaccttcactgtctggttggagtttccaatattaactattgttcagggtcaatatgtaggtaaagtagataatggtgaagaaaaaagctctgtagatgttgaagatgaggttcatctaacaagggataatctacttactctatttcttttaaaatgcttatcttgttttattttctcggtactaaattgtttcttgcatgtttaagttatcttggaaaaagggataaaattaattccttttattatattcttttgttaagtgtggacaagggagtacag

SEQ ID NO: 6686 - DNA, 775 bp, Ricinus communis
  Intron number 1 from transcript 29625.m000714 (locus 29625 .t000041) derived from phytozome v7.0 (chr-ID 29625; pos 2 11962 to 212736 reverse strand)
gttttttggaggtatccatttcttacctccagttttatttctttgttgctctaataataaattcataacaatgggcaatgataacttattcttatgtaaatgatagaaagctaaaaactagggataaatttagaagaaagaactagaactttcattggaataaatcctgtgtaagaatcgaattgaaatgaattctggcaatagttttgtcatgtttagcgtatttatttcaaaatgccttgtaatttttaagtcaaaagaattgaattctagtaactataagctttttggacagaaaaaattgactgaactagaattgaattgaagtcttgcattttagactttgcaaaacaatatttacattttctgatcgattttaatggacctacaaaaaatggatgctaaatttggtacacacaggttttcttgcgtaattttgatagtttctaaagcatgggatattgctgatagtcatatgttggattttatgtattttgactgcaaaatagaaaactgaatattctaaccattgtaaaggatataactgctggaacaaggataacggatcaatgattatttctttcttgctcattggatttctgttctatgatttcagttgctaaccccatcaattttttgagttggcatttccagagttgaagaaattgtttattattttcacttctatatctgggctctttgaagttcttgattttatgaatgctattatttgtaagatggtctcaacaggtttcggacgagggtgacgtgcttt

SEQ ID NO: 6687 - DNA, 2553 bp, Ricinus communis
  Intron number 5 from transcript 29820.m001017 (locus 29820 .t000038) derived from phytozome v7.0 (chr-ID 29820; pos 2 15419 to 217971 reverse strand)
ctacaaaaggtaaacttactgcttgacttgttagttgcttcttttgatgcatttacctgttcgagaggtacaagaaagtataacatgttaaattcacatagtaggagagaacacgtattaatttctgcaatttgctatactttagctgcaaacttgaaagtgtggaacgtcatgtgtatactaatcccctctttgtttcacgaaaataactttctgacaaaactgtttttgagaaagtgattcttaattttgtcatttgattgcattactgtatcaattgaaaatcatttcttggtatttggagtaagagcatctccaatgcactctttatagacgtcaagttcttttcttttaaagagtcatctcataaagtaagattttaatggtctgtttattctttaaaaataaagtaagctggtttgattctctatatttagagagccaaatttcactctttattttgattttactaaatattctacaagtatctatgcacttttttaattagtatctttaactctatttcttctattggcaaaagtaaaaagaaaatcacaatgaaattaaaaccatcaacacttatgggaataaaagtgaaataaagataaaaatataaagtttaatggacttaaaataagattctctttatatttaaatattccttaaaatgctctttattttatgctaattatgctctttaaaataaaaagtatcattgggaatgctcaaagttggatatgtcattttttacaaaaaacatggcataatgattgagcctcatattttaaaatttgtagttgaatttaaatattagaagaaattatgcaaaaaacattaaattgaggttcttgctgctggatatgtaatggtgggtaatttctttggttacttgcaataggaggtagtttgtggtgtttggtagactaattaatatttttttgtacgtctcttttatagattcttcccctttatgacttcacgaactttttccatttgaaaacgaatatgtggtttccccggcggcaatagtcttttatttagttattcattttcttttactactaattctttttgtttgctaaccaattttcttaagcattatgaacatctgaaatttgttgaagtttttcttgaaaagtgtttctgttttgccaaacaaacggagctctaattttcgtgtaattttttaatttgtcatccatctagcaaatgatatttaaaatgttgttttgatttgattgctttaaaagttgatttaagtttaggacactgcatattaggcttaattgccaaaataatcctatactttgcacttgttattaaatctagtacgtagtctttatatttttttgcaccatgctttaacattgatctcaattttagtctctagaaaaattatgaactaaatttgttgacgtggcatgaactctagtgacaacaaaaataataatagacttaatcagcattctcattaccaaaatgttgtcgtttgagcacataagattaatgaaactccagagttaagaaaagaaaaaaatgaattttatgtgcttaaacgacaacgttttaataatgggatgagttaacaactctaatattgactcagctctttttgttgtcgccggagttcatgttatgtcaacaaatttagcggataattttattgaaagttaaaattaaaattaatattaaaatatggtgctgaaatttaaaaactacgtgctagagttgataacaagtataaagttcaggatttctttgacaattaaacctttatattaatatagaaacgaaaaacaaaacaacttgtgattagggtctataaaaggttgggttctattcatgcagaaagattggcatttttgatattatgtgacaaatattattatgcttatgttgtaaaaaatttggcatgcatgtggtccaagatttagacttttaaagatgttgatttttctcatttcgggcaattggatatgtagtgcaattccctttctcttagagagttaatctttgttcagactcctaagctttttaattaggttgagaaattatggatgaagcatattctatgagtattaatataacctgaaaagtggaagcagtaggtatctttgcatcaagttgaatatataatatctagtagtcagaaaaattaaaagttctagtgcaatcctgagaatggaaggagtgtcttctcttgtgattaaagttataaagcttttatgacattcaggattttgtacacaatagaatattttcttattgaagagggtagattttgtacaaggatactttcattttaggttccatcactcatgcttttcctttccaagtaatcttatgcatattttatgtctgtttgaaattgcatacctttatattgttttggatttctgcccctgtatcctcttcatattcttgaagaatatctcagtggatcgatgtttttttttgaagctgatcgatttctggaccataattttgccttcttttcttttttcttttctttttctgcattccagagatttgctcttgctgccgtggaactta

SEQ ID NO: 6688 - DNA, 2216 bp, Ricinus communis
  Intron number 2 from transcript 29739.m003593 (locus 29739 .t000029) derived from phytozome v7.0 (chr-ID 29739; pos 1 67638 to 169853 reverse strand)
agacgttgaagagttttaccagcagtgcgatcctggttaggatattattatttctattattattattgttattttcttttaattttttgtgaattatatcttttatcttttttaagttgctctgtaatgaaaattaagttttttttttggaaattctaatttagaaagtttactaattttaaattattttcttattaaacaaacgtactgatagtctctcattgtctaggatttaatgcctttttttaaaaaaaaaaaaaaaaaaacttcaggcataactatcaagtctatatgcatgcaaaattcagctttataattcacttgttgcttttagactttcctttgaagtttggaaatatagtaattggttcttgagattgctgggttgcttctttgtaggtacaacaaatttaggtttcataagtgctttgtgcatgtagaatgttcgctgtcctttgtttgtttgttttgaaaagctatgacaaaaaagacatacaatcttgtttatttgtcaggagaataaattatttggtttactggatattggtttcctgggaacacgtaaaagtgtacatgtggttaaatatgtttttactaaatgttaagcaagttgaactgtggtaacaggtattgggtacttgtcattttacttctgactggaatccagaatttgatttttgtgagagtgagtttgaggagttggtgctggcaatataaataatttaagaacttgatcaagtttcagttatctgctttgatttctcgtaaaagaattgccaatcattataagttttatatattgtattgatttagttatatgactagcgcttctgcttccacaggatatcttgttcattgaacttcatttttttttaaataaatcaatcactagaatcagattctccttgcattaacctcctaagatctgaagtgtatcacctagcttgaaagactttctaaaaaaataaattattgagctgtgaccaacacatcaaatcaaccccggacagtggatttgcggaaatcaaataaaatttgcataatggtttgtgcaattcaatgaatgttaatccaggctagtggatattgcaatttttcttttttctatttccctcgtgtccacaggggcttgaggttctatccttcttctactttctgatgtgagaatagtagcataaattgcaaattagaataaagaattatctgataatgaaatgattactggtggttcctgtactcagaataggctgtatatcagttcttgcttctttctcataaatggtgcagaatctgagtgcaataaataaatgcatgtagagatcatagaggatttgattattggaaatagctatcatcttattatggttactcatgtataatagttacgtatattgaatagaaaacacctactgtattagatgtattcttgtttggtcttccttactgcacctaaaatatttgtctagacatattttgtgatttatagatgtactgtggattgattctgttcttggtgctaaaacatgtatcaaagttgtactcatatataggaaatttggcaaaaagttgtcatttctggctcaaaagttttcatttcagctaaattataatcattttgatggttagcttacattaattttggttagaatgaaaaaacggattctgactttatctgctaatagtgtcactaaaaacaacagtaatgtgaagcgtacctctgtcaacttgccacaaaggtatattgccagttagtccatatgtcgacagtaactatggataagcaagtttgctgacatcatttgttccatgttcctactctaacataattgggttaacatggacttaaaattatctcaactgcaaaagtaagcataataatgcgacagatacagaaatgagaagctgtatggggattttggatgtaatgtttggatctcatgtagattactgctaagtcggagtattcagttttagagaccaattcatagcttccttcattattaggctctttttgcttctctctttaactacatttaatagttggtgcctcctttgcatttgtccactgctttttgtacgtgttaaatgttgacatataaatgtaggttttcaatcctgtttgttattctgctgaacgtcaatgaaatgctaaattaatggtgattcttatatgtttatctgaacttttattgcagagaaggaaaatctttgcttat

SEQ ID NO: 6689 - DNA, 1644 bp, Ricinus communis
  Intron number 12 from transcript 29696.m000106 (locus 2969 6.t000006) derived from phytozome v7.0 (chr-ID 29696; pos 86179 to 87822)
cattatctttgtaaggtttgttacttggtgaatttttctcatgaagattgattattcattgaactgatttggaattctatgggaacttatattgttttctgtggcttaatgtgttgatacattctgtgcatctgcatttcttttattccagtaaaatatgtcataactagaaatagatctggaatagatatttattttcttatgttacatgctcatttaggtaaatttgacatgtgcacacacaacatgaggtagccaataactgctaatttcaggttcaggcgcccaagggactcaccaacccatcaatttggttatgcaacttaccagtctgctactttttggatcaatgagtcattttatttgggtttttgatttgtcagttgcattcactatatatacttatgtctcattggctgaatcaggagaacatgcatacagcattttagtttgctacatgcatacatatcattcagagtgttgttattaccttctcagaaatgcactctagatctgtagaaattcaatggtctatcttttcatagataggcagaaatgattttttcgcccatcagtttgccaattactctgaaccagttgagtaaaaaatgcttcttataggaaatggattgtattctgagatagccatagggtcaaccttgagtaaattttctagttggtcaagcaacatgtaacttgtagtttacatatggatcttgaaaagattgaggggctaaatttggccatggaataatcacaccaataactgtgctccgtctttctgcaaggcatcatggggactatggaaaggaaagaaaagtgagggtgaatatgttgatgagtaattatcgtatatttggattaagatataactgtaaatgaagaacctataaaggtgataaaaatggccaaggtcttattaagttgtggaggcaagtccaggtcaataagacattgctttattttactagtctccaattgcttctttttttaattcttttccttttggatatgatcgggtttttgttttcaagtgtttatatacctataactgaggggctgattttcaggtttagtattttaataccgtaggacagatcatattagatatacaaaactgtctccatacacctattccaacttcttaatatgtttccttttgaaaagatccatgtccatttagcggaaaagaaaatttgctggattcttaatattcttcgaggtgaactgtccaaaccccagttttaactctgtcatcctttaattatttaagtttttctacggatttgatgcatcattgatgtgcttgttcagtttatgtttgttattttttcaattttctgatttttactattatttttgttttcattaggtgttttttcatgataatcttttgtagtggtagacacaagactgagtagatgataaattgtgtatacatgcagcaaaccaggcttcttaccattttcacaaagtcttgtttgtttagtttgaaactttgggcatcaaactttaagatgctatgttttaggttatattatggcagcatactattcctcattcacaagaaaatttgtgaatcactgtaattctgattgatttgctataggtgctggctgacaagctaccagaacttctagattt

SEQ ID NO: 6690 - DNA, 959 bp, Ricinus communis
  Intron number 2 from transcript 30138.m003905 (locus 30138 .t000079) derived from phytozome v7.0 (chr-ID 30138; pos 5 61805 to 562763)
ccacacttgacccattttcagtaagttcttaatctttttattctatgtaattaatttgtgagtattttcttagtagaatcaatagtttgagaggtctttagagtaatcaactgttgacattctttatttgtttttttcatatactagtttgttctaatacttcacatggttcttgaaacttttctctgattatgttgacatcttcacatgtttctctatttgcaacagttagagtactcttcttgaggttaacgagaatacatattctaagtatgaactatttggacaagtttaagaaatgggatacttgaaacttgtttctccaatattattcccattttggtgctcatgagtgtcaattttatgtgtctgattattgtgcatacctggacaatagagcatttgaggagacaaagcataggttcaagttggtgttctccaagagttcattattcctgggcttttcatatttcctgctttaacttatttattttctagattgtgagattttccatatttaaatcttaggcttagtttttctctcatgaaatgtgcatgcgcctctgatacccatatggtggtggtgtcttctatactgttccttggagttcttttaattactttttaattatttatttctgcagttctcctttcctttgatcatgtccttctatggatgaccactttgagtttgccaaggagcatggcatcgaagatcatagtctcaagatatttttaggaaaaaatttgcggtgctagtattctggagattaactgaacaagtttaagaaaaacccatcttttacagttgtatatcatcaattttagtcttgaaacgagtaaagttgaaacaagcattatgtttatcagtttcaagatctataatctacatgaagatataagatccttttatgacagtcttttttcactgtattaggattcttgacagtgaagaaaac

SEQ ID NO: 6691 - DNA, 1900 bp, Ricinus communis
  Intron number 2 from transcript 29654.m000303 (locus 29654 .t000005) derived from phytozome v7.0 (chr-ID 29654; pos 1 03194 to 105093 reverse strand)
cctccatcatcttctccttattgggtaattcttattacacttgattattttgaatgagtaaattaaaaaatttaaaaaatttatagaataaaatttaaaatataaaaaatattaataaaaaaacttttataaaaaagagagtttgggggatggccccttcttgccccttgtgaaaagggtcaaacatttctctgaatttgtgttactggattacctcctgttaatatattaaaatatttattcttttacttttttaaatagtaaaatatttttatttttttatttattttttttatataattatttttttctcgtaataatgttatttctaccattctacttctatcactatcgcatttctattttcaccattgccactccgccgtctttatctaacacattagtaaaccaattaacatcagtaatactaacttagtaataaacaatctattcatgtgatttgaatatgaccaagatttgaatatatttagtcttaaaataagagttgaatgaatatgagcctaagatgtccctttcaagagttaaatttgtagaaaagtttattagtgtaatgcaattattgaaaagattggcatgagctacactgaaacttgaaatttatcactctaaaccaacaaaactactgcttttgctttgttaatttacttttttcttgtttcaactttagttcatatttgcactcgtaaaattagttcggcgttaaatgttatctcaatttaaataaaatcttaaatttaaatttctttaccttcacttttcataaaaaaaaaaaaataattctaattttattctttttacattacaaacttggtaaataacagtacgtgtatatctcaattttaaaattatttgaaatttaaatttcttttcctaattcgtaaataagaaaataatatttaattttttttaactagttaaaagactttagtttttatatgtcactttagtttctatttgataatttatacaaattaagtaacaatatagaatgttatattaatattgtattaaatataataaaattaacagtgcagttgttaagttaatttattatttccgatatatataaacttgaattagaatatctatcatatgattttacatttattctggttttttaaacgacaagtgaaaagatattcaaatttaaaattatatttaagtcgagatataaatatacatattattagattaataactctatgatttttatttgttttcaaaaatcttggattaattatctcatctcagtgtgtagtattggcattgttccaccaataggaagcatatatatatatatatatatatatgttcaaaatttgtatgcatcacctattattgttttagtcttggaatcataaattgcttgagggaagctaaattaacaattatgtaactgtgcaaaagggctcagaaaatgggtacaattgctcatgcaataattttgacaacagctttttcaaatttgtgctccaagtcatattattgatattgttggaaaatatagaatttcatatttaatatatatgtttgtagtttcttttaggcaaatttataattaagcccatgaacgttttttgctttatctattgagtccttgaatttttattttattttattgagtcctcacacttttatttttgattttatgagacttttatttttttattgagcccttatactcttaattttacttagattaaggactgttaggtcttcaataaaagcaaaaataaaattacaaaaattgaatgaaataaaataaaatttgaagaattcaataaaataaaactgaaaagttagaagagttttgcttttcttttatttacatgtgttttatgcagttgttagatcctcacccaacagttgtggccaacaa

SEQ ID NO: 6692 - DNA, 1599 bp, Ricinus communis
  Intron number 3 from transcript 29624.m000325 (locus 29624 .t000007) derived from phytozome v7.0 (chr-ID 29624; pos 2 63802 to 265400)
gaaacacttctagttttgaaacacctaatatttttgtaaggaattttttcattgcacctttttctcctttccacactatgtttatgtattttttttttaattatgatagtttaaacctgtaaagaattttataaattattttgcaatggctttctagttaaatcaaatttggattaattactttgcactctagaatttgaccataattatcattagatccctatagtcttaaaatcaataatatctcgtagtttaattctgtttgttgtttagttcttctgatgaaaaggttatattatcctgttgagtggacataactatgcataattattagtaagttcgatcttctcgtttcaaaataaaattataataagtattcattttaaaaaaattatttaattatttatttaatcacatatgtttattagtttcaaatatttaagtgtatagaatacaaaaggctgtccgaatcctggaaaataaggtctcctttttttttttcccctttttagttaaggtcaagtgggtagagtcaaatggataaagttggtaagttaattaggttaactagggtggattagctgctgaaatgatgcgctaatgggacccttatgaatgtgtgtaaaattatccatgtgactcacatgtcattctccacctagctcaattttgaccaacactgagattttgccaaaatagctctcaattagcaaattcatggctaaattgacaatatgtaaagctttggctaaaatagcaaaatcacataaacctttggatttttatggctattaggccaaaaaaagttatattataaattgtaataagtttcaaatcataatttgtaaagacaatatatattgaattgaaatacaacaaaataattgtgatagtttacttaaaaatttcaattgtatttattcagattaatgatttttctccagatttttttttaattattattcgcttcaatttattcataaataatatttaatttcataaatttttaaaatttgaaaaatgagataatcagtgccttgggggaatttggagattttactcttagttctaaccttgtttttcttttgttgatttgatatccttggagctgtttatttcttttccttttgtgttgattatttgaaaattctaacagcaataatatactgaactaaagaaaattataatttgatttttaaagctacaaaggacctattactaactagctcaaggatataaaagtaattgagcctttaaattatcttaatgattgatgggataattcattatgttaatatttttgtaatgattaattaaataattatttttcctcagaccaatatatgccatcacttcaatatttttgattttttggttttttatgattcgtcattttcccttgaggtagagacaaagatatttaaatcaagaagggaagagtaggttgaggttggatgttggctctattatatgctatttctgctatattaaaatttgatatattatctattataatgaattctttaaactaactgttatttattttgattcaatttctttttaggaaactcgacaaaaattacttcacaggtccgttgc

SEQ ID NO: 6693 - DNA, 1521 bp, Ricinus communis
  Intron number 5 from transcript 29864.m001459 (locus 29864 .t000035) derived from phytozome v7.0 (chr-ID 29864; pos 5 41079 to 542599)
gtaaaatcttggacactcgtttgaaacttaacaaggtacaaaaaagacagaaaaagtagaaaatctttttgatctcttttcctttaacttatcttttgttggtttctttgagaatttttctttttaaaaattgggttatccaatcattagatggaaataaagggacagttttagatttttacacatggggtaggggtttattagcttattattaacttaaaaagactaaattattattaagttgaaagataattcttttctttaaaaaagattatgtaaaagaaggaatagcaaaaaggatatgaagtttttttttttttccaaaactgttctttgtgtgcatgtagtcgtgtagagcaattttcttttgctgttgagattgattgacccacttctcaggttagcagaaaatgacattttatgaaagctgtatggccttttctgtttctctcattaatcatattcataaaataattttttagtcttgttttttaatattgtgtctacaactgagattggttgatttagctttgatgtttctgtcatgctgatctgcttatccaatttttagaagatatattttgggtttgtgttggctgattgatatttgtccttctcaaaactaacataatctactagttaccatcaactttatagaaatacaagttagcatgattaacatgacttgataaatcattcagatttagaaattaatgaagttttttgtttatagattgagtcatcattagacttttattaactttgtagctacacttcaatgttgttgttattataacaatattagtctttttaaactctaagaaattaaccagtgaatatcaaaaaaaattaaggatgtggtgtttgaccattcttgctaatgttaatcatgattactaaccaaacttttcattgaacttttttagcagaggacccctaaaaaagaaaaaaaaaaccataaatttgacctaccaaaatgtcaaatttcaatcatatagccatgaactgatttggcttaatctttcaccatccgtccttttgccttttacccctttatgaccctgtaggtcccttgactcaccattttgcactaacctgcacaatgttaacaatggcctgtggccaaagaccactactctggagttgagatgtcatatcaattcaatatataagaacaagaaattatatagtcttgtccatttcttcatttaatgttctgtttttgtcttcatttactccaattgctctcaaggtcagaaaattttattaattgagcctttttccctaaaattgctatactacactggtttttgggaaaagtcccatagaataccatttctatgccacgatactgcatttgcacatattttcttggtttgactttgaagaatcttatttgggtagttgttgtcttggactttactatttatttctacagaacgcataaccttagtggttgttaattttgtgcatgggtttggggcaggttgttagagaaatacagcactcgagaaacggtgt

SEQ ID NO: 6694 - DNA, 1090 bp, Ricinus communis
  Intron number 3 from transcript 29589.m001264 (locus 29589 .t000043) derived from phytozome v7.0 (chr-ID 29589; pos 3 13211 to 314300 reverse strand)
ctggtacaatatcacagttactaaggatttttttggtatgtaacactgcttatgccctttcattatttcatcaaattttcttgtacttatggaatttctgccttttttatattttgggtttccatagagaaatttgtttcggtcaatctcaatgtgatattattaaataacaatatgtcctggaagaaaggtcctttttgatgcttgtttaaccttgatagggaaatgttacttcatgttttctatgatattctctactgaaaatacttctggagtttgtcagtatagcttagttcataatggcataccatgggtataaaatcagttatagactgtgtaatcaaagtgatagttggacttcagtgctaagggctgttggagcctagtaaagcttaggaactttcctaagcaaaatggaggtgcgtaatttgcatatcaaatgtttctatttatattggtagattcttaagtttttaatgtaggtcaaggaggttgacaattagtaacaggtgtttaaaatatcgcaatgactttagcaattaagaagcacttgaatcagaaaagataatgataatatctagtcttctgaacctgtcttccctctttctctctctccacaaatattttatacaatttctcaaaactgctcagctgctataatagttcgaagaaatgttgttgtttactagtggttcacacacagaggcagactcttttgcatgtaaatcccaagcctgggtgcctgcttggtgaatgcatcttaacttggggcttaagtgttaaaactgcctccaatgatgatgtgtagatattgacacatctgaaatcctgttaggtctgaaattaaagtaggaatgatgaagagttaacattgtatcttcaatttgatatggtgtgcattgtcttattttacttcaattgaaatttgctaaattaaattgaaactgaatgttactcatttagtgatttgagtgattataactgaattgtgtcatcttactgattttgttttcttgtgacgaagctttaaaatgcctcctatgtggatctaattgcaggtcacgcccccgtctccaattgtattagcaac

SEQ ID NO: 6695 - DNA, 4429 bp, Ricinus communis
  Intron number 1 from transcript 29827.m002547 (locus 29827 .t000020) derived from phytozome v7.0 (chr-ID 29827; pos 1 24502 to 128930)
gcggcgttcaggtccttctatctaattttctctatagactttttcttcttgttaattctgtggatgcgtcttgaaatagatgtaagtgctaagcaatgtaagaataagaaaattgcaattggtggttcttagtgtcagtttcagttttttttattaattattattctcgatttgggtctttatcagggaaattgagtcttatgatttagtggtgaggactcttttttgttgaatagttattgaagcttgagaagttagtagtcgcaagggtaaatgatatctgtgtttataatctgattacaattatagcattagtaacaataagaaataatagcctgaaaactgcgaaaagagaattcagaagagtgagatataaccaccaattatcttttttttctttttttttttttaattttttttttttagtgtttactctttaggggaagaggttacttgctaacaaggtcataatattagaagggaattataagggagtttgatttcttcctccaaattttctcttactttcaagttgcagccaataagtgctacttgcagcttcctattttacctgttcccttttgcctccctctggcctttacacatgacacatattttatgattattatgagtaataacaatattggcaagcttatggcattttggtcgtgttaactttaacttctgagccgctcatacatcattcccttataagtatcacagtattttactatgactgcctgcattccaggagttgcttgggtacttttacaaatagactttgaaccatccgattagacaccagacactgttgtgctttgttaatatgggccactcgtatgattattcatctttcctgtgaggtgctaagatacatgcatgcacaagcacagaaactgtaagatgaaattgtttgtggctgtgctgggtttcttctttgcttaatttttggcatggaagctagtccatatctgcttttctcatggaattttgaagtagagaatacatcacaagctcacattttctgtgtgagaaaagactgaataatctgtatccccattatcaattgcatggtcagtggctactttctagttacttgtggcctttagtgttctccttttctagggtatgatgagctttgtccaaagagaaagttggattaatacagtgctggagtagtagtcattgggaatcactaatgttccacagagattgtgactccactgatgttatcataagtcatatgtggaaaattttgaattatttcagttacttgaaagctaatgctgttatattcttttttcttctggacctgtttaggcaattaataagggaaatactagcttgcagtagacgtatgtacgctactttacctcatttgggttccaatggcatggtcgacacatcacatgagtgggtgtttgtatagctagtgtagacatgagatcttcctaccaaaatcatagtatggtggaggcataggcattcaggagttcccttgaaccccagatccagccaggcatggtttggtagaaattattgcaagagtttgtaaaactgtttacaataatgagaagcctgttcctctttgaggtttactcctcatctttgtgaaaccttatattcaaactccttttctcaagattttatttgtaactcacttcttttcttccttttcttttattcctctcatttttatttatcgctttctctgttgccacttccacctcttgcacttctttctaaaacccttttgttggggtttcacctccatttagtactttttcaattctattccttctattactaaaacaagcaaagataagaagataacgtcacatctgctaaagcaaatgcaacatctgctaaagaaaatgcaacatctgctaaggcaaaccatgtggaccaccttcattttctttgaatgaaagacgtgcaatagcctgctttaagctcaatttagatgagagttctacaagaggagacagtgttgcatttgagtgatgtgcaggaaagaaatagacaggacataagaggtgtggtagtcggtcttagtggatgtcaaatgtcagtggcaagttagaaagcagtaggtagcaccagtgttggagaatacaaggaaggtaagcccatggatgagttagtaacctgcttgaagttgcagatcgtagatgaggattgctctagaggaggcagttgtgcgcatgcatgatgcactaggaagatgtatagagtgcatgagaggagctggcactgtgttaatggtcaagttagaaagcaataggtagctttggtgttctccaaaggaggatgttaatgatgactttttttctgtaggtgaggttgaagtaacttattttctaaagaatatagcaaaatgaaatgtacagaatttgatagcaagaaatagatggtggtgatgatccaatattgtgatgtacaaagattactagagaatattaatattaattcaaaaataatttttccacggttgaatttaaggtcaatctgctcattgcttgatccaaatcttttagttgtctgacttgttgttaggcattttcttcaaatgatcatatcaaatacatgtaatcctcacatttttgcatttgaaaaatggggatatatgaaattagatgttattaatattgattttactatatgcaacaggtttaaatattttatgaatgttcagcgtgatttagggttaatatgtatgatcatctttaaaacaaatttgatataatacatgcatcacatgcatcttgaccagtgcaatagggtctatagctatattttctgcaatttatatcctgctgcttttatacgaaattgtgactatttctttctttcttttttcttttttattctttttatttatttatttttaaactctttactgtcttctgcattttgatagtaagcactgtactggagagttttgcttctttctttctttcttttttttttaaatttcttttccttataaatactctgcatctctctttctctctccagtttgttttcctagtgcttctccatttgttttaaaactcatttggaaaatttaggttttctgaattttttgtttgcttatgattcttaactggattaataccaactgttggctgctgatcagctctctatctctttgtgcatttgaatgggctttttggtttatccggctaataatggtaccccaacaagatttggagaactgggttttactaaatttaatagttctggagaaaaaaggtggtcaaagatttctttgtttatgctatatgtgcagctatttggtgtgtctggttagagaagaattgttatatttttaaagatctctacttgcttctggttactatggcatcaattcatttcctagattcttacaagtgtataggcattcaactttcagtgttgttttcatgtttgatcggattatataatattcaatggattgaagggctttaatgggttaaattttcttccacttccacttccacttcctctttcatgtaattgtttcttatctcaatgaaattaattatttattaagcaagaatattttggacttgcaagttgtagctttactgcctctaggatctccacaattcagtaatacctagtttctgcgcggacttgttcatttctttgaagctgtaggatctgattatggttacatctttccttgaagtaaaaatatctcccctccaagtcttccgtttgcatggagaagttcaattgattcaatttggatttcctttcgtggtgcctgggctgttggagtgtcagctaagcatattgttatgatggattggagtgccagctatgcatattcttgtgatggattttacttcttgtggtctatcaacatctcaatatatgtatgtattaatatctgctgatgcatagcatgcttagtatattcccctctctggttgtcttctcttatctgcctcttttggttactctttccccatgagcacatgcatgcgtacatgtcttatcttctggagtgtgcctgaatcactgttaatgttgtagactattgtgattttttctggtagcaacttttggataaatcatatatgagaagtctaagtgtttccataaatctgattgcgaggtacaatgggtctttttagttattttattgcctttgttcattctggagttcatgctttgttcctaaaaggaaagttaaagattgagttactacggttatgcatattttgtcgatggagtaaagttgatcttttcggctgtcctgctttactcaatggtgaatttgctcgtcttgtctgcagtattctgcttttgtttcaattaccgcacatcgtgcgatcaatcaatcattgttgatgagtttcatatttaccataaattattttatctcaagatttggttatttgttattgtagggtctgag

SEQ ID NO: 6696 - DNA, 3948 bp, Ricinus communis
  Intron number 5 from transcript 29743.m000294 (locus 29743 .t000005) derived from phytozome v7.0 (chr-ID 29743; pos 1 13128 to 117075 reverse strand)
tacagaaatctcgtccaggaaggaaggtaggtttttctttggacatatccaatttaattatttgatgcacgttcaaccctgctgtagcagcgctgcaattagccaacttgggttgagctttaggtagtttgggcttgtctcatttactatatgattgttagaaaggatagaaaagtggagggattggaattttgaaaaccatatagtctaggtacatagttcgtagactattgttttcaaaatttaaatccttcaaaatttaaatccttccacttttccatcccttttaacaaacatagcctaagtcgaattataaccgagtaccaccatgttcatttattgctcacaagtgtgaacgagcttacaatgagcctaactttatcataattctaaattataagtaaaattattcattagttcattaagaacataaaatatttgatataatgattataatattcaactcaactctactaagtttagtcctaagtcataatttagaattattatattactaaaaaatttaatgttttgatgatctgtaccataatttttaagtaatattttattagtataattataagatagaagagaatgcatatgtggttttctatagtaaatcagcttagatataaaatgtagtttccaaaatcaagttaccaataattcaaattccaagctagctcaggagcatataaatgaatgtgctcacgaacctaacaagtagagctttgcctaacttgggtttggggctcatcattaattgatctcagaaatgagctcaagcaagttcttattgagttgaatatcattcagagtacgagggctcatatttgtggcttggatcatttgcagccctactgaggagtatacaatattgtatcttattagaattattaaatactccatattcatttttgtttattaattttcttcgtttttttttcaattgttgggtggttggatatggcacttgatccatttgattttgccttcttaactttaaattaataaattagagtttaatgggtctccaaagatttccaagtaatgtaagactttagaaaagaggcgacttttgaaagaataagatatggaaatttaattatggagaatgtggagtttctcatgtatatgaacttgcataaaactcatgatctcatttaatgcaggaaggtaaaccgatcgttcttgtgaacatgaaaccagctctatctgatttcaatctgaatgagatactaaaatgtggagccttttggtttagccaggctttagttttgaattagctttagcttttctggtactcaattcttttaggctttgatgatagtgcatttcaaggattgggtttcaaaaatgctacaggatatttgaccaacttgttgatgtaaaaccgcaaaggtcaaggaaaaatacaaatgcgaaaagctaagagaaaaagcataaaactacaaacctaaattaattctcgattgatcaaaaccacaacctaagaaaaaaagctaggtacttataatttattgttaaatgccctaaactaacatacatgaactaggactaggaattctaaactagaagctaaaccaatgttgctaggaaaatcctaaaccaaaaactaaataggattattcctaatgacatagaatagttattagtactacatcaaaactaccttatgcaaaattcacaagtaaatagtgaattttgtaattaatatttcaattcagataaattctaaacttggttttcattatctgcatcattctttcctagttaaagaaacttgattgcgagtttttctatgttgaagatatacacttggagttggaaaaaggtccaggctatcttcttcgactgcaatagcaaaactaaatctttcgcaataataattttattgccacattttactcagtttgcaatgttaattctctcttggatccatcacaaataagtaaattagttggtttgcaatttcctttgtttttcccacggtctctataaggaaattttaagtgacagatatttataaggagataataatttggacggaaaaatgaaaagagtgaggaaaagaaagagacaaatttatgtggttcggcataagcctacatctatgggcaacggagaagtaaaattcactaattaaattgaagagtacaaaacaaaaatgtagagaataactttcaaactcttatacgcaaatacacccataagcttacctctctaatcgtacaccaaatattgttggacctaaatggagagactaaagcttgcaaaaggacctcacaagatatttgtcaaaagaaaatgacacttgcacacactcgttactttctcaacaaagaagaagaatggcatatttatagccaaatttcgaaattaatacagtaggtggccatatttatgaccattttaagcttgatgaccaatgtggtggaagaccataattatagccattttaaacatgaagaccaatgtggtagacaagcttcatgtataacaagtccatggtgacgtcaaaatgaccttgggataaattccgggcaatattaacatatcttatcttgtttctctaaaataggttcctcaagttttttttgtttcagtattagcatcttgcacttcaggatcacattgtcttgctcttcatgatgaacatgctttgcttctttttgagtttcgatattttgaagagaaacttttatctatcttacttagtgatatcttaatcccttcaattttttttttatctacattttatcttttattttgagtaggcttaattgtggaaaaacttagttttcctttatttatgatggaacatttgagtaggcatcatattccaaataataagagccacgcttttgaagagcagcagccagttggcatgtatagtgtaatctcgctgatataagtcatttctctctatctcgtaaaagatgtttgacctttaaatatttcgaaaagaaatggataatatcttttagcaccatcataggcatccctaaaataatacaatctaaaattcatccaatcgtactcttttgagaatattgaacgtctaatctttgaatttcaatctttggagttcttccaatgacgaaaatttcaattagttttgggaaattgccagttgtccaaagaataatatttgttactttgctctttctctaaagaatcagctgctgatgtcctattagaaagcaatcagctgttgacccatcagaagatttcagctgctgcctaaactttcacgaaggtaaattgttgcctttttctttgaagactgaccaaaaggaaattgatgcagcacccttttcttttcccttggaattgaaaggaaacaaaagttttccaatggttacatagtcaagggagagaaaagtaaccggtatagtaaatggtaaatgacccaatgtgctcgaggaataaactaagaaatctccaaagctaaggaaaaagcacaaattttgaacttgaatgacttttcgattgatcacaatcataacctaagaaattatctagcttacatggacatttatttactaaaacttgaggctaccattagtaggagttgaaatactatactgaaagaatactgaaaaaccaatgcaaactagtctaggaaaattctactaaataggatagagaaaaaataatgtttatttctaatgaaagctgcatatcattaaaacctcttaatacaaaatgtacaataaagttctaaatttcattattaaagattaatttacaatgatattagatttagtcttcctcatctgcatcaggctttcagctcacatgttcttcatactacttcttacccatgtatttggatcctatggccattttaaattaggggatttcgacatggttgacatttggagagattgactctgttctttttgttttttggtatgatgatagtctagcattgaaagaaggaag

SEQ ID NO: 6697 - DNA, 4011 bp, Ricinus communis
  Intron number 3 from transcript 27791.m000086 (locus 27791 .t000004) derived from phytozome v7.0 (chr-ID 27791; pos 3 9995 to 44005 reverse strand)
actcctaacatcactgacataacagaggtcattttcttcctttgttcttttaactgttcttccatgtttagactggattttaaatatgtaatgtggcagcatatacatgtttcaagcaacctgcataataaaaaagtacaaattagtttgcacaaatccaagtgaattatccttattcttgcttttgcagttgtctttcttagtcatttcatagatgtattatgcacctatgctttcttgccatttgagcaagtaaatatctgttgcatgcattcatcttttcaaatcgagacacgctttaaggtgcaatttgaatggtttctattgaataacacatagatttccttggctgtgcaaaggaaacagcagttgtgggctgttatatcctccatttgacacactaatattagagcaatatattgctaataacattatagaacagtattgctgacaacattatagaatactattgctgacaaatcaaatctaccttctttatttgtactaattaaaggaaatctcaccatactcaacgaaaactaatgccagacaagatgttttgtggtacccttttatactttctatctcttggtcacattctcctcaaatcatgccccaagttaaccaactcatttcttttcggagtcttcttcctttgcatgttatgataatgctctcaaactaacattatcagagctttctgtattatcaaaactatgaagtgaatataattgtccctcctttccatccttttacttgtaagcataactgattaaatcttactttattggtaggagcacatgagtatacaattattctattgggttcaatagcagattaagactaggactatgctttgtggactgcatattattcattgtcagctggttaaacatcatatcttaaatctggaacatccaacaattggaagattctggaagtcgtaacaatgtgaaatacattcttccctatcttccttctcttcctaggttttatattctggggaagcaatcatcgggagggaacaaaacttcttttatggtagttgatgtgctgtttctctgtcaggagattttctggtatttcgatcattaaaagtttgttttatgatgatcttctctggcccctatttactctcactagtggtatgtcaaagctgtggttgatgaaatataaggtctttgctgttggtatgtcttgccaggaatatgtctcaagtttcaaggagtaaaaaattggaagatttttgacatttaattgggctagttttttactcatgtgccttgtacatgaatgtttaataatttgacttattattgtttactaaaaaaaaaaaaaaactaaaaacactaaaatataagattttcatgctaatttctttaataagttaatatatagattatattaaatatttataatacctcttaaatttttatgtaattttagactttattcaaatagattattaatcccataaataaaactatatccaatagaatttcatcacttgaaagcaacgatttctttagtttttttaattatgttattgctctttaattttttatttggctatcttttcttatatgatttgatgtaacacttgactttttattcattgttaatttttttttttcataatataatatttcttatacaatatatttgttacaaatagatttatccaatgttcatacataatctaatttagaaaagtatgtgttctaccaattttcaattattttcactttttacttgacattataagatgatgtgttagtagttaagactaattatagtcatatctaaaaacaatttggtaataaacttatcttgttatttttccttcacaaatggaatggggtatgagtatgccacattttacggatatcctactattttttttaattagatagtatttgtaaatatatatccagactaatcaatcatctactagaaatgaaaatataatttaaataaaaacaagatttagcaaatcaaaactaaaattttataatttatcttgtcttatgtcctctagacaattttgaatatgaataacccaaattttatggatttcttaccattttcattttattcgattatttttttccaaaaaggttaaataaacaaactagtcatttgtttattagaaaaatatatagtatacataaaaataaaaccattccgagaaatataaactaatttaagtttggtattaagcaattaaaataaaaaaataaattttcctcaaaacattccttttaagaacaaaatctttgcgttttgtttcatctcgatattgtttccttttttattttgtattaaattattctttttatttaaagaacacatattttaataaataaaaaagtatctaattaccaaatattttgaagaaaactaaattaactaatccttataaagctaataaaggttttttttggtacatttgtttcctcccatactcacttttacatattttgttagtcgttgacttttcacccacatgaatcacagataaattattgtcatcgggcttgttatacttattattgttatcaataattcatataggtttctcaaagaaaaagaaggttttggaaaacaacaaagttaaccaccacatgcagaagttatagctactactcacatgtagaaagtctaacatatagtaagccaaagcatctttttctgatttttatttgtaaataaaaaaaaaaataacgatattcagctaagaaaaatcacatgtaaataaaagaatatatataactataactggattccttttacaaagatcattggatcatttttaaaggaaaagttatattatttttttggtaattaatagtttgatcagatcagtttcatggattgttttttcgattcaattattaaatagtgatatttctttttatattttcgtaattaattaatagtatcctaatagagttgggacttagctaagagtttttgatccttctaatattcttaatgaataaagtattagttaactcaattaataaaagactattaatttaaatagaatgatatacaaggacgtcttagtaaatttgctcgtaagtcctcccttcgcactcttgtatatgttatgataataagtagagagatgtttctatgtctcagcattctgatccaatctcacaaatcttatggaagcaaaagaatattatagaagaatgcagaattaaggaagaagaagttaagaacagataactgtgaacataaatatactgtgaatacttgcataaaagaatgaagacaactctagagatctctatttatattctggtttacagagattaattgctttacactctaaataacaaactaactacttgctactccagaataattctgttgcaatagaatccagctcagcatgagtgtaaccgttttcctgccaatattaaccgacttggtggcttggctcagcttcttgactcctgttcccagcttctgacagctcattcagctcctcaaactccttttgtcttctggaaggttcagtgccagctgtggctgctggtgctattgatcattaacaacagtcagaaaaggatgcaattttataattactttaactcaaaacctaaaaggttcccactcgttcaggtcaatggagagatctgtattgacttttcatgtagttcacccaatattgcagaaactaatactgattgtatacttcatgttttagatcaatttactgattagcaatacaattcttacaaatacctgaagagcgccattgaatatttagaaaatggagaatgagattttgtacgtaccttaaaagaatgctcattgcttacttcaaatcttttttaccatatagagtttttcttgattgtaacaaatcttttgagtgtgcatcaaaagaatgctcattgcctacttcaaatgcagtgtatatgggttgaatttgttcgccttaagtgactcatttttctctgttgtatagccagctagggcagcactcagatcagg

SEQ ID NO: 6698 - DNA, 5960 bp, Ricinus communis
  Intron number 8 from transcript 30063.m001439 (locus 30063 .t000043) derived from phytozome v7.0 (chr-ID 30063; pos 5 33006 to 538965 reverse strand)
atttgcttgctgttccaccaactggctcttataaggcaatttcttgatcactgtggttattgagatatgtttcttttctattctctgtgattattcatcctcaatctgtatgattactttctgttatctaactcgagattgatatgttggattaataaagataagactagtgaaatgtgaattagctatcagcaaagcatttccaagttccaactaatgtgttctatttcattaacttttacttatatttaatattttttcaataatctgcctgccctcttggtaatcaacatgggataactacaagaatgaattgtgtgagaataaatgttgttttgattggacccaagatcttaaggtgacacttctatggatctaatttgatggaggagttcgatttcctttactctattgtttcaggaatcagttatttaagttggcaggaacggactttaactttttcctattttatataggttcatattttatatttttccagtttagtttcccttaatttaggaataattatacagctgtatatttctgtctatttcctttgtaggttcttgtatcttgtatatatatcattgaaatatatgagaaaatcatcttgcatatttacaacttggtatcagaactctaggatataattttttttctctgaatactccagccgccttaaaaaaaccctagctgtagcagctccttcctaaaactctagtcactcctcttttcttctttaacccagccacaactatccttcattcctaaaacctcagcagcagtagagtatatctaccaaaaacactggcgaatcttctgacagcaagaaaacatccactatgaccattcaagatgctccttcatccatccatagtaaattggatggctctaactatcgggtctggtctaagattttggagatgcatattgttggaagaaaaagaatgggctatatcaatgggaaaaaggttgcacctgcagaagataattcaggctatgatgaatgggaggtagaagatgcacttgtcaagtcttggctaatcaattcaatgagtgataatctgatgtcacattttgtacaatgtggcaccataaaggaagtatgggatgctgtagaaagaaattaccatgttgtatttgattcttcacaagtttatgaactgatgaagaagtctttctgattacgtgaagttggctggcctctagcagaatattacaatgagttgaactcaatttttatggagcttgattattgaaggccaaacaatatgacatgtgctgtcgatattgaaaaatatagaaattgtatcgcaaaagacattttatttcttgctggtctagatcataacttagatcaagttaatagccgtgttctagctacttctccattactgaaattagaagaagcatattcctcggttcgtcgagaagtacaatgtcaagttaccatgggagcagaaatccactcggaggtttcagctttagctgtccaacaacacagtccaaactcttcttttaaaaattctacagctcctcaatctcggttttgcacccactaccataagagtacacatggttgatgtttgctggaagaagcatggttatccaaaatggtataaactcaagcaaactgagagaaaaagcaagaaatctactcaggctgttactgtcgtagataccatttcaactccatcttctgcttctcatgtttctcggatatcttcttaagaaggtaattttggttttccgttagttctacttgtcctaatacttgggttattgattcagaggctactaatcacatgactagtaactcttctctaattgattccttaacatattcaccagttaagtctgtacacaatgggaattctatgccaatcacaagggcaagaaatgtatctgtttctccgacaatttctttgtccactgttttacttgcaccaacactttcaaacaacctcctctcaattaggaagataacaaagaatcttaattgctttgttattttttacttaactcattgtgttttccaagacaatctcacgaagatgacaattggcattggtagagagagggatggtctatattatttagaggattactgaagcatagtgacacctactcgtggcttccaaataaagagagaaacatctgatatggagaaagctatctttggcactatcggttaggacatccatctttttcctattcagaacgtatgtttcgtaaaattattttccaatgtttcattttccaatttaagatgtgaacaatgcatctttgctaaaaatcattgcgttcatttcttacttctaataaaagtgttatccctttttatgtgtttgtccttatgtatggggtcctttctccatcccttctgctttaggacataaatattttctctttaattgatgactgtactagggtcgatgttatccatattatcccttaattttaaaatatgattctcactcaatttaacactcaaattaaagtttttcattctaacaatggccgtgactttgtaaatcaatctcttgctgattttatgacacaacatgacactcttcactaaacatgtgttcacaccccaacaaaatggcatatcagaacgtaagaatcgccacttccttgaagtagcttgagctttatgttttattatgcatgttccaaaacattcttgggttgaagctattattcttgttgtttttcttatcaatcaaatgcctgctaagattctcaaacccctttaaggatgttatctagatttcattccattccctctgctctaaatatttttcctaaggtctttagttgtgtgtgctatgttcatgttcataaacttgatccttgtgctattaaatgtatttttcttggctatcctaattcacaaaaaggatacaaattttattatcctcctataggaacctaatatgtgtcgatggatgtttagttttgtgaaaatgagtcctatttttctagagatatatctatagttcctctttagggggagattggtagaaaaaatgaggaacaattatggatgggaaaaaaatatgggttttaggtacaaagaatattaagaaagttggggaagccttagttttagatgatgaatattacctctcttagccaaggatcttgtcattggacgatttactgagaaatctgattctaagggctgcttcttccctttactatgattctttcctcaacttatggtgaactattttcaaactcattaaagggagtttgacaccttggacctcgttagagagagctccaatcttaataattgtgattaaaatttgtcttaaccttttattcaatttcaaagtcctttaaataggactagtcttcttattaacataggaacttataatttaggtggctgtaaatcaaggaaactcctaactaagagataacgataaaacaaaaataataaaacaaatctaagccatctaattctaactacttgcgacgtctttgataagaatgacccacaaaggagtccataacaacgaacctaatgatgagagacttgagagaccacaaaatgacaaatcgaatgttgagaaatctgaaagaccagctcgtttcttcgaggaaaaatattctaggataaaggaaaatgtcactattatgccttttttattctagtactgctctcgatgatactgctatgccatcggatgaaagactaacattaaggtatttgctaattctcttgaaactcttgaaatttctaaaccaaattctatttttgatcaaaacaggagatatcctcttcgcgaaagaagagcacctgatagatttggtttctgaaaagcctccaatattgtttatccagtctccgaattcatatcatatcactgtctgtctaaggctaacttatcatttgctctttagttgtcttctatttgtattccgaatcattttcaggaagcccctaaagatcctaagtggaagggtgcaatggtagaaaaaatgttagctctctagaagaattctacttggaaaatggttttaccaatgggaaagaagaccgtgggatgcaaatgggtatttaccgtcaagtataagtcaagtggatggttgaaagatacaaggataggctggtcgcaaaaggctaaaacttatggtattgactatcacgagacttatacactagtagccaagatgaatattgtccgtgtcatactatcacttgcatttaatttagactggcctttacaccagtttaatgtgaaaaatgcctttcttcatggtgatctgatagtgtttatggatccacctccaagatttatattggaaggtggaaaggtatgcaaactaaagaaaggcattgtatgaattcaagcaatcaccaagggcatggtttagaagattgataatgccatgaagaagtatggattcaagcaggctctagcagatcataccttgttcttaaacatgatcataatgatatgaccttacttcttgtctatgttgataacatgattgtaacaggtaataacatagatgaaattgagaaactttgaagctatatggccaaggaatttgagataaaggatttgaggcttctcaaatacttcctaggcatcgaaatctctttgtctaagcaaggactgtttctttcccaaaggaagtatactttggaattcctggctgaaactagtaactcagcttgtgaacttatagatactcttattgaagtaaatcatggtctttctatttatcttggtcaaaattccaacaaacaagaagagatatcaaaggctagtggggaagttgatctattcaactcacactaggccaaatttagcatatgctgtcaatgttgtgagtcaatttatgcacaatcctagtgaccatcacatggatcctgtcaattgtactttggcttatttaaaatcagctttgggcaaaggtgttttgttctccaaatatggacatcttgatatcatgggttatacaaactttgattttgctagtagtagaatggatagaaaatctactttaggatacttgtcgtttattggaggcaacttggtgacttggagaagaaaaaaacagaatttggtttcattatcaagtgcagaagttgaatatcgtattatgcatcatgcaatcacaaaatttcttggctgaaaattcttttaagggaacttggatttggtccaacaaaacctatgttgtcattttgtgataatctagcagctattaagatttctaataatccaatacaacatgatcgaactaagcatgttgaacttgacaggaactacattaaagataatcttgattctggcacaatagaaatctcttatactaggagttcaaaacgattgactgacattatcactgatgctgtcactagtggactattccatacaatgctatccaagttgggcatgtgtgatatctacgccccaacttgagggggagaattggcaggaatggactttaatcttttctattttatataagttcctattttatatatttctatatagtttatatttcctgtttactttcccttaatttaggaataaaatacaaaactgtatatttctatatatttgtatatagaaatatgctgaaactttatgttcttgtatctttgtatatatatcattgaaatatatgagaaaatcattctgcatatttacaattatttattttagtggaaaaacctttgtatgcaattgggatttatttagggagtatacaatttttgattcaaatccaaactgtttttccatagatttatctcaaatgttctcttaagaaaccatcatgtggttagggttcctatatcatgcctagtattgcctgccttttagtatgtcgcttaagaatttttcttttatgtttattaattctcgtatccccagttataatcttttagatgatatgtaattaacgctcccacttgtacaggaagaactgca

SEQ ID NO: 6699 - DNA, 1677 bp, Ricinus communis
  Intron number 3 from transcript 30136.m001030 (locus 30136 .t000026) derived from phytozome v7.0 (chr-ID 30136; pos 6 47569 to 649245)
gaaggaatttcaggtgcaattttgcctaggttccagtagtctaaagtactcacttctcttatggatttatttattattttgataagtttttgtgatcctatataattatttgggatcatcttttaagtataatgtgaactagagcacatttacatagaaggatatggtcaaataaaatttgagttgttcacaagaataaccttcttagataatttatatgctatcaatctcataacaacttgtctggaggtgccggtttactatattggatctcctagggtgcatttgggattgtttttgggctttcaaaaagctgatttggaatttttttgatttgatatattaattttttaaacttttataaactgcttttctcaaacctgctttttggaaaaaacattaattcacctgcttcttgcaaaagcaattttcaaaactcaaacaataatataaaataaaaattgaagttggaaaagcactttcccaacttcaatgccaaatggagctttaatctagcaatttaaagttttcattgtatttcacctccaagtgtgatatttgatttaaacttcgttattagcacagcgctgtaacccagcttcatatgttgccatcatttctgtatagttttcttgggcttaatgtgtatggggagtggaagctcagtaatccatgttagttgtttatgaagtttgctatgatgaatcttgaggttggttgacccaagagtttcagtgcatgtataggagttaacattagggggaaagaaaacaaagacatatagatgtgcaatgaatatcttgctgtggtctctctccttctggttcttctattgtttctgagacagttcctctatatgtcatgctgcatgtgaacatgttgaacaaaatgtttgtgttgttctcacgcatataacacagacatggatctaaaaatttccattattggaggatctattaatctagccaacatagcacactgcatttattttttagttcctggctggtaatggtggtgctgatgtaatgccaataatgatgatgtgcttgtggtggtaccatgatggtgtcaatgatgatgggaaggtggtgatggtaccaagtgaatgatgataatattcgtctgcagtaaaagtatgtgcatgtctttttcaatttggatattagacagcaaacagaaaacggatggagttttatagagcgcaatagtggaaaaacatttgttaaattttttaaacattagtatcaattggaaaaccttgtattcttgaacaccaggaaattgtttcatttgaacagaaaactaagttttctgtctctactgaaaatcctttcagagagttgctccactttccactggtaacaggctctaattctttgtgtaaggttctattgtaggttttcttattttgcttaaaatgtaaccttttgaaactggtcgaacttcttaattgttttggcttgggatattaataaacactttatttgggtgaatctacagtccttaagattcttccctttctattctcatggattgtaccccattgggcttcattttgatcttttttcaaagtaatattatgtttgcttattatttttttcatcagttccttcgggcttttctgtttatcatgagataagtgatttctggtggtgaattgatatctgtaggtaattc

SEQ ID NO: 6700 - DNA, 5709 bp, Ricinus communis
  Intron number 9 from transcript 29910.m000958 (locus 29910 .t000049) derived from phytozome v7.0 (chr-ID 29910; pos 5 04308 to 510016 reverse strand)
ggggacagaatcttgccctaaggtacttttttctttttgcagcatatttgtgaagtattgatgtccagaatgaataatgaagagtttaattggccaaatctcaaactaccttgcaactttttcccaagatacattttcgctcaaggttaagtttttggttcaataaggatacaaatttaatttatgctcagttgtacctaataattaatatgtattctaaaaatttaatatttaatacttttaaaatttcaaaatactgtttcttgttaaaaggactcctcatgacaattataaattagaagaaaaagaaaaccctaaatcaaggattttaaaactggatttgtttttgctggtcaccactgcctgctgccaggcattgccttttccagtgacgtcaatggaagctaatcgacttgggagttttccacattataaggagtttattttttgtctctacttcttgaatttggcaatatttggttaggttgggcctcaaaagttccaaactccatgaatggtgaatctaatctccttccacaactcgagcaatttttcgacaaaatcaagggcatatgcaccttgctagaggtctagggaaggtaaaggatggatctaggactctaggtaggtagcttgccaatactgtaattgatcaaaatcgctgaagtgacctttggttctgtctcgtttaaacttcatctctcatttccttctgataacctatgtctcctctccttcctctctctctctctctctctctcgccttttgctttaacctttgatcttttttctaatatttcttttcttaaggtttcttcgttaattttcaaacattacaatttttagttatttaaaattgtaaattactctttctcattaagaatataaagataactctatacaagaaaaatctttattaaacttgtcaaatcaatgggttaagttggtcccagcttaaaatttgtgtctttatctagccatacattgggtttgagccaaatgcaccttgaccaaaaggtcaatgctccaatttcaattattctattgatgccttggttgtgtgtgcttgtgtgttttctttatagttttattaatctaagaatatttagcttgttgggatttctgataagatagaagtggctatctccccttaactattcatgagtgattaaattacaaagtttcagttcttattgaaagtattatgctgaatctgccaaagtaaccaaaattagaaaagatcaaatacgagtaaagtgaattgaggtataagaaagcatcttcactatctggttgatttaatcccattaatatgtagtacaaatttataatttcaataggaagttttcaagtttgatctgttaattaggttcttctttggttctgtcatggtgaaatcctaaaaagaaggggaaggtcattttctttgaaggtaagtcaataatatgcctcgtcctggtgcaccttttaaataacataaaatttgttccactgctatccagtggtcaagtctggagaagatatatattgacttaccgcattaactgaatatgtgatatcgggatgagtcacaataagataatttaatttcccaattgttcgtctacatctctctggatattcaagcaacttgccctctttcgaaagttgtatattaggaccattgaagtgttgcatggtttagctcccaatttttctattacagataacaaatctagtacatcctatggcgcaacaggactcctttctgacttcttgccatctcaatacctaagaagtattttaataaacctaaatctttagtgtgaaactgagtatgaaggaaggacttaagaaaagagattcctgtaatgtcacttccagcaatgacaatgtcatttacataaaccaccaacaatatgatgcctttaacatactgtttatagaagacagaatgattagacttacactttaacataccaaagctctcacctgcttgactgaatctcctaaaccaagctcggggactttgttttaggccatacaaagatttatgaagccaacataccttcctagactccccctgagcaacaaacccaggtggttgctccatgtaaaccttctcttgaaggtcatcatgtaggactgcattcttaatatccaactggtgaagagggcaatcatgaatagctgccataaaaaataaacagtctaatagaagtaagtttggcaacaggagaaaaattatcagaataatctacaccgtatgtttgggcataacccttagcaacaagacgggctttcagcagaacaatagacccatcaggattaattttcaccgtgaaaaccacttacaaccaatagcctttttccctgtaggtaggtctaccaaattccaagtaccattagtatctaaagcagtcatctcttccactatagcagtacgccaacccggatgggttaaagcctcttgaacaatcttaaggacagaaacaaaattaagtgaagcaataaaagaacaggatgatgatggtaagtgattatgagagaaacaagaagaaataggataaataaatgtaagcttacctttgcaaaaaataataggaagatcaagatcatgagtgggactaggattgaagatgggatatgatgacgaagatgctgatggaggacatgaatctggagaaacaggagagggttcaggatgtggagcacggcgagtgtaaacctgtgtgataggtggccggattcgaggaggatcataggatgtaaccatatagataagtagatcatcttcttgtgaagaaatagacttaaaggtttgaagacatggtgtttgtttttggaaggtgacatcagttgacaccaagtacctgttaagattcgggcgaaaacacctatattctttttgaacacgagaaaccaaggaagatacattttaaggattttgggtcgagtttggtaacccgaagacgtacatcacggacaaaatatgtacaaccaaaaattttaggctcaactggaaataatgaattatagaaaaaaaaaatacgcgaaaaggaatctcaccagaaaggatagtggaaggcatgcggttaatcaagaaacatgtgataccgcatttgcccaaaaggttttagggactttcatttggaatagtagggatctgacagtttcaaggtgtctattctttctttcagccacccaattttgagatggtgtatcaacaaagaagtttgatgaagtatcccattttgcaacatatatttttggcaagatttggagagatattcttttacattgtcactcaagatttgtatagacagaataaattgagttttaactttagcacaaaaaaagaaaaaatgagataacaattcagaacgatatttcataaaaaataactattcattcgagaataatcatcaacaaagataataaagtatctaaatccagtttttgacacaacaggacaaggaccttaaatatgaatgtactaacttaaagggagtcgtagctcgtttattgactctaggactgagactaacatgatgatgtttagcaaaatgacaaaactcacaatccaaagaaggtaaactagaaaattctgaggagagtttctttaacagtggtagagaatgatggcccaagtgacaatgtgccttaaaaggagtaacaactccataataaactactggttttagaataatggtgtcaaggatgtaaagacctctagattcatgccctttaccaataatcgtcttcgtcataagatcctgaaaaagacaataatcgggaaaaaatgagacacaacagttaaaggttcgagtgagtttactaatagatattaagttgaacaacagatcaggtagactcaaaacagcttgtaaaggaagtgacagtgaaggaataattgtgtcggaaccaaggacatatgatgtggatccatcagctaaagtgacaggagaactagagttatttgactgaaaggaggagaatagtttagaattacctgtcatatggtccatggcaccagaatcaatgacccatttggaagatgaggaaatgagatatgtatttggtttacctgaaccagcaactgtagtagtgggagtagttgacgactttaaaccctcttggtactgtgagaatttggcatactcatctgtagatatgagaactgagtcaagagtatcctgagtggaggcaatatgatcttatagctttgattgattcttgcgctgtaactttctgcattccttgattatatgtccggacttcttacaatagcgacatacaatttctcctgaatcatttcctcgattagagttacttgactcaaccacttttccagatctaggtgtagtattatggctcacaagagcactgctagactgggtagaggatgagttggaattcttaactcgttgcaccccacaaaacacatcttccaaaggtgaaacctcaaaactggaaagaatttgagatctggcagtctcaaactcagatggaagagcagcaagaaaacctataatgatcagtttctcccctcgagcttgttgttctttgatatctaaacacagtggaagtagcatattaaactcctcataaagatttttataatccatgtaaaggctagtcacatctttgtcacccttttcatatttgaaaattgctctaatgacatcaaaagtacgagaaatattccctttgctggattacataaatgctaagtattgcatcaaatctttcaccaatctacaatgattactgaccaaaccactttattatcaatcgaattgcatatcattaaacgcagtcgagcatcatctctgaaccaagcttgttttctatcatcagtgggcggattattatttaaatggtcatcttttcaacactcatcagatataattccacagtctcactccagcctaaataatttatactatcaaatttgtcttccgtaatttttgttactacaggaatcacttccaacaccatattctttttctcagacattctcaagcaaggcaaaattcaaaatagaggtagaaacacacaacagaaactaaaaaaatttgaataaattgctggatatgaagagaaacctcacaaccacgtaaatttgaaaggaactggatgtgaagggtgaaagtgggagtaagggcgattcaagcgaagctgaccactatgactaacgcatagggactccggcgaccaaactctgggcagtgagtgattagcgggtggcgcacctcctggtataggtggtgacaataaccagaagttggaagatggtgaactgagaaatcagaccttagatcgtctgaaaaagaaaaactgaaatcccaaaagcccaaaaaaaaatgaaatgggatttcagtgctctgataccatgttgtagtatatagagatgagagaaagattttgtgtgtattgatcaacaaattgtacaggtatttatacaaaattacaaggtataaactaggaaacgccgtaatctaatccctacaaatcaaccctataatcaagctctataatccctacaaagcagtctataatcaagctctataatccctacaaatcagccctataatcaagctctaattatttttttcctaatcaacattacagctgtaacagtatctattatcatatttcagtctgcattacaaggattgattattgttaatttgcaggtagagaagatttttggaccagggaatcagt

SEQ ID NO: 6701 - DNA, 6294 bp, Ricinus communis
  Intron number 21 from transcript 29864.m001445 (locus 2986 4.t000021) derived from phytozome v7.0 (chr-ID 29864; pos 305727 to 312020)
ttatcactccagaacttgaaaaggcatttcttgaggtttgtttattctatgaccagaatttagtacttcaaactggaaaaactgtattagttcataaagattgttgtaagaactgtctccagtctacatagtttgaagtgtcaaaaacttgataaatccttaatgctgcatatggatgcatgccacagatatacagggaagaggacgggtggtaaataataacttgcctttctagatgtttggatctctaacaatggcatctttttgaataaagaaacgccatgaaaacagtgaacaaaaatataagaaggctgaattaatttttctatattgatgtactggtatttaaagagcttaactaggaacaaaaaaagcagctaacctccctaattaaggagaaatatactattcaactaactaccctaatatagaagaaaataaatattgattcctaagattactaatttacgagatctttcaacactccccctcaagctggaacgaagatgtcactcatggcaagcttgctaactagattttcgtgttgcaccttgggaagaccttttgttagtatatctgttgtttggctagctttgcttatgtgggacatacatatcacaccactatctatcttctccttgatgaaatgtttgtcaacttctacatgtttggttctgtcatgtagaactggattatgagctatagagattgcagccttgttgtcacagtaaactttaataggtgctggtataggaatcttcaattcttttaagaatctttttatccataacacttcacagaatccatgtgccacagagtggaattctgcttcggcactactccttgccatcacattttgttttttactttccaagtaaccaggtttccgcctacaaaggtacaataacctgaggtggatctctatcatttacatctcttgcccaatctgcatctatgtaggcctctatcagaagattttctccttttttgaacaaaagtccttttcaggagttcttttgagttatctcaaaattttgaatacggcttcaaaatgagtaggtccaagtgaatgcatgaattgactcacaacactcagtgcaaaagccatgtcaggtcgagtgtgagccaaatagattactcgccctaccaatctttgataacgttctttgtccattacctcattagttgccgttgttttcaactttacattaggttcgattggcgtatctgctgccttacaacctgccattcttgtttctttgagtaaatcaagcacatacttgcgttggttgacaaaaattccctccttggatcttgcaaactccatcccgaggaaatatttcagctttcccaagtccttaatatcaagttcggcttcaagtttactcttcaagttgctaatctcaagagaatcatcccctgtcatgattatgtcatctacatacacaatcaaaatagctactttacctttgatggaatgtttgaaaaacagggtgtgatcagcttggctttgagagaaaccatgtctcttgataacattaccaaaacgctcaaaccaagctctaggagactgctttaatccatatagagaactttttaatttgcacactttcccttttccaagtttttcttcaaatccgggtggcaggtccatatatacttcttcttgcaattctccatttaaaaatgcattattgacgtcaaattgatgaagtggccaattgaagttaactgcaagagaaagaattactctaatagagttaattttagcaacaggagcaaaagtctcttggtaatcaatacattgagtttgagtaaatctttttgctactagtctcactttgtatctctccacacttccatcagctttaagcttcaccgtgaacacccatttgcacccaactgtctttttgtctttgggtagatcaatgacagtccaagtgttatttcttttaagagcatttatttcttccatcacagctaatctccaattcgggtcacctaatgcttcctgaatagttcttggaacaagcatattagaaatcctagacacaaatgctctatgattttttgacagttttttatatgacaaacattgtgagttaggatgtttagtgcatgttcggattccttttcttaaagcaattggaagatcaagatcaaaaggagtggaagtagagggaaggttactctgagttgtaggggccattattcggcaaagctgattgaacatctgctgaaggaataactgaggctgtagtaattttatggaatttcttcctagtataaacctgcagctcatgttgaggattatgatccactggattatgatccgttggaagtacttctccccctgtctctgataaagtaacatctgacaaagtaggattaataatgctaaccctagtttacatatcagaattagttaaagaaataggtaaagtttcccaaaaattattttcttcaactaagttctccccctgaagaaaattttgttgaaaaaaagagtgatcctcgacaaacctgacatccatgctcttaaaaaatttctttatgactggattaaaacacttgtacccatgtttattagaagcataactaataaaaaacatattttccagctttgggatcaagttttgagtgaaacatatttaggacatgcacatagcaaacgcacccaaaaacctttgaagggagatctgctattatcttatatgtggaaaaataatttttcaaaacttgtaaaggtgtttgaaatttcagaactcgagatggcattttgtttattaaataacaagaggttaggagtgcattaccccaaagatatttaagaacattcatggaaaacataagtgcccgagcaacttcaagtaattgcttattttttcttttagcaataccattttgttgtggtgtgtcacgacaagtggattgatgcagaataccatttccaaaataaatgttctcaaatatttattgaaatattcagtcccattattcgttcttagaatgccaatttttgtttgaaattgattttcaaccatgtggaaaaatctttaaattgttattcaatttcagatttctttttcaacaaataaacccagcaaatttgtgtgtgatcatcaataaatgttacaaaccatttttttccagaaagtgtgttaactttggatgggccccaaacatcactatgcagcaaataaaatggttttgaagcagaatatggttttattggtaacgaaacacgatgacttttagctaaattacaagcttcacaatgaagttttgaacaatcaatacctttaaataatttaggaaataaagatttgagatatggaaagctaggatgccctaatcttttatgccataacataacttgatcatagataaagtttgaacttgtactacctaacccatgagctgttttattcccagaaccagttccatcatagttatttctgtagcagttccaatcatcgtccccgagttccggtcctgaaaaacacaattggaaggagaaaaaagaatggaataatcactctttagacaatttgctatggaaagaagattacatgcaagttttggaacatataaaactgatttcaaagagattttttctgaaattttaatatttcctttgcccgcaataggtcagaaactgccattggctattttgattttttcagaattggaacatggataatacgaatcaaacaattgagaaccgcttgtcatatgatcagaggctcttgaatctgtgatccaaggagtagtacttcctagaacaaatagagccaaagaattactacctgtttgtgctatagaaccgttaggagcattagatgatgagcaagatttcaacagtttaagaagatgacttaattgctctttactaaatggagatgactcagcctcatttgctgcaggtgtgctatgttcaccagatttttttttccttaccattaggtggtttaccatgcaatttccagcatttttcgggagtatggcatggctttccacagtagtcacattgcaggttgtttttgtcttctgcacgctggttgtgagaagttctactgcttacttgagcttcaggaatagccagtgctgatccttccatagacgcggttgaacctgcagtcctctttcccaacatcacatgtctccgactgtcttctctccttacctccgcaaaaacttcaccaattggaggcaggggatttcttccaattattcggccacgggcctcaccatattcaacatttagacctgcaagaaatttgaagattcggccagtatcaactattttcttatactggttgcagtcatcgtttgatttccactcataatcattgaataagttcaggtcctgccaaatccgtttaagagaattgaaatactttgtcacagaattctcaccttggcaaatttcctcaagtcgaagggtcaactcataaacttgtgattgatttccaatatcaaagtatatttctgagacattgtcctataattccttgactgtagaataacataggtagtttgcacttatctcttcagtcatggaattgaccaaccatgtcattaccattgagttttcagcatcccaaatggtataagttttgtcattcacgtcaggctgcttagtatcacctgtgatatagccaatcgttcctcttcctcggaaatacatgcgaacagattgtgaccatcgaagaaaattatcaccatttagtcggattttagtaatctgaatgggatggtttttagatgtatttctctgagattcggactgagatggctgaagaggctggcttgtcccagacgtgacttcaaaaattttcgagataaaaagaaaaaagattcaaacctaggattttaggctctgataccatgaaaacaatgaacaaaaatataagaaagctgaattaatttttctatattgatatacaactatttaatcagtgaacttttcctaccaatagcttcatttattgatgaaaaggctttaagagcttgagtttgtttctttctccacttcaaaacttcattctatttagagactgtgtaattggtctctgaatttgtttagattatgaactccagagacctccaaatctatcccagtcctagcattatgattgtcgttgggatccttagcccggctgaattgagagggttgaatgcagaattggaactttagttctcgtgatgttttctttctccttttctagatgtgaattctaataattgccagttgagaatatcttgtgtgatgggatagttgacaatatctggtgtgatgggacaggaggtcacattagggagctatacataaagtttttgggggaccaagttagaggtataaggattatatatatatatatatatatagggactatgattcatggtgtattataggcaacaagtccgatcattgtttcaataattaagtccacagtttacccaaaaacatttagtaaaaacaaaaagatacaattgataaaaggtatgttaaagtaagtatagaagtatggaaagaaaaccaaaaatctttttatccttatgcagtaatttcaatgattcggttaaatttagaatatgatttattaaaaaaattgcttcatacattatcatgataaatccaatcgaaggtacattagctaagatttctgtactagacgagattgtgttcttttcgcttagcgaatgaagaagctttggaggggccaacatagtgaacagacgagtttagaacttactaagctgatttgaagggaatgatttggaaagaggatgatactttggacggccatggcccactctggtgccaacatgtctccagacttgatgtcacagcatagggcctcatcctgaataagtttttttattgaagcgattgatatcacccaaatggatttcaagcagaaaagcctggtaatttgttaatagtatcctattgaagctcctatatgctctttgaactaattgtatggtctatctaggatgctattatgaaaccaccgccaaagaggaggaatctatcatcttactttgaatttttgactgtgttgaaagggtgaataatatctttctggaagattactgtctttggttgcatctctagtctttggatttggaagtctcatttatttcagtggacagatggttaaacacaatgtgtaaatataaaatgtcaatgaaactgttcttgtctggtcttacttcatacatatgctttaactgttagttttgcgataaaaaagatggtaatatatcttttatgttcacatacag

SEQ ID NO: 6702 - DNA, 733 bp, Ricinus communis
  Intron number 6 from transcript 29669.m000796 (locus 29669 .t000005) derived from phytozome v7.0 (chr-ID 29669; pos 2 9254 to 29986 reverse strand)
cggtaggtgcagtcaaatgatcattttatcagtcttgtgtacttatcttaggcatgaaacactcagaatttccctcctaatggatactatagaagtttgttttatgtgaattatttttgccaaattatttgaaattttctcctaggtatgtaaactttgtattgaagtatatatatgcgaccgtgccatgagtaatttttgcaagcattgcaaaaccataattcttaatggctgcagtaaacacgtaataattggatcttcaatatcttgtgcatttgtgcccattttacaagacctatactttgtatttttgaagaggtgatagtacaactgtacaggtataatagctaatctcgaactgatacttcaattctgaaatcaaactaattctcattatatgcagaacttgcttctgaatataaacaagagaagatatgcattggtgattagtagatgaaaggaagaataggaagaataccaagtgaaagtcagtggtattgagattgttgtttgagttattagttttttaacttgtatcttatggtttcttggtgaagttctgtcctggacttcttttcaacttggatagctttgtcatggcaattagagtaaatattgtgtgtgcttgtatttaaattgcacattaccttcttgatccaattcctagtcttgtagcttttctttatggtcttcaatgtaaaagaatatatatgtatacagatacaagaagtct

SEQ ID NO: 6703 - DNA, 1433 bp, Ricinus communis
  Intron number 6 from transcript 30006.m000289 (locus 30006 .t000015) derived from phytozome v7.0 (chr-ID 30006; pos 2 16141 to 217573)
ttgttagcaataatctacttgtagagtttcatcaggtgattatatttctgttcattgtccaccctctgttcttcaaaagaaaaaaaagaaagcagccagaaaaaagaaagtgaaaaggcaaaagataagggaggagaaaaagtacgagagaagtttcttgttgcagtccaacttatttgctagatagatcatgtttctacttattatatgattttggtctcctcacatagtaatttctcattaaattccttgcctgtgtgacctgtcactactgaacattgcctatctggctggctgaagggaattcataactagaaatgatatctcttattatttcattatctcttttaatttatgtcaacaaaaatttgtagtttatgatgctagagtttggtttataaaatgtccaatctaagattttctggtcagcgattgttgactactcaaatttgatttactgtaatattttgatgtaagtttgacaagctaattgactttatgctattcatttgtaccagtggaactttgatgtaataggaacaaggctatatgaactctattatgagtgacaccttgaatacattttggttcaattttaattttcaagttatgctggaaattgatggaagattaagatgcatggatttagtcaaggtttaggttactgggactggttttaaattgatccaaagcaaggagagagtataaactgaagtaagcaattgagaatgctgtgggtagatgaaatctttaatattttgcagaatagtagatctggttgccgtgaaagtaacaaaagaactaaaaatttcaaagattcacacttaggaattgacaggcatcacactttaggaattgacaggcatcatgcataaggttccatgggcaaacttagggttcaattgcaccttgcaatcaacaaaacaaaaattaccagaactttattcaccaataactgataagcgttatggacttgaagtaaaactattactcaacattaagatattggactgataaaactagttccagtcctctaaaaatttggtctctccatatggaagaaaaccgaaggtttaggattacttgtttgtatgtgtgtatattgaaatggttctttgtgaataaattctgaaaacaaggattcggactacaatgtttggctacatgtttcatacagattaaaactttaggttagatttttttctctgatgttgaaattaatacatgaaaagtttaaaatttaatatttgttgtaaaaggattaagttgttttcacccaaggtatgttttagaacacagtattatgaaattttatggaaatctacagttatcttttatggtatgtctatatcatggtcccagctgaattcacatgctcttcgtgattctgtatgatagcctcctagtgaagaggttaagaaggaactcactga

SEQ ID NO: 6704 - DNA, 1825 bp, Ricinus communis
  Intron number 11 from transcript 30131.m007073 (locus 3013 1.t000224) derived from phytozome v7.0 (chr-ID 30131; pos 1319967 to 1321791 reverse strand)
agggtaaggatgaaggatttgttcttatggctgcgacttcttgtgacagataatttgattataggaatcaaggaaatcagaagttcgtattggtagataaagaaaagagaaatcttttcccattcgaaggctgcaaatgagctgagccatgtttagctttggctagcttgagcttggctcatctattatcgagccaagcttgagcatgagctagtatcactatgtcatttatggttcacggacctaaatggccttactaaatataaattttacaactaaaattatttatcaatattaaaaaaataaatatttgtttataaaaaattataacatatttaattaattgtatttttattataataacaaaacttaattaggtattcttgtttttgttataagtaaaataatgtattataatcaaaagctattaatatttacaagctagcttacgagcctataacaaaccgtgctttgccttgactgatttatcgaacaagcctctactcatgagctcaaggtaattttttatagggctgagttccaaatagctcacaaacggcttggcgcatttacaaccctagcaacgattgtcttcgactctgggaatctgtttgtttcacggaaaataaatttcttttggaaaacatgttgagtaaaacatgttccaaataaatgacttgtttactgttgtttagtactactatacagaaatcacttggaaattattctatgattagcgcagtttttcaatatgaaagaccattaaaatgtttaaaacttattagaacttcatagcttaaatttacaattagatttaaaaagatacattgagaatttctttcctatgattgtttagtgattgttgcctgccatcagtaataggtggtggttggaggtcgctggaggcaattgtcgatagttgatatattaagacatgcatttgtttagcttttgtaaagccattttcataagtttgtaaaatttcaaagaatggcatggttatccttctgaccaagaaaatgttttttgttgaacaattttcttagatgcactaaacacacaaagcaggttaaaaacaaaatataggaaatgtttttcctgcagaacaaatggagcctaagaattggtttgttattcaaatgcttattttaattacactaatcatgcatgtccagcatttgttgagcacaaatgatggaatcataatggtttattgggttaatacatagaagatagagcaagtctgcattaatgtcatattatctgctcgggaccttatactctttctatgttgtgatttagatttttcttatgctcaaaaccttatgtagagaggtaaaggctttgttttacttacaaattctacagatacaaaactttatagctgggataaaatccttgggaagttgttgaggctaacaacattttgtttatttgtttaatagcttatttcctatataatgatttgaaagttttaaatggtgttcttctcttgatcttaatgcatctttttccatctgtggtagtgtaatagcattggggacactataaattgacttccttatcaagcattcggagaaagaaattgtgatagtggtcttatatcatatctgctatggtttctttcttccacaatctttctagctacacattctattcttattgatatgctgctctattagtggttaatgctctaaagtcggccaaaacgagctgttaaatataaaagtttaacaagcctaaattcttattctgtttacacattaggactttccttctcttgtcctaaattactgcttggatcttttctaacatgagtagactg

SEQ ID NO: 6705 - DNA, 5745 bp, Ricinus communis
  Intron number 5 from transcript 29662.m000448 (locus 29662 .t000002) derived from phytozome v7.0 (chr-ID 29662; pos 1 6083 to 21827 reverse strand)
ctctggccaagtccttgttaaaaagtgatagacaggtacatcaaaatctgcaactttttttactgtgttctcaggcaccaataggtaattaaaataagtaaattttgtgtttcaatgaagctacataatatgatgccaaattatttttacatgattttactgggtttcacttttaagtggaaatcttaagagtttgtgaatacttacatgatagtaggattgcatgttaaagtcgaatctaaaataggtagttgtgattgtgctgtttttatgaaatagttatgtgttagttgatagggaaattattttgacagttggcctataggttatttttgtcatactttctactcttttttgacctatcttgatagcacaaaaagaaataatgcttgttaagagcacctggataccttcagttgaagaaatgcaaagctaactaaaagtctacttagtatttcattagccaactttcacttaaattgatgtaggacatatttaaatatcctgttttacgttgatttttgcggaaaataaaggttttaaaattgaatttcagatttgattttacataaagcattttgattcctttaggagttgggattcccttgctcccttgatgtgtgtcgtgagcaccaagtccaggtcgaaccctagagagtaattctctaccaaaactatagtagaggcaagtccaggtcgaaccctagagagtaattctttactaatattattagagtaattataatttgaaaactaaaatagaaaggagttttattgaatatgattgaaaagcaaattgaaataaaaaactgaaaacaaaataataaacaacttcaatccaagggaaattgattcgattggtttttcacattaatcattgacacctagaatttctattctattattaactacttagccagaaatctacctcaagcaagaataaatcctaatcttccttgcacaagttaattcaaacctagcatccaaattaatccttattcctagtttacttagtggtaagcaatcttcttataattagaaataacattaatctaggagatgactaagtcaattaataacctatcaagtgatgattaattaaatcgttcctagttttttttagattagcacataatctagttgcttctaagttaaagttcacaacaattacggattatgatttcaacaaagcattcaatcactatagatttttaactaattgaccacttagttatatatctaagcaatcataaacaattataacaaagaaacaaaagataattaaaataagaatagagtttagaagaagaaccatgttacacaatgatcaaatcaatacgaagatgttcccttgaattgaaataaagaaattagcctcacatagtaactagaaaataacgaaaagatgaaaagaaaatagtttagctacttttctaaatgtaaaagttgctgccaaagataccaaaccctaagttataatgatctatttatagggcaacacaagagaaacctaaaagataactcattcacgtgtctctttccgttatttactttgcgggctgttttataacctcgtagaaattgaatttggacttgtgttcttcatcaaagttgtagctcttgaagagtagtagttcattttaggcttttgaatcatcttaattggacctctgtaactctagataaagcccaaacactgagactgatctaaccagaaacgaactacacatctgacttcgacacaagttctctcatttagcaacttgatatggagttgagtctttcataagaattgtagcgcctgaagtcctttacaaagtgaccttcaattctggatctttaagatcacgaaaaatctcactaaagctcatgcaatcaaatctgcataatgctgaaattcaccattttcttccaattaagcactagctcctttaaatcattcctacgtacataaaacaacctaataagctcttttaaacttaaaatcaatatcaaaagctaaacataaagagagtaaatatattgactattatgttctgatgtctgtttcccatccaatcctaagaactgtcaattcctctttatgaatcccccattatagctcctgttactacaatactcctaaattcagggatctattccacttgtttgtcctcatgtcatttcttttggtagatgtgaacttcctctttgaattattactaactccatagtcatttaaactttcagcaaccagaataagtcatcctaacacttttagaagtctgcaattttttttagctattaatgagttctaaatccttgttgtattaggataaagtgtttatttagataatcctttaaggattaatagtctaaatgtctttaggtttaagattagttactcctataatatctaggcttgcaaaaattattattcagtttctttttagattcaatagatgattttgtgcaagttgctgttctagaattgtgtgtttcaattctttttaggtgcgactcctaaaccttttaagcaattcatccatcatagcattcaaatgatcaaatcctgaacttatcttatcatccaattgattgaaattcaattcacgcacttgatgaaaagatttctgcttttcaaattggtacaagtaactaagcattggcatgcaactatatgttgaactgtacacctttgcaccaattcttgggcgataatatggtggcaaattttttttcttgaagctctgttttcatctcttgctatgcatcaacttgcggttgcctctgtatttgtatatcatactcaacacagtaccaccacaattttgcagatccaatcaaattacacttttgcaaatcttaccttacacaattcctcatagttgctgcgatcaaaattaatttcaagagaatcaatttagtcacaaatttgtaggatcacctccttcaaaacacaatcgtatattcccgttgttgctgaagatcaaaaacatcactataaggatcttgaagttctgttaccaaaattgatgcaggacagatttagataacctgtcctacattatttttgcagaaaataaaggttttaaaattgaatttcaggtctgatttgatagatctgaaatagaggaaaaagaaagatagaataagaaaacttcaaagagtcaacacttggaaggtataggagtcacaactaaagagaattgaaacacacgattctaaaggagcaacttgcaggaaatctttgtttattgaatctgggaaaaaactgaataataattgttacaagcctagatatttataagagtaagtaatgcgagcttaaagacttttacacccatcatccttaaaaaagttctctaaataaatactttattaatccaacaaggatttagagcaagactcaacaataattaattaggaaaataaagtggaacataagataactaccctaaacaagctgctgccttattctaccccagacttggaacagcatagatattcttgagtgcatgcatagtgttactctcccttgcaaagttagtacaagtaatagccatcatttgcaacttcttctactgcttcttccttaaatggatcatcatcaattcctgtctcacactgatgtccaggaagatatatgtgtcacacttataacacagtatttggccctttgcttgtccatcttactcgattgagttgcttcagaaatggatactttgaagaactagcatctgcattatcaaggggccatttcttcatgatgttagatattaatgaagtagttgggcagtttctttatcatgttaagtagttattaagtccaagtttttctgtctttggctgtatttatgataggacactttagctacatgtttacaaactatgtgccaaacatggttcaaattctaagcacttttttggaaatgggggatgatggggaggctgattggaaagtttttttctaagaaatatgatttctggttgttgctgagaagtttatttcgagaaaaatgtgatttcaacttttcctgctgtttcctcttttaagctactaatagagatctctacttgttcatggattgaagtgcttggtgccactgccagttgcgcgtagagtctctggtagtctgccacagtctctctctctctctctctctctctctctctctttgctgtttaaaggtatgaaatccccattgctgctttgtcactgccctgtgttcatgatattgttatggatgggttgttcaatggaaaaactgacactgaccctgctggttatttttcttagtctttctaccttttttaacctgagcataaaaagtggtcgagctcattaagtgagaaatctgaatctcttaaatctaaggaactcgaacctgaaattctacatagtacctcatttactaacaagcaaacacagaagaactagaacttgatgactactcagcatgacaaagaataatgcatcactactttataactatctagcataaaaaaattatttgtaactaaacatggaacattaaaactgaacatagattaaaagctttcctcaacaacctgctcccagattctgcacttgacttggaatagctttgatgtctttgattgagtgcatgagtacattcatctttggaatagtgtatttcaccatgcaactattttttactgtgacaatagcaattccctctaaaatattgtctgggtgtaagcttttctgttaccattgcatttaactgttattgattcctcttatgattgtagttattattttcattgaactggtattgattcctcttattattggtggttatgcaaccatttaattccatcaggccaccaggagcacttcgacctttttcttttcctggaaaagaagaaaaagaaagaaaagaaagggtgaactagctgagtgtagcatagttcgtctatatgtctatttcaacataactacaacaataaaaagcccacaatttcattttgctaatcccgtatctataacaacctaaattgagcaataagaacatgttttatggtttaccactggaaaatggaaagcagaaatgaaaaaagaaaaatggtaatggaaaagaacccgatttctgcaactaatttggtagacctaaggtgctggaaactatgggcatgacttaaaaaattaaaatgtcattgttttaaaagcagattttgaatattcaattctggccctgcctactgtctggtcattggttgtaccataatctcaagctgataactgaattgactataaatcattcaaccgaatctaggtgaccgtgttggttcttctcactaactgaacttattgaagtatgtgacttgatttctctacattccacccccactttgttccaggcaccattataaatgttttgatatctagaacttgttcttgccattgtattatctaataaaagaaaaaaaaagggatgtaagtggaggagtaggatttaactgaatgcagattttctgttagacgcaaaggcacatccctcactcttcatgacatctgtgactattatggagaaagtacgcatgagattactttctatttgtgcagacatcagatatagattggcatattatactctaagcactgtatcatgttttgaagagaatctatgattctttcttgtgttgggaaagaatattggatgttcttagatattcgtattcaaggaagagaggaaactaaaacccttcgatatttttgatgtaatttgttcttgtcacagg

SEQ ID NO: 6706 - DNA, 8757 bp, Ricinus communis
  Intron number 4 from transcript 30186.m001318 (locus 30186 .t000023) derived from phytozome v7.0 (chr-ID 30186; pos 1 228887 to 1237643 reverse strand)
ctagagagccttgtaaaggtatgttcatcacatactttaagaggagatgcagttgcttattacataatttagttaatcacgctgagtattctattgatttatatgtgtcataatttgtcatttaagatcacaccttttcttcttttcctttattaaacattaaatctgttcaaattggcatatagaattcatcaacaaatggtagaagctacatttcctagagtcgtgtgtgtcagattgagtatagtctaggtttttgacatttcttggttttcggggggcctgggcaaaaatggctcacttatgggatttaggtgcattaaaactgtgcgtgaattattattcggatgcaataatctattcaattttcccttttgaaaaaatctaaatagataatcttgtatacaattgataaacattaagactaggtttggcatgcatgggaaaatgtattagaaatggaaatgaaaaggaatgtctagatttaaggaatcctatttcaaaattatacttaatataattagatacagttgaaagatatttgtagaattatacgttcaaatgggtgccctttacattgaagtttgaccaactcatatataaaagtaccatgaaaattttaggttccttgtttaacggtcaaagaaacaaatactatttcaagaattggatagcattcttaatcccaaagcttgccaaatgtggcctaaagaaggcttgatgaccccaagagaatacaaatgctcaaaattttgcaatcttagaatgatttggagaattagttgcttattttagccaattgtttgaaaaataaattgaaaaaagtttactaattggaagatgtaaccttatcagtagtacttctatattatctccttttcatgtgcaaccattttaccctctatttgtccccttagtttctttatgcatctttcaaaattctaatctcttaatgaccaaacaagcttataccacaaaagtgcatattaggatcgaaatttgacattatcttttgttacagctatttcatattaattaggagtgtacaactatacataataggagaataattagggatctagttaggagttagtactatgatttaaatttctatattagagatataacttatatatatagatataacaatcattgatgaatatatagagaattacttatcacattgaattttagagtttaatttacatggtatcaaagccttaatgcctgtacctctaaaatttttgcaaattataaatagtagggtgttagggttttttcgggtctccctcttctggacatttgtttctctcatcgtctagaccaacggaagcactagccgccgatcggctttcatatggagtttcatcatcaaaagccttgtgcgactcacacgcaccaccataaggaagctgctatagtgccacgcgccagcgtgtgagagcgagttcgtcactgtaatctggtcctttttgcgttcatttacttatctcgacttctacaacacattcctctacttgtttggatcaacatctactcggtttaggatctactttgggacaggtttgattccctaaagaattgcaactgtgttgtagtttttcattttgttattaggttgattttctaatatgaaggagaaaaagtcagttgttgtgactgattttgttcttatgatgtctaaaatcataaaacataaacttaatagatctaattacttagattggagtaaaactgcccggctttatttgcagagtatttatgaataatcacttaactaatgacccacctaatgatgattcaaaagtctcatggttgaggatgatgctcgtttgtttttgcaaatatgtaattttattaatagtgatgtggttgggctaattaatcatggtgagtttatgaaagaattgataaattatttggagtttgtgtactgtggcaagggaaatactaaaaatgcacttatgaggtatgtcaagcctcttatcgtgcagaaaaaaaggacggaactctcactgactacttcatggattttaagaagactcatgaggaactcaatatgttacttccatttagtactgatgtgaaagctcagcaagctcagagaaaaaagatgtcagttatgagcttcttggctggtcttcctttcgagtctgagggtgccaaatctcaaatcctatatagccgtgagatatctttgttggaagaagctttcagtagggtactttgtatagaaaatttagcacatgttcaatctaatagtgctattatcagcgacacctctaaatctgaaagacaaccatataagaaagagggagactccggtaatcttagtactcgagaacaggattcaaaaagtgttgtctgttattattgtcataagccaagacatgtgaagaaggaatgtaaaatgttgcagcgcaagaatcagtcaaaccagttagcacatgtatcatctactgatgatgctcatgagtattctagtatctgcagatgagtatgctaaatttttacaatactagaaatttttaaaatcttcatctacttctattactgctatcgctgattcaggcaaaatgaatatatatcttgtttccttatctttctaatgggtcattgattctggtgccacagatcacatgacaggtaactttggtttattttcttcctttaaatcacatactcctagtattacagttactttagcaaataggtctacatcttgtgttctaggggctgacacgattattctaataccctcaatgcctttgtagtctattctaaatttacctgatttatcttttaatctagtatttatcaatagacttactcgttcttttaactgttgtctcattctttcatgatttctgtctatttcaagattttatgacagaagattatttgtaaaggacatgactctggaggcttttacattcttgatacacaaatacaagtcttgcttgttctggagtagtgattccatttgaagcacattttcagttgagtcatccttcattacatatattaaaaaaatttgcccttcagttttctagtttgtcttcattagattatgagtcttgccaatttgtaaacaccataaacgagctagtgctccttttaagttagttcattcagatgtttggggttcttgtctagttatgtctaaaactggggtcctaatggcttagccctcaatttccctaactcgaataataagtcaagtacatacttcctttgagataagaaaatccctttcttactcgttacttcaacacctaaaaaatactttagtgcccctaaatcctttgtatgaaattgaccatgaagaaaagatttgagtgatgaaatcctactggtatcacttccagtaatgacaatgtcatctacataaacatccagtaagatgatactagctgcagactgcttatagaaaacagaatgatccgacttgattttcttcatgccatacttctctatagcttgactaaactttccaaaccaggcccggggactttgtttcaatcaatacaaggatttttgaagacaacaaacttttccatactccccctaagtaacaaagtcaggtggttgctccatataaacagcctcctgaaggtcaccatgaaaaaatgcattttaatgtctaactgatgaagaggtcaattatatgtggctgctagagaaatgaataacctgacagaagaaagtttagcaacaagagaaaaagtgttagaataatcaactccatatgtttgagcatatcttttagcaacaagtcaagcctttaacctagcaacagtcccatcaggattaactttaactgcaaatactcatttacatctaatagccttttcaccagcaggcaaatttactagggttcaagtatcattttaatctaaagtattaatctcttcaatcataatattacgccatccagggtgagatagagtttcacgaacagttttaggaatagaaatagaatcaagagaagcaataaaagaacaagaggatggtgacaaataattaaatgacataaaatagaataccagataagtgcattaatatttatctttacgaaaggcaataggaagatcatcacaagaactaggagtcggatatgatgacgaaggaactgacgtagaacatggagcaggaacaggatccagagcaggatcaagaggttgacgacgagaataaacttatgttataggaggcttaactggagcagaaggaggaagatcagtaaaaatataaattagtaaatcatcatcctccccctggtggacagaacctgaagatgaggcaaatgatgtttgttctagaaatgtaacatcagttgacacaagatatttattaagattaggacaataacatctatagcccttttgtatacgagagtacccaagaaagatacatttgagagatttgggatcaagttttgtaacctgaggtcgaacaacccgaacaaaataagtacaatcaaatatcctaggtttaataggaaataatgaattgttaggaaagagaacataaaaaggagtcttacccgaaaaaacggatgaggacatatgattaataaaaaaacaggctgtaaaaactgcatcagcccaaaaatatttagggacccgtatttgaaacaatagagctctagtagtctcaagaagacgtctaatttttctttcagcaatcccattctgagacggtgtatctacacaagaagtttgatgaataatgccatgttgaatcatataattctggaagcattctgataagtattctttagcattatcactttgcaaaatttgaacaaacacattaaattgtttttttgatctcaacataaaaagcaataaagagagaacaattctaaaagatttttcatcaaatataaccatgtcatttgagaataatcattaagaaaggtaacaaaatacttaaacctagttttagacacaattggacaaggtccccaagcatctaaatggactaactcaaaaggagtactagcttgtttattgactctaggactaaaatcctcacaatggtgtttagcaaattggcaagactcacaatcaaatgaagatggactagaaaactgagagcaaagtatctttaatatttgtaacgagggatgacccaaccaataatgtgcttcaaatggggtcacgactccagaacacgctatagactttggtacttgtgtctcaagaatgtaaagacctcccaattcatgtccttcactaacttcttcgccataagatcttggaatagacagaaatcagaaaagaatgagacacaatagttaagagaacgagtaagtttattgacaaagactaaattaaaagacaaatcatgtaaatttagaacagattgcaaaggaattgaaagtgttggaataattgtgccagaccctagaacacgagatgtggacccatctgctaaagtaattgtagtgctatgagtatgtgatttaaagatagaaaatagactagagtttacctgttatgtgatctctggcaccagaatcaataacccatttggaagatgaagaaacaagacatgttcattttacctgaatcaacaatagcagtaatagaagtagatgaagactttagagattcctagtattatgaaaactttgccataccagactttagagattcctagtattatgaaaactttgccatactcatttgcagatactagaatactcaggaacatcatcaatagatgatgtatgtgctgattggtttgattgattcttgcgctgcaacctttacaatctttcttaacatgtcttggcttataacaatagtaaccgacaacacttcttgaatcctgttctcgaataccaggattacctgagtctctccctttcttatatggttgtctcctagattcagaggttcagctgataagagcactattagattgaacatgtgctaaattttctatgcgaagtaccctactgaaagctttttccaacgaagatatctcaatgctagacaggatttgagatttggcatcctcaaactcagaaggaaaactagccaagaagctcataattgtcattttttctctttgagcttgctgaattctcacatcactactaaatggaagtaacatattaaattcctcatgagtctttttataatccataaagtagttagtgagagttctattacatttttctgaacgataaagacttgacatacctcataagtgcatttgatattttctttgccagaatacacaaactctaaattatttatcaattctttcacaaatgcacaatgattaattagctcaaccacctcactatcaatagaattacatatttgcaaaaataaacgatcatcatctcgcaaccatgaggcttttgaattgtcattaaatgagtcattagttaaatgattatctatagaaatactctgcaaataaagcctaaaagatttactccaatctaaataatcagatctattaactttatgttctataattttagacatcacaagaacgaaatcagacacaacactgactttttcttctccatattagaaaatcaacctaataacataataaaaaaccataacacagccgcaatttgttttgagaaattaaatctgttccaaactagatcccacactgaatagatgctgatccaaatagttagaggcatgtatcgtgaaagtcgaggcaagcagatggacgctaaaaggaccagattatagtgacagacacgctctcatgcctcgacgcgtggcaagagagcagattctactagcggcgcgtgtgggtcttggcagattctactccggagaaactctatacgaaggccgatcgatggctgacgcttcccttagtctgggtggtgagagaaataaatatctaaaagagggagacctgaaaaaccctaacaccctactgtttgtaatttgcagaaatttcaaaggtacaggcgttgaggctctgataccatgtgaactaaacttagatattcaatgtgagaagtaatttttgtctattcatcaacgatcgttacatctatttatacaagttatatctctaatataggaattcaaatcaaatactaactcctaagctaatccataattattctcctattatgtatagctgtaactcttaattaaaatgaaataattgtcaaaagcatcaaaagagaacccttcctttgtataattttttcttagttcaagtagaacaaaaccaagaatattatatgtagtgtcctatctcaaacctcttatgtactttgttattgagggaaagtattattaacctaaacactagatatgatctcctattgattttcagtggctcaactaaaaaattgagaataactattttctcaacttataatttctacaaaaaacatattctactagcaaaaatattaacaatcaaagagaaagaaaatctaaaatagaaaaataagtcttaatttggtttttgcagagattcaatagcttcctccatcaggataaggagtcttaatttaggtggttattaattaatactaaattctcaaataagtaggcaccacaacattagcattagtaaaacaagtgaaaataactcttgctaaacaggaaagtttgtgtttgactgaagtacccatttcttcctagtgtatcaatgtctacaatcctagaattggggatttaataaccatccattattctgacattatttggaaccgacaaagttcactgccccatggctggcttaagtgaaaaagttaggtacttaatcagattcctcttttcaatttatcactgcgtgtattggcaaacagtatgcaccattaaattaaattatccagctttcataatgtcaaatatttctaaaatataatctttccaacccttgaaaaatttacaagaagtgtggttggaatggaatataattaacatgtattgactaatcaaatttcgtggataacttacatacatatatatataacttatatatatatatatatatatattaattattctttctttataagatcagttttaacatgtacatctcccacaaaacatagactttttgcacgaatataggctgtatgaaaggtatcccctgcccatcgatgacgcactcaattctgatccattgagatttgaagcagtttctgggtagggcaataggttattgaaaataatcttggatgtaatccattttatataatttgttgagaacatccttgtttgatatgataatgctgttcaaatatgagcagacctctggttcttgcacagtgaaggttttggcttccttgttttgagtaaataagcctttgttaactttatttacttatgatattaaactaaatttatatttatcaaatttcataatttcaatactaaggattatcagctgtggtgatttcttgtagggggagatgcgtatacatgcatcccccatgtgttccatttatatttatgctgttacatgtggaggaaattttcaatgacctctagctatagtttgttctggttaaggtattattggcctgttaatttgcagtttacatgcttggacttttcacaaattgtcattgtgcatgatttgaatactatttgctcagccaatattgtcagctgaagatggactgtttgcttttttctctttcccaaccatgaaatgattttttgacgattccaatggactaacttatatcatcatttttattttgtagctttccaagggcctggaagcttttgatcataaacc

SEQ ID NO: 6707 - DNA, 8636 bp, Ricinus communis
  Intron number 5 from transcript 29660.m000784 (locus 29660 .t000037) derived from phytozome v7.0 (chr-ID 29660; pos 3 11091 to 319726 reverse strand)
ctagagagccttgtaaaggtatgttcatcacatactttaagaggagatgcagttgcttattacataatttatttaatcgcgctgagtattctattgatttttatgtatcataatttgtcattttagatcacaccttttcttcttttcctttattaaactctaaatctgttcaaattggcatatagaattcatcaacaaatggtagaagctacatttcctagagtcgtgtgtgtcagattgagtatggtctaggtttttgacatttcttggttttgggggggcctgggcaaaaatggctcagttatgggatttaggtgcattaaaactgtgcgtgaattattattcggatgcaataatctattcaattttcccttttgaaaaaatctaaatagataatcttgtatacaattgataaacattaagactaggtttggcatgcattggaaaatgtattagaaatggaaatggaaaggaatgtctagatttaaggaaacctatttcaaaattatacttaatataattagatacagtcaaaagatatttgtagaattatacattcaaatgggtgcccttttcattgaagtttgacaaactcatatataaaagtaccatgaaaattttaggttccttgtttaacagtcaaagaaacatatactatttcaagaattggatagcattcttaatcccaaagcttgccaaatgtggcctaaagaaggcttgatgacccccaagagaatacaaatgctcaaacttttgcaatattagaatgatttggagaattagttgcttgttttagccaattgtttgaaaaataaattgaaaaaagtttactaattggaagatgtaaccttatcagtagtacttctatattatctccttttcatgtgcaaccattttaccctctatttgtccccttagtttctttatgcatctttcaaaattctaatctcttaatgaccaaacaagcttataccacaaaaatgcatattgggatcgaaatttgacattatcttttgttacaactatttcatattaattaggagtgtacaattatacataataggagaataattagggatctagttaggaattagtattatgatttgaatttctatattagagatataacttatatatatagatgtaacaatcattgatgaatatataaagaattacttctcacattgaatttcagagtatagtttacatggtatcagagccttaatgcctgtacctctgaaatttctgcaaattacaaatagtagggtgttaaggttctttcgggtctccttcttctggacatttgtttctctcaccatccagaccaacggaagcactagccgccgattgactttcatatggagtttcatcatcaaaagccctgtgcgactcacacgcaccaccagaaggaagctgctatggtgccacgcgccggcgcatgagagcgagttcgtcactgtaatctggtcctttttgcgtccatttgcttacctcgacttccacaacacattcctctacctgtttggatcaacatctattcggtttaggatctactttgggacaggtttgattccttaaagaattgcaactgtgttgtggtttttcattctgttattaggttgattttctaatatgaaggagaaaaagtcagttgttgtgattgattttgttcctataatgtctaaaatcacagaacataaacttaatagatctaattatttggattggagtaaaactgtccggctttatttgcagagtatttatggataatcacttaactaataacccacctaatgatgattcaaaagtctcatggttgaggatgatgctcgtttgtttttgcaaatatgtaattttattgatagtgaggtggttgggctaattaatcattgtgagtttatgaaagaattgataaattatttggagtttgtatactctggcaagggaaatactaaaaatgcacttatgaggtatgtcaagcctcttatcatgcagaaaaaaggggacgggactctcaatgactacttcatggattttaagaagacttatgaggaactcaatatgttacttccatttagtactgatgtgaaagctcaacaagctcagagaaaaaagatgtcggttatgagtttcttggctggttttcctttcgagtcagagggtgccatatctcaaatcctatatagccctgagatatctttgttagaagaagctttcagtagggtattttgcataaaaaatttagcacatgttcaatctaatagtgttattgtcagcggcacctctaaatctggaagacaaccatataagaaaaagggagactccggtaatcttggtactcgagaacaagattcaaaaagtgttgtctgttactattgtcataagccaagacatgtgaagaaggattgtaaaaggttgcagcgcaagaatcagtcaaaacagttagcacatgcatcatcttctgatgatgctcctgagtattctagtatctgcagatgagtatgctaagtttttacaatactagaaatatttaaaatctttatctatttctattactgctatcgctgattcaggcaaaatgaatacatgtcttattttcttatcttcctaatgggtcattgattctggtgccacagatcacatgacaggtaactttggtttattttcttcctttaaatcacatactcctagtattacagttactttagcagataggtctacatcttgtgttctagggtctgacacgattattttaacaccctcaatgcctttgtagtttgttctaaatttacctgatttgtcttttaatctagtctttgtcagtaatctcactcattcttttaactgttgtctcattcttttatgatttctgtctatttcaagattttatgatagaagattatttgtaaaggacacgactctggaggcttttacattattgatacacaaataccaaagtcttgcttgttttggagtagtgatcccatttgaagcacattgttggatgagtcatccttcattacatatattaaaaaaattttgcccttcagttttctagtttgtcttcattagattgttagtcttgccaatttgctaaacaccataaacgagctagtgctccttttgagttagttcattcggatgtttggggttcttgtctagttatgtctaaaactggggtcctacatggcttagccctcaatttccctgtctcgaataataagtcaagtacatacttactttgagataagaaaatccctttcttactcgttacttcaacacctaaaaaatactttagtgcccctaaatcctttgtatgaaattgaccatgaagaaaagatttgagtgatgaaatcctactggtatcacttccagtaatgacaatgtcatcaacataaacatccagtaagatgatactagctggatactgcttatagaaaacataatgatttgacttgattttcttcatgccatacttctctatagcttgactaaactttccaaaccaggccttggactttgtttcaatcaatacaaggatttttgaagacaaccaacttttccatactccccctaagcaacaaagtcaggtggttgctccatataaacagcctcctaaaggtcaccatgaaaaaatgcattttaatgtctaactgatgaagaggccaattatatgtggctgctagagaaatgaataacctgacaaaagaaagtttagcaacaagagaaaaagtgttagaataatcaactctatatgtttgagcatatcctttagcaacaagtcaagcctttaacctagcaacagtcccatcaggattaactttaactgcaaatactcatttacatccaatagcctttcacctgctggcaaatttaccagggttcaagtaccattttaatctgaagtattaatcttttcaatcatagtattacgccatctagggtgagatagagtttcatgaacaattttaggaatagaaatagaatcaagagaagcaataagagaacaagaggatggtgacaaatgattatatgacacaaaatagaatacaggataagtgcattgatgtttatctttacgaagagcaataggaagatcatcacaagaactgggagtcggatttgatgacgtaggacatggagctggagcaggaataggatccagagcaggatcaagaggctgatgacgagaataaacttgtgttataggaggcttaactggagcagagggaggaagatcagtaaaaatataaattagtaaatcatcatcctccccttggtggacagaacctgaagatgaggcaaatggtgtttgttctagaaatgtaacatcagttgacaaaagatatttattaagattatgacaataacatctatagcctttttgtacacgagagtacccaagaaagatatatttgagagatttgggatcaagttttgtaacttgaggtggaacagcccgaacaaaacaagtacaaccaaatatcctaggtttaataggaaataatgacttgttaggaaagagaacatgaaaaggagtcttacccggaagaacagatgaggacaatacgattaatcaaaaaacaggttgtaaaaactgcatcagcccaaaaacgtttagggacccgtatttgaaacaacagagctctagtagtctcaagaagtctaatttttctttcagcaatcccattctgagacggtgtatctacacaagaagtttgatgaataatgtcatgttgaatcatataattctggaagcattctgataagtattctttagcattatcactttgcaaaatttgaacaaacacattaaattgtttttttatctcaacataaaaagcaataaagagataacaattctaaaagatttttcatcaaatataaccatgtcattcgagaataatcattaagaaaggtaacaaaatacttaaacctagttttagacacaactggacaaggtccccaagcatccgaatggactaactcaaaaggagcactatctcgtttatcgactctaggactaaaatcctgacaatggtgtttagcaaattggcaagactcacaatctaatgaaaacagactagaaaactgagagcaaagtatctttaatatatgtaatgagggatgacccaatcgacaatgtgcttcaaatggggtcacgactccagaacacgctatagactttggtacttgtgtctcaagaatgtaaagacctcccaattcatgtccttcactatcttcttcgccataagatcctggaatagatagaaattagaaaagaatgagatacaacagttaagagaacgagtaagtttactgacagagactacattaaaagacaaatcaggtaaatttagaacagattgcaaaggaattggaagtgttagaataattgtgtcagaccctagaacacgagatgtggacccatttgctaaagtaattgtagtgctatgagtatgtgatttaaagaaataaaatagactagagttacctgtcatgtgatctgtggcaccaaaatcaataacccatttggaagatgaggaaacaagacatgtattcattttacctgaatcaacaatagcagtaatagaagtagatgaagactttagagattcctagtattgtgaagactttgccatactcatctgtagatactagaatactcaggaacatcatcaatagatgatgtatgtgctgattagtttgattgattcttgcgctgcaaccttttacaatccttcttaacatgtcttagcttatgacaatagtaaccgacaacacttcttaaatcctgttctcgaataccaagattacctgagtctctccctttcttatatggttgtctcccagattcagaggtggagctgataagagcaactattagattgaacatgtgctaaattttctatgtgaagtaccctactgaaagctttttccaacgaagatatctcagtgctagacaggatttgagatttggcatcctcaaacttggaaggaaaaccagccaagaagctcataattgtcattttttctctctgagcttgctgaattctcacatcactactaaatggaagtaacatattaaattcctcatgagtctttttaaaatccataaagtagttagtaagagttctatcacattttttctgtacgataaaggcttgatatacctcataagtgcatttgatattttccttgccagaatacacaaacttcaaataatttatcaattctttcataaatgcacaatgattaattagctcaaccacctcactgtcaatagaattacgtatttgcaaaaataaacgatcatcatctcgcaaccatgaggcttttgaatcgtcattagatgagtcattagttaaatgattatccatagaaatactctgcaaataaagcccaaaagatttactccaatctaaataatcagatctattaactttatgttctataattttagacatcacaggaacgaatcagacataacaactgactttttcttcttcatattagaaaatcaacctaataacagaataaaaaaccacaacacagccgcaatttgttttgagaaattaaatctgttcaaaactagattacacactgaatagatgttgatccaaatagttagaggaatgtatcgtaaaagtcgaggcaagcagatggacgcaaaaaggacctgattacagtgacagacgcgctctcataccccggcgcgtggcaggagagcagattctactagcggcgcgtgtgggtcatgcgctaggcttctggcaacgaaactctagacgaaagccgatcggcggctgacgcttcccttagtctgggcggtgagagaaataaatatctaaaagagggagacctgaaaaaccctaacaccctactgtatgtaatttgcagaaatttcaaaggtacaggccaatgtgagaagtaatttttgtctattcatcaacgattgttacatctatttatacaagttatatctctaatataggaattcaaatcaaatactaattcctaagttaatccataattattctcctattatgtatagctgtaactcctaattaaaatgaaataattataacaaacatcaaaagagaacccttcctttatataattttgtcttagttcaagtagaacaaaacatttctcaaacctcttatggactttgttattgagggaaagtattattatcctaaacactagatatgatctcctattgattttcagtggctcaactaaaaaattgagaataactattttctcaacttataatttctacaaaaaacatattctactagcaaaaatattaacaatcaaagagaaagaaaatctaaaatagaaaaataagtcttaatttggtatttgcagagattcaatagcttcccttatcaggataaggagtcttagtttaggtggttattaattaatactaaattctcaaataagtaggcaccacaacattagcattttagtaaaaaaagtgaaaataactcttactaaagaggaaagctcgtgtttgaccgaagtacccatttcttcctagtgtatcaatgtctgcaatcctagaattggggatttaataaccatccatcattctgacattatttggaaccgacaaagttcactgccccatggctggcttaagtgaaaaagttaggtacttaatcatattcctcttttcaatttatcactgcgtgtattggcaaacagtatgcaccattaaattaaattatccagctttcataatgtcaaatatgtctaaaatataatctttccaacccttgaaaaatttacaagaagtgtggttggaatggaatataattaacatgtattgactaatcaaatttcctggataacttacatacatatatatatatatattaattattctttctttataagataagttttaacatgtacttctcccataaaacatagactttttgcacgaatgtaggctgtacgaaaggtatcccctgcccatcgatgacgcactcaattctgatccattgagatttgaagtagtttctgggtagggcaataggttattgaaaataatcttggatgtaatccattttatataatttgttgagaacatccttgtttgatatgataatgctgttcaaatatgagcagacctctggttcttgcacagtgaaggttttggcttccttgttttgagtaaataagcctttgttgactttatttacttatgatattaaactaaatttatatttatcaaatttcataatttcaatactaaggattattagctgtgttgatttcttgcagggggagatgcgtatacatgcatcccccatgtgttccatttatatttatgctgttacatgtggaggaaattttcaatgacctctagctgtagtttgttctggttcaggtattattggcctgttaatttgcagtttacatgcttggacttttcacaaattgtcattgtgtatgatttgaatactatttgctcagccaatattgtcagctgaagatggactgtttgcttttttctctttcccaaccatgaaatgattttttgacgattccaatggactaacttatatcatcatttttattttgtagcttttcaagggcctggaagcttttgatcgtaaacc

SEQ ID NO: 6708 - DNA, 404 bp, Ricinus communis
  Intron number 1 from transcript 43540.m000048 (locus 43540 .t000003) derived from phytozome v7.0 (chr-ID 43540; pos 4 616 to 5019)
gctttcttcaacaacaattttgttcagagaagaaggtacgtagggtttcattattttaactagccacttctactattaacaatgtgttcttgtagtttctaatagtattttaaaaaccgaagccatgatcaaaccggccactactaccctcaacagtagtagtgttttaaaaatcgatccgatgattaaaccgaccactgctactcttaacaatgcatttttgtgatttctaaccagtctaagcaactgatcaaatccagtttgacagaatatccggttttaaacaccagagagcgtcgaactagttgctactaatttatggttgaacccgtacttatctgatttaaagaaaatatatataatttttaatttgatttatggctgttcatattcacaggaagata

SEQ ID NO: 6709 - DNA, 607 bp, Ricinus communis
  Intron number 2 from transcript 30148.m001472 (locus 30148 .t000071) derived from phytozome v7.0 (chr-ID 30148; pos 4 29177 to 429783)
tatagaaaggtaagtactcttagttcctgcttgatacaatattattatagcttcatattagcaagatgctttgtagtttaatgttgagatgcagaagtttaggtgctgtgcttagtgcttactacctactttttaactttggcttattgaagaagaaatactctttgctgcatcatctacactgcatttagctgtcttttaaacttaataattgtgctgattatgaatactgtggttgggattttgagaatcttttcttcaatttttggtgctcatctataatgttatatatgtcattatttgttttcctaaactaatgaattctgtatgtttggtgcttcatactcagtacctaatatttgaactgtatctggtggtggatgtgtttgaggtcatttgtgtttttttaagcggtgagatagtgctactatgcatcattcagtaactgcttataagttttgtcctttgtgtctgtacatttgagatatatcatgtactctgctgccttttagaaatcactttgcgtttgcattaatcagttcttatgatttgcatgttaacttaaattgctattaattattgcagggctttgacgtgaaattgatag

SEQ ID NO: 6710 - DNA, 1147 bp, Ricinus communis
  Intron number 1 from transcript 29848.m004680 (locus 29848 .t000236) derived from phytozome v7.0 (chr-ID 29848; pos 1 318270 to 1319416 reverse strand)
ccgaagtctccgactgcccctgtacgtaatgttaattgctaagagtaatataatcatagttaatttgttatcttagctcatcgtgattttgcttatgggtttattttaaaaaaaataatttttaaatgaataactaatatatccaagctaaaatttagactatgatatattaatatttaacgtttcaaattttaattgttattttactagaagtagaaacaaattcgtatatactataagaaatttaggaaaaaagtcctaaagcaattcaatgtttaatattattattgagcattttatactaaaaattttaaatttaattaacacatccaacatttgatattgttgatccaagctatttttaaaaaatattaatataagaaaataaaatctaaaaaatattaattatgagtaaattttacgaataatgcatattgaaaaagaaaacactataccttttctattcttaacaatctcttggaaggcaatgtgatgtataggtacaattagtcgagcatcaacttaattcttttttatttatggagtgttcaatgaggcatagactatataatagaaagtagttatctctttataatcatcataaagatgaaaacacattaatttagaaaaaaataaatttctcatttctcatttttgaaataaacagcttttaatatttgaattatatcttaatttaattaaactcatctaataaagtgcgcttaataaatgagtcggctcaaattaaataaaatttgactcattaagttcatatttaaactcgtgatctaatacataaattaatatttctaatgtgaaatttaaccttatacaacaaattgtttatttaagcatatttattaaaacaaaataatagtttttattaattatggaaagcgtggctcaattgggttgaattgcagctctaacgtgacatatatattaaaattcaattcttaatttccgccatcacgaagcaagtattctgtaacactcttagctacaaataccttagcggtttgaatcacaatactacagaatacactctttaattagcttggagttacattcttgtagaatgattattattgtgtacttggatggtatatatatgcagctatactgaacctcccaccagactccccgg

SEQ ID NO: 6711 - DNA, 7913 bp, Ricinus communis
  Intron number 8 from transcript 28498.m000205 (locus 28498 .t000004) derived from phytozome v7.0 (chr-ID 28498; pos 4 7699 to 55611 reverse strand)
ttttgaggctgacaaatacgacgagtttttgaagagtaagcagtttaaatattctagtttattgtatctgttttatttcttcttattttacctgcttcatagatgtcaaacttgattgtaccagccattaaattgagatttaatttggttttctcgaacaaacttgttgatggttcacaaaactaatgaaatgcttatgtcccacctcaaaagtggaaggccaaggtggccttagaaataagcatttcttggcccatggcatgaagcttggtgtggaatagctacatatcagtgaaaatcagagtgaagttccattaagcagttcctttttgacgttattctattattagatcagtcatctcatatatcatttggagtgaagatttgatggagatgcataggggttgtttagtttagaaatttaccctgttttctagaaaattactccaagaaaattagaaaatagagtttagtgtctagttgaataattttcttaaaaggaaaattgggaaagtatttttcaaattctttacattagctaatagaaaactatctttattagttcttcaaaactcattttaaattacaaagcaatggaacaaagtggaaaatacgcctttctactttagcattaatactttgcaattactagatacaaacctaaggattgaagtcaaactcatttttcttttcctttttccttctttaaaaaattattttcagtttggaaataaaaaggtggaaaattaagaaatggggaaactagaaaatgaaagtagaaaatattttccagaactaaacaaggccatcgtgatttgacacatatgcttttatatgcttgttatgaatgaatgcagtggcattgagctcactgctaggctacttgccaaaatggtaatatccctatggcggaattgctatcctaccataatagcttagaaattatgttcatgctagttataatgggttttccataatttatattgtagtatactaacttttttctctatgcattgcatgtgattaaaattattattgaaaacatgattcaattcatttttaaattttttcagttccaccatcaacgaaaaagactccacttgcatttaaatttattggagaatgatattatttgcatgcaatttattagtattcccataacttcgaggtctctatcgtcatcttatccaaaattcctctcaaatttgaagctcctaagtttagttgttctttagaaatctagagtatatcaatacttgctatatcccatgctttgaaaataaaattctatacttgtctaatgaatcttgatgtttctttatagttaatatcataacaaatatttatgaagatcttgctataaatttaaaaaataagtatctctttcaaagtagggttgattgcaagcttttaaattaaaaacgaatagctatagaatataagaaatatcattttaaaaatttagaaacaattgtcaaatataaatctatgttttattttggtaaatagtgtaaagttaatttaaatatgtaaactaaatttaaagtttagattaggtaatattttaaaattttgaatcaaattaaatattctatcttaaactacataaatcctgaaaaccaatttgaatttttccattttaaaagttagatttcctaagaataagtaaaggctattttcattaataagtagaatttgtattgtccaaaaattctttcccttgatatctgcttctatatgttgataagttagaataactaattagtttttgtttgttagagatatggataaacattctaaggtttagggataagataaattagttcctatctaagttctttttctatcctttagctagtatatataagttgtgtttctgctatgtttgatatatagaaaaagtataagagaacatttttcttttttccttcctctaaaattctacatggtatcagagctcagggcttgatcatgaattttaaggctgccatggttggctctagttcagccacttcagaagctagcagtggcgtgacaccatcagggggagtttctcagctactttcacctgttcctcctgaaaattctcttcaaatcaccattcacaaactgaatggcaagaattatcttgaatggtctcagtccatgaggttggtgactgatggaaaagggaaacttggatacttgaatggtgagataaaaccaccaacaaccgatgattcgaaatataggcagtggcgcttagaaaattcaatggttactgcctggttgattaactcaatggatccagttattggaaaaccattcatgtgtttgcagactgctcgggatgtttgggaagcagttcgagaaacctatttagatttggacaaccattcgcagttattcaaattaaacacccatatgtggaaaatgcaacaaggtaatcgagaggtaacagcttactataatgatatgatggctatttggcaggaattggacatgtttgaagatgaacaatgggaaaatcctaatgacagtgctcggtacaaaaagaaaattgaaagaggacgagtatttgttttcttggctggtttaaacaaagatcttgatgaggttcgtggacgtatattaggaaaaaatcctttaccaactattagagaagttttttcagaagtgcgtagagaagaagcacgacgaaaagtgatgctgaaaaatgatgaaccaaaaatagatgctgacggatctgctcttataactcgaggtacaaacttagggggaaagcagaaaccctggtgtgatcattgtcgaaaaccatggcatacttgagatacttactggaaattgcatggaaaaccgaagaagaaaacaggcagcgataacaccaagttaggaggagatgtacgagcttttcaagctagcaatactaatctgggcagcagtcttcttttgaatctcttccttttaccaaggaacaaatagagcacctgtataaaatgtttaagttccaaactttagaaaaatctgacttgtcttgttcttttgcacaatcaggtaattctttcattgcagccatagcttgttccaaatcccatagcacttggatattagattcaggtgctactgatcacatgtctggcaattcgcaaattttttcctcttatataccttgtgcaggaaatcaaaaggttaaaattgcagatggttccttagccactgttgctgggaaaggaacaattcctattttcttttctctagttcttaagaatgtcttacatgttccacatttgtcatataatcttttgtctgtcagtaaaattgtcaagtgatttttaagtcttcctattgtaaatttcaggatttaacctcggggaagatgattgggggtgctaaattggatggtggactttacttcttcaatgatgagtcaatctttggaaggcaagacctgcaaacttgtttcaattctatttctgtttcaagtgacactaagattatgttatggcattatcggctaggacatccaaattttcaatatttaaagtatttgttcccaaagttattcatgaataaaaatcctttgtttttccgatgtgaattttgtgaattagctaaacatcaccgaactgtttactaatcgcaaccttataaacagtccaagccatttaccatgattcacagtgatgtttggggtccttctagagcgccaacattttctggaaaacgctggtttatcctttttattgatgatcatactagagttacttgggtctttcttttaaaagagaaatctgatgttgaaagtgtgttcgaaaatttttataatatggttcaaacacaatttcatactcaaattaagatttttcgaagtgataatggaaatgagttctttaacaatgtgttaggacaattttttgctgaaaaatggattatttaccaaagttcttatagtaacacgcctcagcaaaatggggtggctgagagaaaaaataaatatatcctagaggttgttaaagctcttagttttacaactaaaattccaaagtatcattggggagaagcagttttaacagccatatatttgattaatagaatgcctacaagaattttgaattttaaaacaccaattaaagtttttagtgaatgttttcccataactcggctaactagcaacattcctttaaaaatttttggaagtgtggcttttgtccataatcatgatcccaaacgttcaaaacttgatccaaaagcacataaatgtatttttgtaggctatcctgcaaatcaaaaaggttataaatgttttgatccagttttgaaaaaaatgtttatttctatggatgtcactttttttgaaggacaatcatactttgacaaatttcatcttcagggggagaacactagtgaagatgtctcaactgattctagttatgatttaaattctgatttaacttttgagtttttttcaaataatggtatttcttgggagtctgatcatgtttcaaaagaaaatgggtcgaaaaataaagaaagtgtggaaacaaatgatttaaatattgaaaatactgaacagcctttgataaggtcatctcaaaatcaaaatattgaaacaactgatatctatgcggaaaagtttaaaggtcttgtatattcaaaggaacatcaagcacaaaaaagagccaccatcccacagcaccatcaagaatctaatcagaggttggatcatgaaatttatggtaagtctccaaaacttcctacaaataatccatctagtcaacttggtcttcccattgctcttaggaaaggtgttaggtcatgtactaaacatcctttgtcaaattttgtatcttacaaaaatatttcatcaccatattgtgcttttatctcacaaatgtctagtatggttattccaaatagtgttcaggaggctctaaatgttcctgagtggaaagaagctattttggaggagatgagagccttggagaagaatgctacctgggaagaagtggatctgccagatgggaagacagttgtcggatgtaaatgggtgtttactgtgaagtacaattcagatggatccttggaaagatataaagctcgtctagtagccaaaggatttactcaaatatatggagtggactactatgaaactttttctcttgtggcgaaactcaatactattcgagtgctcttgtctgttgcagctaatctagattggtccttgaatcatctagatgtgaagaatgcctttttgaatggtgacttaaaagaggaagtatacatggaacctccacctggttttgctcagaaatttggaaccaaggtatgtaagctaaagcgatctttatatggccttaaacaatctcctagagcatggttcaagaggttcacaaagtttgttaaaggtcaaggttataatcaaagtcaatctgatcatactcttttcataaagagttctattgaagacaaaatttctgttttaattgtctatgtagatgatataattttgactggagatgacataattgaaataagcagattgaaacaaaacctagccaaggagtttgaaatgaaagatttaggccagctaagatactttcttggaatggaagtggcaaggtcaaagaaaggcattgttgtctcacaacggaagtatattctagatctcttgaaagaaactggaatgagtggttgtaaaccttttgaaactccaattgaagctaattctagacttggggaggtaaagaatggtgttccagtagacataggaagatatcagaggttggttggaaaactgatttacttatcacatactcgtccggacattgctttcgctgtaagtttggtaagtcagtttatgcattccccatatgaagaacatcttgaagctgtatatcgaattcttcgttatttgaaaagtacaccaggaaaaggactttttttcaagaaaaatgaaaaaagaggagttgaggtgtacacggatgctgattgggcaggttcaatcactgatagaaggtcaacttttggatactgcacatttgtttggggtaatttagtcacatagagaagtaaaaagcagaatgtagttgctagaagtagtgctgaggcagaattcagatcaatggcacagggagtgtgtgagattctttggctgaaaagggttctacaagagcttaaaagatctgtgagtttacctatgaagttgtattgtggcaacaaggcagctatcaatattgctcataatcctgttttatatgacaggacaaaacatgttgaaattgataggcacttcataaaagaaaaacttgaagaaggaattatttgtactccatttgtaccaactacacagcaggtggcagatattttaactaaagggttatttagataacaatttgaattttaagttagcaagttgggcatgacagatatatttgctccaacttgagggggagtgttgataagttagaataactaattagtttttgtttgttagagatatggataaacattctaaggtttagtgataagataaattagtttctatctaagttctttttctatcctttagctagtatatataagttgtgtttctcctatgtttgatatatagaaaaagtataagagaacatttctcttttttcctttctctaaaattctacactatatatatagtatgatattatgattcttataggcattatagtccaacccaacaaactatattcttagctgaatcttttgagataagaatttaatggaacttgttgcccgtctatctcttctctttttccctattttttttcagcttttttaaattttttcttatgatcttttgcacctcaacttgcaaaatgagttataatactattcttgcataagtggatgttctttttcttctttcctctctccttctaaactcctctcaactagcattttaggaaaaggatctatcgcctacctcaaagtaaagacttgtggtgttgcaataactatgtgtcagactgaattctattacctttaacattttgttcggtaaaaaaataggggtcaaaataagaagggaaggtattttagatattttcttcatttatccttttactttttgtctggatggaagaaaaaaagaaacctattttcctagttaagatatgaaataaaagaatttatgttatctcatttcctgtcctctttttgtctgggaacaaaagatgtcataggtaaattaattgtgaaatttgtttattttctcatttcttgttttggtagaaggggaaaaacttatttccttgtctaaatataataggaaataagaatttctttttttcttttttttacattaagttaaccttttcccttttacaatttacaaggtatatttgattttcaaatattcaagggcatataagtgaccttacttattagtacactttcctttctattctctttctattttctccctgtattggagagattggttgtagaggaaagtttgggggttattttcgtttcttatttttctccctctttcctgacatgaaaagatcctttctgcacttatttttctttctcatattttttcctcgcatattttctctccccaaaacatagtgcaattagacttgttcatgggattgggtgcttgcccaagctcccttgaaaatttttgggcttggacacgtcatttttactttaggagctggaaccagaaaaatcctgattattttttgggctggcttggatgtttctttgaggcctgcccaacaagtccagcttccccctgaaaaaaattataagtgaaaagtctatatattcttaaaggcggttagttggtcaaaatcttaggtccatatagtttggtgttcctgcaattttatgtagttttatgtttacctttttttctccttctttaacttgttagtgattcttttcagggt

SEQ ID NO: 6712 - DNA, 8892 bp, Ricinus communis
  Intron number 6 from transcript 30157.m000798 (locus 30157 .t000007) derived from phytozome v7.0 (chr-ID 30157; pos 1 79013 to 187904 reverse strand)
cttacacataagaatttgttgcaccaggtttgtatactgaatctttctccataggagcttgctaccacatgaaactatgttattagtatctctctaatttttgacttaactcagtttagtgacctcggttgaaaggtacagctttcaaactggcttttacctagtggttatccatgtcggttttgtcaaggcttgttgccgcttacctatttcttgcaatcaagtgtgtattcatgatactaactgggctttgacatggatttggatgttttaatttgcttaaagttatttttgagaatgctatagatggttctatgaaatttgacataacagcttcgccttgttattactgagttgagcacagcgtacatgatgtagcagatatttatctaacctgttctaagttggttttcgtggaaaataaagatcttaaaatttgatccagcttggaatttatggaaattcagttttgaaatagagaaatagaaagcaaaaatttctaagagtcgacacttaaaaggtttaggagtcgcaccaaaagagaattgaaacacccaattctagagtgttgaatctgaaaacacttccctcaacttttacaaccttaggtatgacaatacttggattaggaatcctaaattaggaaatttataaactaaactaattaggaaatactaaatcaactaaaacttttaaaccagacataaaataacataaagaattttaaaacaaatgttaacaactgttcccgcaaaacttggacttataaaaatacccttttaggtattgaaattgtaaatattaggccaaaattatgaatctcttggttttttgattttttttttcttgatgttttccttgttcacatcattctcccatagttggagaaaactcaaccttgagttttgaaatgtctaggaggcaataacaacagcgcgttcaacttgaattcgaccttcttaactattgatagcaaactaattacttgaaacctccttttagacttaccttttggaataatgaaatctaccttttgaacactagcaataggcaacactagttgaccatcttgagcatctttcctaacttgaattacaaatttgatctcctgtttgtcttccacatgttgataatcatcttacaaaggctctacttgttgatgcctttgtaattcttcctttgcttgaattggttcttcatattcaatgtcttggtcatgtgaattttgaaggaggttttgagaattgaggctttatggttgcaacatttgatttgtatgtggatcatggagttgaattggctaatttaaggggaatttataaacacctcccatgaggttttgcataacctgcatttatattccttattttttaataatgtgcactttcatccctcgtgttaactgccgtctatttaggtgttagtattgtgtgaaattactgaaaaaggctataaagtttgttcaattctgtatttttattactttttttttaaaatatgaaatattttttttgtattagatgaaagaaaataaagtgctgtattatttccttaatttaagtgaaaaatatctttctttcattctgaaataaatttcagtttaatgtagattcacgtaaggataaaaatgtcttctaggttagtaaaatatgacacttcagtactttaaccaacttaaaactcattaaactaacagactactaacataatatgactattacgatgaacgacatacaaaaaggagggatgaaagtgcatatttttaaaaattagaagacgcaagtgtagattatgtcgaacttcgggggggcatttgtaattaccccctaatttaatagttccagttgttattcccacctttttgtttgttgaggaagtgtcattagttgtttaaagggctttaccccttgctgtgttgaaattcctgcatgtaaatttagcattggaacttccagttgcacatgttgaagtttatccttgtcaaatagtaaatttgcaaaactttttatttgctggttctgcacttttggccttcctgctaatagatttcttgctccttcatcatagatagagtttgctgattaggtcttagttttggttttggtatagtttgtagcctttgaccaacttgtggacattgttatctaacgatcttagatgcaacctgtggatttaaagccggttcttgtggaaagacttggtggttttagaagtttgaatgcaaggttttgaagagaactttctaaacaactcatccatcatagcaaaaagaattttacttttcaagttggtttaagtgattagccattggcatgcaactatatgtggagttatgtacatctacacattaagggtagcaaagtttttcttgaagctttgttttcatctcttgcctgtataaatttgtagttgccttcagctcctcatagttgtagctatcaaagtaagatttgagtgtatcaatccaatcatatggtcacccccttcaaattataaatcttatattcccgttgttgatgaagatcatcaaactataaggatcctgaagctttgataccaaagttgatgtaggaaaaatttagataacttgttctctgttgattttcgcagaaaataaagattttaaaattgaattccagttttgaactgatagaaatttagttccgaaatagagaaatatgaaaaaaaaaaaaatacttgtaagagtcaacatttagaagatttaggagtcatcctaaagagaattgaaacacacaattctagggcagtagcaatttgcaggaaaacttttctttttgactctgaaaattctctcctcaactattacaagcctagttatatataaactacactaattctaacaatgcttggattaggaatcctcaattgggaaaaatataaactaatattaactaggaattaccaaaccagctaagactcctaaatcaggcttaaaataaaataaaaactcttattaacaactattcctgaaaagctagtgtagaattttatagagaaaggaaaaaagagaaatgttctcttatactttttctatatatcaaacataggagaaacacaacttatatatactagctaaaggatagaaaaagaacttagataggaactaatttatcttatccctaaaccttagaatgtttatccatatctctaacaaacaaaaactaattagttattctaacttatcaacactccccctcaagttggagcaaatatatctgtcatgcccaacttgctaacttgaaattcaaattgttgtctaaataaccctttagttaaaatatctgccacctgctgtgtagttggtacaaatggagtacaaataattccttcttcaagtttttcttttatgaagtgcctgtcaatttcaacatgttttgtcctgtcatgtaaaacaggattatgagcaatactgatagctgccttgttgtcacaatacaacttcataggtaaactcacagatcttttaagctcttgtagaacccttttcagccaaagaatctcacacactccctgtgccattgatctgaattctgcctcagcactacttctagcaactacattctgctttttaattctccatgtgactaaattaccccgaacaaatgtgcagtatccagaagttgaccttctatcagtgattgaacctgcccaatcagcatccgtgtacacctccactcctcttttttcatttttcttgaaaaaaagtccttttcctggtgtacttttcaaataacgaagaattcgatatacagcttcaagatgttcttcatatggggaatgcataaactgacttaccaagcttacagcgaaagcaatgtccggacgagtatgtgataagtaaatcagttttccaaccaacctctgatatcttcctgtgtctactagaacaccattctttacctccccaagtctagaattagcttcaattggagtttcagaaggtttacaaccactcattccagtttctttcaagagatctagaatatacttccgttgtgagacaacaatgcctttctttgaccttgccacttccattccaagaaagtatcttagctggcctaaatctttcatttcaaactccttggctaggttttgtttcaatctgcttatttcaattatgtcatctccagtcaaaattatatcatctctagtcaaaattatgtcatctacatagacaattaaaacagaaattttgtcttcaataaaactctttatgaaaagagtatgatcagattgactttgattataaccttgacctttaacaaactttgtgaacctctcgaaccatgctctaggagattgtttaaggccatataaagatcgctttagcttacataccttggttccaaatttctgagcaaaaccaggtggaggttccatgtatacttcctcttctaagtcaccattcaaaaaggcattcttcacatctagatgattcaatgaccaatctagattagctgcaacagacaagagcatttgaatagtattgagtttcgccgcaggagaaaaagtttcatagtagtccactccatatatttgagtaaatcctttggctactagacgagctttatatctttccaagaatccatctgaattgtacttcacagtaaacacccatttacatccgacaactgtcttcccatctggcagatccacttcttcccaagtagcattcttctccaaggctctcatctcctccaaaatagcttctttctactcgggaacatttagagcctcctgaacactatttggaataaccatactagacatttgtgagataaaagcacaatatggtgatgaaatatttttgtaagatacaaaatttgacaaaggatgtttagtacatgacctaacacctttcctaagagcaatgggaagaccaagttgactagatggattatttgtaggaagttttggagacttaccataaatttcatgatccaacctctgattagattcttgatggtgctgtgggatggtggctcttttttgtgcttgatgttcctttgaatatacaagacctttaaacttttccgcatagatatcagttgtttcaatattttgattttgagattaccttatcaaaggctgttcagtattttcaatatttaaatcatttgtttccatactttctttatttttcgacccattttcttttgaaacatgatcagactcccaagaaataccattatttgaaaaaaactcaaaagttaaatcagaatttaaattataaccagaatcagttgagacatcttcactagtgttcaccccctgaagatgaaatttgtcaaagtatgattgtccttcaaaaaaagtgacatccatagaaataaacatttttttcaaaactggagcaaaacatttataacctttttgatttgcaggatagcctacaaaaatacatttatgtgcttttggatcaagttttgaacgtttgggatcatgattatggacaaaggccacacttccaaaaatttttaaaggaatgttgctagttagccgagttatgggaaaacattcactaaaaactttaattggcgttttaaaattcaaaattcttgtaggcattctattaataaaatatatggctgttaaaactgcttctccccaaagatactttggaattttagttgtaaaactaagagctctaacaacctctaggatatgtttattttttctctcagccacctcgttttgctgaggcgtgttactacaagaactttggtgaataatccctttttcagcaaaaaattgtcctaacacattgttaaagaactcctttccattatcacttcgaaaaattttactttgagtatgaaattgtgtttgaaccatattataaaaatttttgaacacactttcaacatcagatttctcttttaaaagaaagacccaagtaactctagtatgatcatcaataaaaaggataaaccagcgttttccagaaaatgttggcactctagaaggaccccaaacatcactgtgaatcatggtaaatggcttggactgtttataaggttgcgattggtaaacagttcggtgatgtttagctaattcacaaaattcacatcggaaaaacaaaggatttttattcatgaataactttgggaacaaatactttaaatattgaaaatttggatgtcctagccgataatgccataacataatcttagtgtaacttgaaacagaaatagaattgaaacaagtttgcaggtcttgccttccaaaggttgactcatcattgaagaagtagagtccaccatccaatttagcacccccaatcatcttccccgaggttaaatcctgaaatttacaataggaagacttaaaaatcacttgacaattatgatcagaggttaacttactgacagacaaaatattatatgacaaatgtggaacatgtaagacattcttaagaactagagaagaggaaataagaattgttcatttcctagcaacagtggctaaggaaccatctgcaattttaaccttttgatttcctgcacaaggtatataagagggaaaaatttgcgaattgccagacatgtgatcagtagcacctgaatctaatatccaagtgctatgggatttggaacaagctatggctgcaatgaaagaattacctgattgtgcaaaagaacaagacaagtcagatttttataaagtttgggacttaaacattttataaaggtgctctatctgttccttggtaaaaggaagagattcaaaagaagactgctgcctcggattagtgttgctagcttgaaaagctcgtacatctcctcctaacttggtgttatcgctgcctgttttcttcttcggttttccatgcaatttccagcaagtatctcgagtatgccatggttttcgacaatgatcacaccaaggtttctgctttccccctgagtttgtacctcgagttataagagcagatccgtcagcatctatttttggttcatcatttttcagcatcacttttcgtcgtgcttcttctctacgcacttctgaaaaaacttctctaatagttggtaaagaattttttcctaatatacgtccacgaacctcatcaagatctttgtttaaaccagccaagaaaacaaatactcgtcctctttcaattttctttttgtaccgagcactgtcattaggattctcccattgttcatcttcaaacatgtccaattcctgccaaacaaccatcatatcattatagtaagctgttacctctcgattaccttgttgcattttccacatatgggtgtttaattcgaataactgcgaatggttgtccaaatctgaataggtttctcgaactgcttcccaaacatcccgagcagtctgcaaaaacatgaatggttttccaataaccggatccattgagttaatcaaccaggcagtaactattgaattttctgagcgccactgcctatatttcgaatcatcggttgttggtggttttatctcaccattcaagtatccaagtttcccttttccatcaatcaccaacctcatggactgagaccattcaagataattcttgccattcagtttgtgaatggtgatttgaagagaattttcaggaggaacaggtggaagtagctgagaaactccccctgatggtgtcacgccactgctagcttctgaagtggctgaactagagccaaccatggcagccttaaaattcatgatcaagccctaagctctgataccatgtagaattttatagagaaaggaaaaaagagaaatgttctcttatactttttctatatatcaaacataggagaaacacaacttatatatatactagctaaaggatagaaaaagaacttagataggaactaatttatcttatctctaaaccttagaatgtttatccatatctctaaaaacaaaaactaattagttattctaacttatcaacagctagtaatttcataaataccctttggatattgaaactgtaaatattagattaaacttctgaatcttttaattctttgaatttgagtaacttgtaaagttactagttaaagttgaattgaagttggaagatcatagtacaataatttagaaggtgcttctaagacgttgttggtcattggcaatgcaaattttaggtagaggagtagctcatgtagaaagctccactttgtttttaaatcgtggtataataaagacctgttatgtagtgtagcagcttttacataataggtttacagggttaggaatttcacaaccaaaaaggaaattcttctccaacaactcaaccttttgagcatctcttttttgcaaagtagctcatcgttcgcagcaggtaacttattttatgcaaattttctctaaaataataagtcaaaatttcttcatagttgggattttagtcaaacttctgcacaattatgcagtagacgtaatacaccaaatgttcttttgcacaaaatttcttgttctagaattttttattctttttctctcacctcttaagagacaggcacctttcccttgcactagatctaaagacaacatgtgtctttaataactatatagtccaattttcttctatagattcttttagttgtgtggttctggtgcttgtttctgtatgaagactatattttcataaaatagttcttttacccttctcatctctcttgatgatacattgagaatattatttctaagtttgttttctatggtttgtaattcaaagatgttttcactatatttcatcttgcttaaatgagtttcttttttctctctcttttagctacacttaaagggtgtatatttgattaagttattgctgaggctatttccaatggcatgtgttttctagataaataatctattggacgtttttcctgccgaacc

SEQ ID NO: 6713 - DNA, 3153 bp, Ricinus communis
  Intron number 1 from transcript 29737.m001225 (locus 29737 .t000019) derived from phytozome v7.0 (chr-ID 29737; pos 1 50858 to 154010)
tcctcctcctttatcccttcttaagattgctcctggtatgtatatccctctcttttctctctagcctttttaatttttttcaatcaaattttattgctttgattcgtcttgttactttttgttgtgtttctgcatctgggttgttttaaatttttatttttattttgattggttatctgggtgcaatttatggttaccctctcatcaatttgagttcttgatctattgctttttcctgattttggatccttgcttctctcgtgcttcgcaattggaatagttattcgttcagtttagtctatatgtagctgtacccacttcgttactttcaggatttgatctgtttatctgggtgatttttcaatccagagttctatatgcaacaaaagtgaatccaatttgtttattactttctttttatttttctgtactgaaacttcagctactttggttttggctttttaagttttagattcatttgtagctagttttagatttttatttttatttttgaactatgtgcaacttaaacctatatcagtttctgactattgcaagtgtgatgaacctgctttcgaggttgatggaatcagcaagatctggcctttcacttgtatgatctgagtataactaataaatgagagtcttcagcacttgctgtgttgttgtgtgattattgttttgaagccctttatgaatatcatttggtgagtccaattaaccatgtacttattcctagtcatgaacaggtcgattggcacctcttattttgttttgactggataatctgaataataatgttctgggttttggtgcttatctgtggaaatcacacttcaattgccaaaggctaattgctaaagtaatatgtgaacagtcacctgtttattaaaagtactttgttgatctgtttgctaatacaaattcgttggttagaattgatgattgtctcttcttaaatagatacatacagtgtctgtgcatttacatttttcctttctgttgtagttctttatgccaaattatttagcatggagctgtttgaaaatgtgctgcatcatatatgatagtaagagaatagagctcaatcaatggaaggaatttcttctcgttatgcttgcatgatgatctccaagttaacatattcttctcgattttatcggttaaacttgtatcctgaactttgatataatagatctcataaataaatttcagatcggcatagagttgcaagtttgatgaagtgatatgtgatggataaatggtactccctccattccattataactgtcgtcttttagtaattcactcagattaagaaagcatttaataagtttaattataggaaaaggctggctaaattagactgatttacccttctatagatattccaaaatttattacacctattccaacacaaagataaaataggaaagaaaaaattaatgttgcattgcataaataaaactgacagataattggaattcttttatttgaaaaagagacaattatagtggaatggagggagtattgattaacaacatagttggaattattttattaataaggtttataccaagcttattgatgcttcaagaagctatttggatatttatgttgaattttaggacttcctcttttccgccttgtatgcattaggttggtcataatcatagcaaactgctgccacagtatgttaaagcaccttaaataacagatccaaagaaataaattgctgatgctcttcttacttttccagttaatacaaaagaaatttttaccacttaatatcactttgatgctaagaagaattctgtccacttcgtgtttgtagtttatgccagaatggttaaacttgggataacaagtcttaacacaattggttatttccttgagaaattgatataggaggtttcattttcaagaatgttatgtagtcggacactaatcttcctgaaatggatttcttgttttaaacttggatcatgcatcctcatttggtcacagcacttaaaatttccaatctgtaactagcagaatattgggaataatctttttagttaatcttctcttagttttagtatattatgtcaaaagtagaatatttagtttttgtcaattagcagttcttataactgccacctggtagtgctacaatgctctaattattctcttctgttcaagatgattttatatttttcctctctttagtgtcctcttgaaaagaacatttccgttaaagtatctcccttaggcaaagagctgatgagaaacagaagattgcaataggaaactctcttcagggaacttaattatttgttcagttgaaactctctagcctcttggaggctgagatctctcattgctcaaaagtttcagaaactcaagagctctatgcaatgtctataggacatttgtttctaattaaagttatactttttagagccaaattttagcaatagctaaaagaatgtgcaagaataatgtttatcatctctagaacccatttgtaacaaaattgatggcaatagtccatctgtttactgatttgccctgcaattttctcttatacggttgctttttcctttgttctatggtaagcattatgcattcataagatcatttgtttctttgtccatatgcaccagacgactttgtgaatccttttcaaaaattccttgtggtttcgaaatatcagttgctgaaatgataggtgaattaggtttcctcttttgtatatgcaaagttgattatggatgctttgatctctcaattgttgaatttgatgtcaaatgaagatcatctctctgaagagagaactactggttttattgctagtttaattattggtttctatttctttcttgtgcacattctaccaggcatagctctatgttaaagcagcatacaacttttatatctgataatagacaaatctccaattaaatttaaaattgcaaaaagggagctgaatgtcttcctaatacattcttttatacatatttctttatgcttgcttaatgaacttttgatattgagttttaagttttgaggaaattaaaatttcttctactaattttttttgtttctgatatggcttctgttttattccttgcagggttggccaatctctcagtcacaggttacaactcc

SEQ ID NO: 6714 - DNA, 912 bp, Ricinus communis
  Intron number 1 from transcript 29780.m001320 (locus 29780 .t000006) derived from phytozome v7.0 (chr-ID 29780; pos 5 3254 to 54165 reverse strand)
tggttgctgttaaatatatcgagagaggtgagaaggttagtagagtggtctgttttgcatctttttactaagttatattattcctttgtgttggtgtctaatcaacagtttgttatgcttggccaaatttatgttatctatggcttggataggtgtttgagcttaggtttagccgctaatcaagttttgtctgtctagattgtaagttcatttatgtttcaagatcagtaattcctaattcaggggaaacttagttggtctctttctgaattgagtttgttttcagagtaagtgattttgtttgttcagtggctaatcagcttattgagagattgtataattggataaagcccatttagggattaatgccctggtgtctgtttgaatatactttaagaattggcttggtattggccataattggtagtccaatgtttaaataaattttacaactacatgttttacatgagggtacaatatagaattttatgtcatttcttttcatacatgagagtaataaagcgttaattaaattgctgttagtgaactgcaattacattgaggtttttgaggttctcttgtggaattggaggttaaagattccggacctaggtggatgttaatggaatctacaaaaattcctatctgaaagcagacaatttttaatttgccacagaagactacatgagtggtaacttttcagatgaagtgactttaaaatctatggggaccaggaatcttgatatcgcactatttagagtctccaatctgaagaatgatgtggaatgagtcatgtacattctgtaatttgtcactgcatactcacctttgaaggttttatgcagttttcagtttgacattgtgatttaacttgcttttttcttttttttttctttcttcttcaacagatag

SEQ ID NO: 6715 - DNA, 2461 bp, Ricinus communis
  Intron number 1 from transcript 30073.m002250 (locus 30073 .t000060) derived from phytozome v7.0 (chr-ID 30073; pos 4 35993 to 438453)
caggtacgtttacatatgtgtgtgtgtgtgtatgtatatatatatatatatatacgcttcttattgattccttttataagattgaaactgtaaaatcaatatttccttagggttttatcagcattatatactgaaactggtgaaaatttgattctttatgtggctatctggaaaaaaagtagttaatttgagtagttttagtttctttaatttctctcaagctattttagagttttatatttattattattactgctgctgctgattttgtttcgataggaaaacagtggctaaaaacctttttgtttataagtaaatccgatgatctcataaatgttagctcatgtgactgagggaattatttgaatttcaaattatacatttgtttgtacttaaacaagaatagaaaaacgcaatctttatttatatttataggattgtaggcacatatatctcaggaaagttaaattatttagtaatgcttcgaagttaccacgtcaacttccttctttcaattttttcttttcctggtagagatcttttctttttttggctaggtcatcccttgtttgcacagtttttcgttttccagtatataattggcttaattcaattatgtatgtgtcagactgattacataaggggaagtttaatgttaatccttgtttatgattgcaatttgcaagccaatctacttcacaagaaaatgtagtccttgttattttttcagccatgggaaaggacaaatttatttgttcattctttgacatatgtttacatttagcatttgaactttagtaaacctctgcatgctggagttccaccatctttttcttcttttccaattcgatgatcgtttaaagttcatatgtctgtggttttagcttaaatatattagacatggggaggaatgtgctgtatgcctttaggctcttttctctagggagggttttatcagacatggaaatgtatattatttctgattgatttagggtgttcaacttactaactccaatggtctatatacttggacatgcttctgtttcctgcatttgtgacttttcagattgcatatgtgtatccaattgtttatgtgttcttcttaatgaaaagtcatagcacccttgcaaatctatgtgccttatagtaaagtgaggttacactctgatacaactgtccataagggtgttgaaaaaataaaatgctagtgtcttgtctttcgctatctgtgcaagattcttagctgtgtaattattctatgaatttttaattgtatattaacctcctgcttctgtagacccatagtcccaaattagtgatctacattttcttgtgttggaggacaaagttattacgttagcagatgacgttgttgttctgatgtgttgctttctcttgtgaagtttggtgaaagtctgcttctttattcatagcttgattttgctagtccaatcttatcatattgaaagatgtggctggcttctaaactattttgagttttgcatatttgacctattttatatttcaatataagtcattatgatgtcttggaggaaaattttgcctcgcacgtgcagatattattcttcacaaatgcatctttatgttctcctgagaaaatgacacatgcaatgaccaaagtctttgtgctgatctagtttcatactgattggaagttaacgagtagttgcctgattttcctgtcaacaatgtctacgggtgcaatcaagtcagttcattgaattgcttttgctcaagttggctattattgtacttcagctccttaacttgagtttttcaagtttgaaaccggcttaatgaatgttgatttgagattgaatattttttaaagttgagtcaaataactcaactagctttactcatatagacccctagttatctccaatcagttgtaagttatattaagcatttgattctgctattttaaaataaatacgactcaaggaattgaatatgtaactgtaatctcttctttgcttcctagtgaaatgttgataaagatttagatgcttttgactatgggaggctaagtatgctgtttcaattttagattgtcatatgagttcttacaccctgagccttttcagatgattatcttcattgactgctctttagatttatagatcctgaataccctataggtttatcttttccctcctttttctcttttccaatctttatttatagttattttgggtagattgagtggtttgcatatgtaatatgattttctggtttatgcctttgacctttaattgctagagcagttgtttgtttaactatcatgctattcgcagcacactattgaaacatttatacattaagatggttatcaatgtgggtttcatttgatttctacttgatagatctgtattaaagaggtgaaactcaggtaaccaagattgatttctattcataggatactaccaagaagtctcca

SEQ ID NO: 6716 - DNA, 759 bp, Ricinus communis
  Intron number 5 from transcript 29794.m003414 (locus 29794 .t000113) derived from phytozome v7.0 (chr-ID 29794; pos 7 52009 to 752767 reverse strand)
caagtatttcacttccggttgttcctgaagtaagtattctgtactcttatatattcttgaatatgtccctctttcggaagcatgtaggtcagtaggattcagatgtaggtatgtcaagtatttcttagttgattaggtcaaatatatattttatttttatgagttaattgtcttttgctattgtaagctcagtagcttgtctgggaagaaagtgtatgcccttatgatttgagatctttctaattgtcttaggctgctggtctttgaaaaaataaagattctttctctcactcacacacagaaacaccgccctttctcttttcatggttaagttttgaacctgaaacctagaccacctattcttttaatcagttggagcaaattcttttaagccatgtatgagactaactattacaagagtcagatgcaatctttgttgaatttcttcttttgtttttttagatagaccatttgatttcatataaaattttgtttgtgcatttgatgctttgatgtttggaatcttttgctttattgaacaatttaagtcatgtcagtgtgcaataatgttggttacttgattaggtcctggtagtttttagaattttctgctctttttcaccaacttgagtagccaaatctgtactataaagttagtgcttttatgatttgaattatatttattgcaaattgaaattagaacttttcttctcgaagttgatctggagctaacttatcaacaggacctggacatctccc

SEQ ID NO: 6717 - DNA, 1397 bp, Ricinus communis
  Intron number 6 from transcript 29646.m001081 (locus 29646 .t000029) derived from phytozome v7.0 (chr-ID 29646; pos 1 93378 to 194774)
cagcctaagtcaaagatccttcaggtatgctttcaatggagttactgctatgggattacataggtatgcatggatctaatgctacgccttctcacgtttacaggaattgtctccagttctgtttacattaatgaagagcaccgaaccatttttagatgaatactatttgactgatctagaagtaagattgaaggaaactggattcctgaatatacaatcagttctcacagatccaaggcacatgacaataactgcaacagtgcctcaatctagatgaaacctgcattgtctccaagttccggttctgattgtaagttgtatgtttctgtataactgactaattgacaaggtgctgggattcgttagtctttacttgtgtattaactgtaatttacatcattttgtgcgaagcccaccaaacaagtagcttgcaactattgacactgacagatagattatcatcggattgtcaagcattaatacagttttgaaattataattatttatttatagtaaggttaaacctcaatctttgaattattctgtaaaaataaatgattattgaaatatttttggtcaatggaaaaaatgagagaaaggcgactcgaactgaatatacggattttttaaaaaaaaaatttaatattttttttaatctatccttcatttaaattaaagccgccttttcatttttaaaatttaaataaaaaaatgagtcttaataacattttattattttttctttttttaggagccatattcatattatattttcttacatattttttttaataataaaaattaaatgaaaagtaataaaaaaatatttctgaaatataagtatttcaatataaatgaaaatgaaaatgaaaatgaaaatgaaaagttaattatgtataatagatagacatataaaatataatttttcataaacaggctaacagctatgagcaaataaatttttagtttaaggtcccatatgagttggatattcctcaatccgataacattgttcttccttacaaatcaagcatcacccaccccaccaaaccttttctattgactcacatcttaaccgtacaatgataacaacaaaaggactcataaccaaagccgtcggattaactacaaacacgtctgctgaggaaaaaaataatctaatctgacggttcacattaattagagtgattatcaagaagaatctgaacatgaagctccgcgatctgtgttttatttgttctctgaaacgaaaccagagaaaattgagagagagttttcttttccaaattaataatctaatccttcgatttccaagtgctgatttaaagctaaatttttctggaagtcttttattttctcgatttaagttagttctttttgtatctctgtgaaagatc

SEQ ID NO: 6718 - DNA, 3461 bp, Ricinus communis
  Intron number 2 from transcript 27905.m000073 (locus 27905 .t000003) derived from phytozome v7.0 (chr-ID 27905; pos 2 8111 to 31571 reverse strand)
accgcatcaacgcagacacctgggaaacttttgcagtaattgaaactcatttgtagacttaattatgtccactatatagtttcttaatcaagttacataatgggtcttactgtgggatatctgaatttaagaggcttaaaaattatatttttaaaggaaaaattatctaatataacgttaactttgccattttttaccctcaccttcacattttaacattttgatttattatttttataacttttagcaaatctattcaagctcatttagagttatgtctttaatgatgtgacatgtaaaaatattttattttatgctaatatggaatccagccttaactataattattccatctaccataacctttgaccatttttttaatatatcctcatccatctaaaacatacagttttctaatcatatatatatttatatatatagaaataacaatatttctatcttttcttctttatcaaaattttttaggtcaagtggtatgtttatagaaaaatagattttagagagagaaagcaaagagagatttgtatttataaaaactacaaaataaaatacaaattcaatcaagacatctatataatccaatactatatcaataagaaacaaatatataaaattaatctatatcacaaaaaagaaaaaacaacaataaacctaacattattccaaaatatatcaatcaaacaattaaagaaaattaaaaaaaaattactataagattagtagaattcaaaaaaaataattaaagaaaaataaatactcacaaagaaacaaacaaaattaaagaaaccaacaaaaagctaaaatatcaagatattaaaagacatgtatctttattatacctctaagttgttgatgaggaaaaataacttttaataccatttgatattcttgtgtttcttgttcttgttgttatactttatcaaatagtaatgagaaaaactcttggaaaagactgctttatgtctttttgtcttctgtatttataatagtcgccactctctttcttttcatttctctctctataatcacaaacattcttttgcattctttttctaaaatcttctaaaaaaacatcgatatcatttctacctttcttttctttcatgagggtatatttataaaaatgattacaaatcaggatagattggacaacttttggtatggatttcatgttggcaaaaaatagaacacatatatatgccacatcatcaaaagcatatgtctaaggagggtgtattcaattaagacttttaaagactttaatggagtttaaaagtcaggatgtattcaataataactttaaaaaactttctataagtcatgagatattcaatatagacttttaaaaacttcaaaaagtatagaaattagtgattattcaattataacttttattaagtctttaaaagtaagctagtattcaaaaagtcattgacttttatatatttttaatgactttttatgcatagttatgaataaaaattctcaagatttctctttcactttttttcaaaatttcaatagactttctttttcgaaaactcatcttttttcttttcaaattgtcctgcattatcatcttcatttctctttaccatattctccatcttaaaaaatataagaaattggatgaaactgagaagttaagaattatttactaataatattttcttgtactcatacatacaaaaaatttaattaaagtttttaatttaattttaaaatggccctcataaaaaatatgaattttaaataaagcatttagtgactttttttgagcaaacaaccccatcatatgtagacttttaggttttattagaaagattatttggataattttatctgttggtaaatgtgattgtcattatagtatttatcaattaattagtaattgtgattattattagtttaagtatttatcaaataagtaataaataaaatgtaatgagcataatataaatttagtagtttaattggaaataaattgtaatataataattttttttgaaagaattattttcttggcaaaaaaatagtgttcatgttataaggtagaaattttaataataatatgaatttaatataataataaaattaagtccattacttatatataaagttgcatataacattatgtggaatcatttttaaagtaaacgcagaaaaaaaagaaaaatatgaagaaaataataaaaaatgattaaatttatttttaaataattaaataatagataaataatagtttatgaaaagcaataaagtctattaatatctataaaagtatttttaagtaaaatctatgaaagtcattcataaaattatgaattctgtaaaagtaatattccatatttttaagtaatatgggttatagtaattataatcgaatgtaggcatcatagtaattttttctataaaatttgataatatttcaatgataaaatatttttttatattatattaatggattattttaaagaatgggtgaaataatacattaactcaaacattaaaaaagtcactgaaaaataaaggattaacttgtttatttcgcataacttcaagaaggttattgtaatttacctaaatattcagatactgagactctattataattaatatatttgatggacaaaaaactattcaatattaaaatattagtttattaagttcagaaaagatgaaactataaaatactataagatatatttaaataaattacatacataaatttaaaaatcaacaaagtattgtctaaaataataatttattattaaactacaaactaaatatttagttttcaatccaagaagtaattaccataaaaaagctcatactcttaaataacttcatttcacttcttgcttttggtggcaaatgtgtaaaagaaacttattttatttagtagtttctaaatttctttccatttggtaactactaaaattttaatttttttttagaataataagcatcaacataataaatactaatactatatttggttaaaaatcattaaaaaattgaatttatttatacatgaattcatatatcttatttattaaagaataactaagaattcacttcaaataaaattaagattatacctgaaatgatttataataagataaaaattcgtggagatagaagatataagagaaaattaaataaaattggttttatgaaataacttagtttattaatataaaatttatttaaaaattttacttattttactagaatttaatttacttattctaaatttcattggaaaagttatctaaataaataattatactctttttctttcaaaatgatctttttgattatttttctggagatagtaataaaaatatcttgaaactagtgatgaaattaaattatcttttaaaataattctaattgtactattttttttttttaaaatatgcagttgtggagaatca

SEQ ID NO: 6719 - DNA, 7879 bp, Ricinus communis
  Intron number 8 from transcript 29784.m000368 (locus 29784 .t000014) derived from phytozome v7.0 (chr-ID 29784; pos 9 6227 to 104105 reverse strand)
gtgtgacaatcactgcagtctcaacccggtaattatatagcaaaaattcctatccaaacatgctatagttcctcccaagcctgtgccaaacataagactaatgacttaggagggtgtgaatacttcagaagactaatggctagtgactttgactaaattataaacaatagcatgattctttataaaattcaaagactttctgaatgctcataaagtattcatgtctgattctccatagcaatagaacaaaaagcaaatggcgtgattcattagaccattcttttctattttgttgtaatataatatcatttttttctcatttttgaaacaaatagtcttaaaacatggtttggaaatggtcaatccatcacaggtccctgagactaagtgatataatatcatttttttctcatctaccaatttcaccagtagtcaaccatccgaatttgaacacaatgccttggactgatactattacagaaatgatctcgtctccattaacaaaagttgcttcttcaaaggcaactggtttcatagttatggaaactaaaacatggttttttttttcttctagtcttgcgccgattcacaatatgtatcgccaacgacgccataaccttaaaccaaatctttaaagatggcgacctcctaatttctaattgctgtaaaatgatctgaatagtttgagcttgactcgatttagcttgttgtttaactcattcaaaaagtataacgatccgagcttgattttatttttaaactcgttaagcgtttgagccgaacttgagaagacaaaagctccgttcgacatggtcgtgagcttttaggctcgttatatataatttaaattatctataataatataataagatatatatatatatatatattttaaaattaattcttttatatgataataaagataaagttaaacaaatctcttataaatcaaaacaaaaattttgtacataattatgatatatctcttataaattcacattcattataaatttataatctttttttatgagctaaagcttaaaaaagatagatggcatgcaataatctttttttatgagctaaatatttttattttattttcagtaaagtaaaatattattatttagtttttaattttttttatctctttaagcttattattctagattttcagcttattaaggaattctccaactacgtacaatatccaaataaaaactttctagtttcaagacagcctgtccaatcactgtctgtgtaaagattaagagaacaatctgatgaagctttcataagaaacctttgatccggcgcattcttaatatatctcaacactctaaaagttgcatcccaatgtacctgtgcacgtctgtccatgaattgtgcaagaacatgtattgcatagcacaaatctggcctaatgaaagttagataaagtaatttctcaactaactgtctataagtcaaaggatttgataacaagccatcagtaatataagctagtttatggttaacttctattagtattcttacaagttttacttcaaaaaatccatattcctgcaaaagatctactgcatattttctttgacaagcagaaataccaacagttgatcctataaaatacttcaaaaccctcaaatcccttagcttaaaatttttctttaactggtctttcaattcatcaacgatttcttttgatgaacttgctataactatgtcatcaacataaactaataaaataatgaaaccaacttttttattttttgtaaacaaggaataatctgctttttgactgaaaaaatcaagaaattttgaactttgtgaaaacttgttcattctattgccccaaggcttgcttttagtcatacaaggacttgtgcaatttacaaataagtgtaccattagtatcagattataaactctgtctctcccccagaagcttatacccacttggaattttcatataaaaatcttcatgtagatcaccattgagaaaaacattgctaatattgagttggaatagatgtcagccataaataatacttaaagccaaaaagattgtaactatggtatgcttaacaactggactaaaagtctcattataatcagatcctacttcctaagtttagcctttggcaacaagcgtggctttataaagatcaactgaaccttcttcatccaacactggctttgtcaactttgcaggtaactacacattttaccttcataatgttatgctttcacgtcttacataagatgcatttgtttggatagtggatactggagctagtgatcatatcattgggttaattgcaccgctggtactaaaccttcacactttttttcaaatggtaccaaacctttaatttgtttctttttggtaccactattatttctgtatctttcgccagtaccaatgaggaatccggcatttatttgctgatgtggctgccggatttataaaaaataacacaccacttgccacatctgactccttcattttatcctagtcagcaattaactaaaaacctttaattttatgaggaatttccattccaaacactcctttttccactcgcatctttacagaaattattatcatcttcttctcatggatttctaagatctagcaaatgggtctttgattttctctacctcttttggaagaaacgaaggaaactccccatcaccaccatcaccacctgcggtggccaaaactttaagacgacgaccactgccctttgaactcactaacacattccacactcccattgttggcggagaccccaagttaagagcaaccattggtaattttagaatcgtaaaacaagaacaaggaattaaaacccagaaaagctttggtggctagattcctgaatatgaactaaacattcactaaaaaccacttgccaccggcggtgacttccactaacgtgaccggagacattactagtaatggtgcttctccctccaccactagtcaatctgacaacctcagcagccgcttgagcagtggcaagtgcagcctcagcaaccgctgcagtggctgctgccacggctatagcatgcttgttcgcatttaaactatcatcaaatggacctgataaagaaatatcacgcttattggaaagtgaaggaattgtgtttgaagatctagcgaaactccatcgctttttatccttggccgtcggggaagaaccggaacctgcttttttgggaccaaaaagtcgtcggaaaagtcccatgtctcatagatcaaatttaaataatgatttggtaaaagcgaaagacattttttgggagagaggagtaaagagggagatcatagacggagagtgtgagattaatcttttaaatctaattaattgctgactatgataaaatgaaggagtcagcaatagacgtggcaagtagtgtgttatccttcataaatttggcagccatatcagcaaataagtgcctgattcttcattgatactagcggaagatacaaaaataataggagtggtaccaaaaagaaacaaattaaaagtttggtactatttgaaaaaaagtacaaaaatttgataccagcggtacaattaacccttgtattatttcatctattactttgtttaattcttacaaacctatttctaattgttttgttcaaatgccaaatggtactaaagcagtaacagtatagtcattgagcaaagccattaacttccgaatataatcttgagagagattcagttgtggataaccgcataaggttgaattagtacaacaaaatggtttctttaaattttttgagaccattgggacaatttcttgcttaaataataaactatagtctagtctattcctctgatccatcaattgtgcccattttatcattcacccttctttttaacatttaattgacaaatacaataaagaaaaattatgcagatttctacttatcagaaaaaatgcaaattagtaaatataaaaatcacagctatacttaaatcaatgaaaaattcttgcccagattcggtacgtgtccctatctatactccaaattatagattattgatacatatttattagttttaagtgagagtcactttctttttaaaataaaaaataattaaaattttacaataatatttaaaaattattttataattttagcacaattaatataattaaacaataagtaattattaccaccattatttttattgaaattgctcttactttcattgtcctcggcattaccaccaccgtaactatcttcttcatcgttattattaaaagaaaaaatagtaagaacactaaaaagtagcaatatttattttatttaaatatcaatatatatcttttaatttaatgtaaaaatttaatttttttttaattatatcaattctctttctagagagtgtataactcactctcttatttttataaaaaaataggattaatttaagctaaatatataaaggtttgagctaaaatatctacaaatttagaaaataattaaaataaacccaagtaataaggtgagtaaccaaattggactttattccttaaggaaacataagcaaaagtaacaacaaattatatatattttatagatttcagtattaatttcgtatatatttaatatacattaggtatttaactaatatataatttattgaacacaaaaattttaaaaaattaccataaaaaatcttttataaatgtacaataaggtacatgttagctatatatttagtaacttttaacttatgtaatatattttaattgcaaagtatatttttctccaatagcaaaggataaaataccaatttgtttattaaaatataatgaaatacattcagcttattttaatataagttccttaaaaataatatatttaatatatttacatttttagaataatacatgtaaaagatacagtaaatgataatatatttcacagcttttggtatttatttctttatatatttgaattacatttagtatataaccgatatctaaaaactgttcttttatttctactttgtacttttggtattcatttgatgtgtactaatttcttcttttacatacccattatataactattatctattattggttctatatttgtaataataattttttttaaatttaaaaggagcatacagagaataaggtatctatttcacttaatatggtatatgttatatatttatatagtatatgtatactatttaggtcgataatgtttctctttaattggttattaaaaaatggactaaaaatataaacacatgttatattagaaaacataaaggatgaaatataatttctttttactcaaacattaattttaataatataatgagaaaaaatttgtgattgaggagagcaattagaagatttatgaaaaagattatttagtagaggaattatttatcaatcatgaatgctatttcattgcttattttagctcatcaagaattatcatctacactcaattaattttaatagacttttctacaagagatcaatatatgattgagatccattcaataatattaattttttatatataattattatttaatattttttatatcaactttatatattttagtgtatgtttaatatatattatttatatagttggtaaataactagtatttaaaattattttttagtagctatttaaaatatttcgtatatgtttgatatataattagtatctgaaactgatatatatatatgagattattttctagtatctatttcatattttttacacttatttcacatatcttgatatatatttagtatacaattgttatataaaaatgtcattatgtacttataattagttagaaagttttttatcatattatctttaatattacatattgttttgtttgtatagcatatctttaataaaaaaaattagattaagaaatataagagagtattaattatttggacatgcctctgataaaaaattatatatttttaatattttatattaattattaaataataaaatattaaactctacttgcagaacgtgctcaattttaatttttttattaaataccatagattattaatttagagagatattaatttagaaaagtttatatattataaatagataaatactggaaatataaaacttgaggaaaagaagttattgattaaatatatatttgatatttataattattttaattcatatagattgcatatttataaaaatgaaaaggtaaaatgttagaaaataatataaattatatttactttattatatgtttgatattaaatgtatatgttagctatatgttaggtaatttttgactaaaattttaatctatttaataaattgttactttagattgtttttcgatagcaaagaatataatttaagtgttcattcaatataatgaaataaattcaatttattttaatatacatatattatatataatatatttactatgtttatatatttagaacaatataagcaaaagttacagtaaatggtatatattttatagattttagtatatattccatatatatttggtatacatataatatattaataatatgtgaaactgttcattagtttatgcttgtatctttggtatctatacatatgtaaatttggttactattcaaaaaatttagctaatttcttacaataaatataatatcaaacatcatcagtgcaaaatataataccatttaatccaatatattagccaactaaaattgttatttcattgtttgtctatacatggataataccattataaagaaaaagaaaaatcaaattaatggcaagaagtgtgtttctaaatatattatctcatgacatttcaaattgaacaacaaccaactctttatgtcccacaagtgctaaaagcatcttcgcatcgtctctatatatcaaattcatcggcaccatacccattaaaataattataaaaaataaaacaaaaaaattattcagcaaattcatcaaacaccttaaatgcgtatttaaatattagttgtaatcatctaattctctgcattctctaacactaaaagattgaatcactgcatcaaaattattaaaattcaacattttaaaaataaaatcaccaacaaatcaaaaggatcaaatatattatttttctaccattaatcaataataaaaagaaacctcacaaatttctttcaagttagtactaaaactcatattaccaagagattttttttgggcaaattcgtagttgtacgtattaagagttttccaaagcaaagaatgatagtcccattttcataaatgagcagccttattggttgtggaaatgagaaaaatttgtcaacaccaccatattagattcaaaagaagaagtattatggctcaatctcaagcctacgttcaaagccaaaaagatataccaatgaaactcctcctatcaatccttcccaccattacagtttttctatcaaatttatcagacgcccatgagtgagagtataaggtactcagaagagaatatttgctagaaagattatatataattagaccatgacgattctttggtgccacccaccagttgagagtgagagcaaatcagaaaaattaaaaaagtcggtgttgaagaagaagaataataaaaaaagataatacaaaccgtaaaataaaaaaaaataaaaataagagtttataatatttaaaaaaaaaattaaaaaaaatagtcatgaaacattatttccaaaaaaaaaaatggtagcttaattttgtcaaagtgatataatatcatttttctcatccacaaattttctaatagtcaaccatccgaatttgaatacaatgacttggactgatactattacagaa

SEQ ID NO: 6720 - DNA, 544 bp, Ricinus communis
  Intron number 1 from transcript 30078.m002288 (locus 30078 .t000081) derived from phytozome v7.0 (chr-ID 30078; pos 5 15587 to 516130 reverse strand)
ctgctgcgttagtattcttttagccattaatgctcaattttgattctgggtttttgttattttcagtgtttttgtatatgatttctgtcaattgtatcataattattgaattttgttttactggctatgtttagtataattgggcaaattgtcgaaagtcaattatttgatattttgctctctatagtaatggtgtgcttataggcaggggttgtattgtatgttcacctaatagatactttggatgtgaattgtgaatactaacctttgcatgtgtgtatatacctgtcttagtaattatacatgttttcgtagtaattatacatgcttaggtagtctttagcttagtgactattgaattagcatccatctgaaatgatcagatggactgtgatatatacttgaaacgatttagtgtgtggaatatgttcattgattatgtcaaagatatgttatagaatgaatttcttattcgcttgttttgactgaccgacttctttaaatagcagtaacaagaagaaaaagagaggtcaacgggcagttg

SEQ ID NO: 6721 - DNA, 4019 bp, Populus trichocarpa
  Intron number 1 from transcript POPTR_0010s05810.1 (locus POPTR_0010s05810) derived from phytozome v7.0 (chr-ID scaf fold_10; pos 7275890 to 7279908 reverse strand)
attgaccgtgagttggagcatcgtggggtagataggtatgtcttgtggcattatctttgttgtgttcatacattgtgcgcatggttttcttggaattgcttgttcatgtgtgtctacttgcttgggcttttgcatattgtcaattcgagaatgcttctcttatcttatctggcttcaaactgcttctttttgttgtggatatttctgctaggtttcatttgttgtgggatatacaatatgctagccattagttgatcttacaatgataataggacattgagaagcatttggataattcggaagttcaagtatgatctgatgcttttctaatgttagctgtgccttgttgtgatgcaaaacatatcaactgacagccttgcttattgcactagaattttgatgcttgatgatgactaacaattcttgttgtatagtctctctccaaatccatgaatatgtttatagcttgtctcatacaactacacggcagaagttttgaaatgattttctgttgaataggaattgaatattgatttgtgatgtaaaaaaatatagttgggtatttccgaaaagcttaagggtgttgacaagactcaaatttgaataagctgagctcaaaataggaaaaaagctggttctaccctgtcatcagctaaaatttccttggtcacaatctttgttgtgtttctaggctcatcctttattatcacttactgggaaaaaaaatattatattacagtgagtttttccattaaagtattttttttttcttggtccaagtggctgaactgagaggattatattgcaacatttgcatctaccgttggcatgcttaagttagttgagttattgtttttattttttccatatcatgtagttggtcatgagttggtttggtttacaattgagctttattggcaagtattccattctctgtacttcttgaggtttacaattgagctttattggcaagtattccattctctgtacttcttgagaattccttttgtgcaaacaggtttatatattttacttttttagctttcttatttcaacaagtgaattatcatgctttatgatgagattttttgttacaattgatacaagcataagccggaggagtcttgccttgccaattttctttgctagatcaccatagttggatggatgatgttgtcaggttttcatgtcaaaaggtggtatctttttttagtttatcagggcaaaggcctgagtgcaacagtgtgagttttacgaaaaaaagagatgggttctgtgtttagattttatacttttagctatatacacgataacctaccagctatttgggtgggttcttattgtgtctgcttttacttgacacaaataccttctctcttttttttaaaaaaagaagaaatgtaaaaaaagaagaagagggtttttcatctagggcattttttctatcttatttatcccctattcatcttctcctttcctgccttcaaccactggttgaatgccataatggtatctttgtcatcatcatgcatatgaaaatacacctccaaattgggaatttgctgatctactcatgattgtaattcgttcatgtttctgattttaaatcgactctgaaagttttaatgtcttcttaaaattgaattactagtttagatttttgaatgaatagtccatgtcatatgtagctaggcttttgtattactggtgatctcaggacatttgattgttggattgaattcaactggtgatatgccactaatagaatgtttgcaaatgaagggggaaaacagagatgggcattgtgcaatcattctcctttttgtctataatgtttataaacttcaatgttctatgaagggggccaaaatgcttgcttagtcttgttgattagagaataatgctatccatttgattttgaatgcttatgatcttcatggaaaaaaaaagaattttgcagtcagtgagaaacagagaaagactaagagaggtgtgtgagagaaacctttgtagttaatggatacatgtgcccttataaaatattaaatttaaggttaatttttgtccaaagaaaagtgggcacaagggtcaggttagcaaaatccacagacacacacgaatgttatacatagagagggtttctgttttttttttttgtctttttcccaactttttgttcacttctacaacttgaatccaatcattgtttcatggtgaagcatgcataaatccacatcgcacataaccaaaacatatttagatgatagctcatttctcatgtaatttttttgtttcaacatatctgtctctactgtctccttttcaattcggctcatttgttgatatgcttccttcattgcatggggttagctgatgcttctctctcttgtccattttatggacaccacagatcttataatttctgttaggagggatgctgatacttcgtgctcccactttcattttatggacacaattccaaaagttaattagctgagtttaaggttggtatatttacaaagaatatttttccaattgcaaaaaataaatatgcttcagccccacaaagactgtactcttatccttttagttctgttccaaaatatgtccattataaaaaagctgaattattcattctcttatgttcatatttttcccctttatcaaaaactaaataaaactaaatccagcacttcaacaacatttaatttgaaaggacaatgttggaacgtcaataaaaaagatatgtgaggtgggacaacatttaatagttgttcttaatatatttactttgtcaataaggaactctctgtgggacagagtgaatagaacttttttgtaataattatgtggaattacttactgttttaagcatgttttgtttaaaatacccactgaagtagaatacgttgcggttaaaaatgcacactagtccagtggtattcttattaagtgtacaccaattaatgtttcgcagaaatattgaaaacgtactttggtgttactgatttgctggtaaagtttttggtggttgtgcattgacttacttttgaggctgcctgtattcatcatgctaattactgaatttggtttgttgtttcttgttggatgaacataaaagaatgcaatttctttttttttgtggctgttttcttggttatctgtatggacatgacaatttaacatgtgcacttgtcttaattttatatagatgatgctactgctacatgtggcacttcttttccatgttgttattgctgtttgatgcaagaatgtatgtgccttatttggatgaggcagacttaacaacattgaaactgttgtaagttaactgaactggttaatcttcaatccaggggttggttttttttttcccttcttaccccttgttttcgttctcctcttatcccctctgcattttaattaacttaatggtcataactgcacagaactgctgttgagtgatgttatgttgcatatttttttaaatcccaaatttgcttgttcatgtgatctatgattaatttttcctgaaagctccacgtaaatctgcagcatcaaggcatttatgtgtcttatcttgtttatatttttgtaatggtttgcgggatatcatatggccccatcttcattttgctgaatgtattttacaccatgatttagtacccctgcttgatcttcactctgcatttctcagttttcatagcgtaaacaccacctttctactgttgctcactacatttttccacttctacctgtttgcaccttcctttaattgctgaaacttttactggagttttgcgactgcctactttattttaaagtctgtactgtgacctaggattctctggttgtatgtgaatgctttagaataatgtatttttctatgtctgtgctcattttcagcactgtgtcagctttgtgtggttctcacggtgactgatgaacttgtattcttgatactaactgtaaaaattattttaggcctgaaactgaagaggaaaagttattgaaagaac

SEQ ID NO: 6722 - DNA, 1844 bp, Populus trichocarpa
  Intron number 5 from transcript POPTR_0013s09710.1 (locus POPTR_0013s09710) derived from phytozome v7.0 (chr-ID scaf fold_13; pos 9650209 to 9652052 reverse strand)
gagcacagccagatactcatcaacagggtaattatggtgacatatctttaccaaccctcttcttcttaagcttattttaccgagaagctataataataaatcatgttacttgagcattgtttttgattgaatgcacactcgtaaatggtgaattgtttttgcggaaaaatttattatatgtactaatgtggcggctttgtagaagtcagcaaattggtgctatttgttaactttgtgaatgcttttcatgcacatgattgcatactgacttgtacacttttaatgggttttacaatatagacattgatgttgattttactttcttttctctaggtcacaatctagatgaatttggaagaaatatgtgggagatgaatttggaagaaatatgtgggagatgaatcatttaaaatcctcatcgtacttaatagatagaggctatcattatacctgtgtctttcctatgggagaaaaatgagaaaagttacaaagaacagccatatgattagacctgttatctctctagtcaccatatgactttcttgtgatgattgagttctatgaggtttggtttgatggcagttctatgaggtttggtttgatggctttcttatctttgctgtcaaaggtaatgaatgtgaaaacatcattggatgttaaataaatagacagcaaaatgctgagttgattttgtagttacactgttatattcaccattttttaattgaaattgtgaataataatactggtatcttcagcattattgttagacaccccacctagctgcctcaacgcctcgaggtgaggcaatttgatttggtgctgtctagccaagggacactcaccttggcctctcttttttttgttacttatgtccactcttacaataattctctattttaactttatatagctcatgaatgagggttactattgtaaaagaaccaaggagtcgagcattttattatctagtaaagacaaaaaaaaagagcattgaagatgtcaagataattaaaatattttggtgagttcccatgtgagagccacctctacaatgccaactggccagtcactttggatgagaccattccatcctaactctgtcttggtaacaccctcactggttcaaaagttgtggaaccttcaattatgtgaataaatggtgtctaccaagccttgttgcattaaagcccccttgtgccatcaatgactatggcattctatgggattcaacttacagcttcattaatttaatggagaaggtaatggggcaatggaaggtatctcattgaaaaactatagaatgaaaattgaaaaggagcccaaccacatggatgtggtatgaaaaaggccattatcctacaaacacaaaggatgatctacctgaaatgaaggaaggaacattgaggattcaactgtgttcagagaccagatttcagaagtgattttagccaatttccctttttgtgcataatgtgttgttatttgactgttagtctgatgtgatcagaagccagcttcatgcaaagccattaatcagctatggaatcatgcagtgtgattaacataggaagccatgcatttttttttaatattttccttggattgaaatagcactgcatggataaaaaaattcgcaattttccttgtaggatgtattttccttttccctttgttattcagtgttctttttttaagttatgttgttggagcaagcatagaaacttaacgtttatgattatataattattcagtgaagctgacttcttgttttgaatttcattagctaattgttgaaattttgtacaggaataggcactgcaactactgcagctcagatttca

SEQ ID NO: 6723 - DNA, 1357 bp, Populus trichocarpa
  Intron number 6 from transcript POPTR_0018s09330.1 (locus POPTR_0018s09330) derived from phytozome v7.0 (chr-ID scaf fold_18; pos 10208021 to 10209377)
gccacacaggtatgatgacctaaattatgcttaggtacgagtatacagaaagtctagctcgatacctcaaactctaacactagtgaatctctttttttttttgaaataatgactaacttctgattttgtatttttgttttgtttggggcaaactttctacctattgtcaatcagatttctgggtaacaatatgtgattttctttattgattcgacttacacggtcttatctactcctctttgttttatgcactcaaagatatgctcaattattgttactgtttaattttaggaatgtctatcttgctgattcttcatttgccttaccaatttgagggtctgtcatattttgaattctgtgttttctctctatggattcatgttttctccacctaattggaagctagccttttgtgtttagggcttgtgaagcagaattgattctttaattaatctgtcccctgttccaacatttgttttgtagagtttctgagaatgacacgtagcttgttcttctttattgctcttgggttgttacacagatggtaagggtggggtaggtcttaggttcaatcttagtaccatgtcttgctaatttttcctattgaagggtcatttttgttttatctcctcaaatgttcaatctttgaattttatcctcatttttctgcttaccaagcatggtttattctgtgacttgaactgcatttctgcattttttcatcctattccttcgatttctttgttaaattttgttccctagacatttgatctttatctcgaaataacgttttctcgcaaagcaaagttctctgctcaccaacttttatcttattcctgtcagttctttctctttctttactatgctggtcaaaatacttcgatgtgctcttatgtctatgtatagaaacatgcacctattctttcatttcatgttcacatgtaacttcatctcacacttttctgcttcatctgacttctttctggtgtattctttgttactcatcctggcgaccctgcaaatatgctattatctcttcccatatgaactatagaatatattacacggatagaatgtaattaataatagtagtttataactctaaaaaccaacactactagtatttctttctttcttttattttttatttttaagttacactgctttaccaattttttttttaaatacaatatgaaatattgcactcacagtaaggttaggatgtagtttacttccaaacattgtttacctaaatttggtgttcttttccatagcatgtttctttgttttgtattttttgctcatgagactatattttgcagttgtcgagtgttgccccaccaccactgtgtagaaa

SEQ ID NO: 6724 - DNA, 1968 bp, Populus trichocarpa
  Intron number 9 from transcript POPTR_0002s05300.1 (locus POPTR_0002s05300) derived from phytozome v7.0 (chr-ID scaf fold_2; pos 3434802 to 3436769 reverse strand)
gattgggaagaccctttacaggttacacacacaagttgttgattatgttcctattttttaatctcttttcttaattactggctagcactcagacactgtgacactcacagtgtctgctttatttataagtagtgtagtatatgcctttttttttcttttttttcttttttttacaataatatacgttttggatcgaagacaagagaacgtatacatagtagtagccacaagcaatcaacgtgaccgtgttgaatcttccaaagttaattcataagtagttcttcctctcttgatagtagcaaataagttaaaaaaaaattcaattaaattaacaacacataataattgtataagagaaaaaggctctagatgtaagctctaaattcacaaattttatttttctgaaagtaatgataatcaattttatttccttaggagatttacaaaactttaaatacaccagaaaccttatcttaactaaaaaaaatccaacattacaaaggaaaaaagtataaaatttgaaaataacaaagcaaatcacaaaaaactggtaaaataaaagccttagagtgagatttgtgatatctaaagatcatatgatccccgtagcgacgcattggatactataggaaaaacaacctttatattctcctgtaaaaatttaagcacgatccaacaattagataaaaaattatagctttttgaccaattattttggtccagcatgaccaaacctcctcttggatctagatttatcccactagtcttaggtcatccacataatctgtctggtgccgatcttcatctagttgggacaaacccacacgtacatgactgcccataatcattcattatttattcctcctccaaataagaagtcaagtattagacattgaagacatcataattcttcaggtgacgggaaagacgaatcctataagtattatcatttatcttctgcaatacctcacaaggatctatctttgtttccttcaacttgttacactcacccactagaaacctgtcacatgtaaggactacccataccaaatctccaacctcaaacaccatttttctatgacaagtatcagtcaaggccttatacttgacattagtgtcactgattgtctacttgatctactcataaatgtcatgcaagtaatatgccatattagtaacttggatgctcaatcgtccgatgcaaggaacaagatttaactagttcctactgcttctttactattaaagccctctgatatacctctgacactatttacaaagattgaagacacaaaacatcctgaattgattgtcgcaagccattaaagtattgtgccaccagttactcatctatttcttccaaatcattccttggaattagttggtaaaattcatcagtgtagtcattgacatatttacctataaaccaaacatcttattggatctagacctgtctcactggtcctaagtcatccatgtaatctgtctagtgtaaatcttcatctagttggggtagattcacatatgactactcagaatcacgtgttatcgcaggtccgactatattagtctttctttggtgattttgaaaaaaaatatataaatattcctttttatatggataagatgttttcaataataaatggacataatcacagtttaattgactaataaaactcagttataatttgacacaattagttaaaatgttttgcaaaatgtaaaatcatagccccttttgaaaagttgattttgcaactatttgaaaaaaaaatcaaaaagtataaagataatacatagcttaatttgaaatattcgaaaacgcattataaaatccgtcaataaaaagttgctggcgtggttacttgggtatggcatgctcttcgttttaactataaaattagaatatataattgttgttacaagataattgccatactccaattattagcctctttttaacgcaga

SEQ ID NO: 6725 - DNA, 3680 bp, Populus trichocarpa
  Intron number 1 from transcript POPTR_0014s16310.1 (locus POPTR_0014s16310) derived from phytozome v7.0 (chr-ID scaf fold_14; pos 12408692 to 12412371 reverse strand)
aaaagattgtgttgttcttgaacttcctccaaattgtgtggatgctgagtgtcatctgggatcatgcagcatccaggggtaggaataaagctgtacgaagttgcaagtctgctggtattgtaatggataaccaaaaaactcaagctgttatataatggtctgacatttataatgaagctgaatctgctcctgttagcagcatgttatgttccgatgaattagaggtgacttcatcccttgttgatgggaagagcaccccaaacaggcaggggcaacactccaggtctgcacttaattcaatgggatccaattcttttcactctctgattacttctcctttgcagctggccagcatgttctaactaggttggggccgcgcgccggaccaattcttttttaattaaaaaaaatgttcaaattataatagtatttttacagaaataaagaaaaatttgagactcagatcatcgacttgactttatccaataagcttgattaatttaacaatatgataaaaaaaaaacattttgatagtagacaaaatgaaccagaaaaattagcgataattaaatataataaatgagccactgatattatacccgagaggagaagaaaaaaataaattgaggggtttgtttgaaaatatagcccacgtgcagaaattgagaagaaaaaaaaagaaaaggttattggtcagaggttcgctcattatacacactattgtagaagtgtgtttttggcagtcttaattagccacacgcaccttttaatgtgtcacagtagatgacacttgttttgtatatgccaactatttttttttaaattaataatttttatttgtaaaaataccaaattacctctcactatacctaataataataataataatcctacagcataatgatgaaaataccctctgcctaaaggcatatatattttccttccaagggaaattagatcttttcacaatgcttttaaaatgaaaaagatgaaaaaaaccctatgcataagttaaagaatttttatttcaagggtgagcatgtcatcttattgtgcatttaaatgtgaaaatataaaaaagctcatctacactagacttatatattttgttttcaaggatatttaagtcattttactatttataaattagatgaaagtaacatattgttcttggtcaatcttaaaatgacgaaagggtctttgtgtaaagatcattttaccccaatgagttagcctaatggttttttttttgtttgaaaggcaaaaaagtaaaaatattgttctcgtctacaatgctttgtgtctaggagaattgtgtttcatcaatggcttttattttttaaaaaattttaatggtgagttgtggcacttttattacatcttcattggcatttaactttgtaatgtgtattaggatatggtagatttattgatgcgacaaagcttgtagaaactaaagattttaaatatttagttgaggatatgaaactactagacgacaatctaacctaagtaaactatgttgatgacctaacataaatttttatggaactactggaatagatctaggttcaagaggagtgttggttacaccaaacaaggttagcatcttaaaattaagataatgagagatctaatcgttagatcggacttaaattttttcaggaaattctatatgcagttttcaaattagaaaccacttcatcacttatcggatcattgaatcttctaaaattaagcccaaaaatattgtttggaccaattttgttattttcctagaattttttggatttattatttttattttggattctgttatagtttctttaatgttttcggactttaagttgtttcctattagatgtaggttttcttggcctatttaaaggttttgtaaaccttttgagggggcaaaatatatttaaatttcaaagaatgaaattgtaaatttaaagtttacatctaaatgttggtgcttattaaaattcatgtgtttcccgtgttatttctatctttctacctttcactgcatcatttatcctcataaggcatagataatagtctattttttgggggctagggctacctaaggtctcacatctcatgcttttcgtcttgttccttgaaggattctaatcgataattttttccattgattgatcatgaaataatgttttggtattagatttcatctagatttaaatgtttcaaagatgtggtcttataaaattattggcactgatagtaattcaggcattaagaaggatttaactgtgtagaatgttggaagaaaactagagtggtgagagtttatggacaataatgctacaagaaatttgtttttgagtggctaagtgaaaatgtttgcaacttggttttataactcccttaaacttgatttcttataactcccagcatatctcttatcttagcgaaaacatcatgtttgagtggcttagtgaaaatgtctgtgacttggtcttgggtcttcacatacttcacttcaactaccttgtttataatataatctcgtaggtaatgaaatcttgtgttaatatgcttacttctatcatgaagcataggatcctttgctaaggtaatgactgatgagttgttcatataaatgtatgcaagcttctcttgtgacattcataactcctttaataatctttttagcctgacatgataaacacatgttgtagcagctatataagttgataatatgactatagattgcttattcaaacttcatgtgaatgttatgtctccaatgtagaagacaaaacttgtaatgatctttttatcattcatatctccagcccaatcactataattataactcataatatcaaagctgttagagtaaccatatataagctaaaatctatggtacatttgatttatcaaagaattcgcttcaaaactttgagatgtgtcatagtttgtgtctaacctactcacaagtcatattctaaagagaatatgtagacgagtgcatgttatctcaaactcccaactaggctcttgaatgttgtagagtttatcttctctccttcatcattctttgacatctttactccacactcaactagagaattcacttttgcacaatcctctatcttgaacttcttgagaatctcttttgcaaacttttcttgattcataaagattccattttctacttgtttgatctcaattcctaggtagtaggtcatgaccaatatttgtcatctcaaactccttgatcatttcttgcttgaagtctccaaacatatttgggttaccaagtcatccacatagaagcatataataagagtaccacccctttcttttatctttacatagatagtatattaatgggagcatttttcaaatccattattcaagaaataactatcaatgcgaccataccaagcttttaagcttgtttcaatttaggatgacatttcaggggatatatcaatttaaccagttttatgaaataaaacaattatggacaagtaacacgtcaaacctaaccatatgtttttatttgcaggacaatctttgctaataatcatggaacatggagaaaagttgctggaataattcaactaaaagaattgcataacacaattagctagaacaggtcgaatatgagcggctctccacattccaatttagaagctcaaacttaaggt

SEQ ID NO: 6726 - DNA, 926 bp, Populus trichocarpa
  Intron number 1 from transcript POPTR_0002s08160.1 (locus POPTR_0002s08160) derived from phytozome v7.0 (chr-ID scaf fold_2; pos 5649684 to 5650609)
tcggggcaagaaggcttgtttttggatagtaagaagtgagtgagggagtgactctggcatctgcgttgttggcgtggcgagcgaggcgagctgttgtgtttgatttcaagcattttgattgtggtttgtcaattccaagtgttttttcatggaagatttattgtcattcatgcgtgtatttgtgcacataattttaccggtgtagttattggagagctgaggatgcataaatttgtagaagttggaaaataatggtaggtattggttttctagttaaaaaatgaactatgggaacgagtctaattgggattttgtgattttcttgagaaattttggttgttattattatttatttattttgcgtagtgggtatttactctgggtgatcttcagaattggggttgttttcttgttataaatttggggattttagctcaaaggagttagtggtcggtgtgcctattataaatgaatttgcagaagtttattagttgagacactggttccacttattgcaggtggcctagaagaaagctgaagtgacgtgctggtgcaaatgttaaagtttccctcctccaaaccagaagaatatacatcctcatctacttctgagactaagttagtatccttctctcaagttaagttagctcataaactctacaccactctgctaatattttagtctcgggttaactttttattcccttcctgctatgagaaacacactgccataactgtgttactactgagccaaaaagaaaggtaagtgaaatgaagttcaaaacaatctaatttaaagaatatatcattgtgttaactgctctaacctgtagttcttgagaattaaattctaattaattatgagctaatggattggctgattacatgtagggaatcaggtggaagatacgattgctgcagttgct

SEQ ID NO: 6727 - DNA, 966 bp, Populus trichocarpa
  Intron number 1 from transcript POPTR_0004s16660.1 (locus POPTR_0004s16660) derived from phytozome v7.0 (chr-ID scaf fold_4; pos 17059908 to 17060873 reverse strand)
tccctaaaacacccacaagtgttactggtttccaggtaattttttattgcttgattggtttcttggattatttttttgttctcaatctttactagtattttattattattatttctccttcatgtgtgtctctgtctgctatctcttttgttgctggagatagagaagacgatgatggtgattatatgattataatctacggaccttttttcctaaaaaaatattggatatctattggtcttgtcctgcttcctgctcaggatcatgttctttttttcccctcttttcttttgcttgatgggcatcaaaacttttgtttttaaataattctcatgggtttaaattgtctgtaaactttgaaaaatccagaatttttttgttttaggggaatttttggatttaggttatggattttgttgtttctttagtacgtctatactggatcgattcaaagaggttttttttaatcatttcggttctagaattcactaactgctattgtttacatccattttctttttttatctctttgaaactgtcaaaccccttaaaaagctttggttttttgcatacaaggatcttttgatttttgattcttttgttctttatgtccaaaccacctgaggtgttaactgttgattatcgtagccaagaacttgtaagctccccttttagctcatgatactgaaatactatggatttcatttcagcttaaagtgtattctttctgtggattatttctttcccttgttgtattggtcaatttctcctgtaattttttattctcgttttgagcttatacttaagtgtgggtgcaatatctacgcgtgaacacaaaattgcgaatttggaattccaactctaatgataagagtggttaagcaccctcctggtattaagtatacttattacagttgatggtaatggaagctcgttttctatgttcatttcagttccctgggcggt

SEQ ID NO: 6728 - DNA, 1553 bp, Populus trichocarpa
  Intron number 4 from transcript POPTR_0010s12970.1 (locus POPTR_0010s12970) derived from phytozome v7.0 (chr-ID scaf fold_10; pos 12898273 to 12899825)
cagtaagataccatcactcactgcgtgtcatgtaactgcaaactcttctgcttataagggacatagcacgcatgtttccgtgttactgggtttagtagacttgcttatccaacacattaaaatattctttatagttgctcatgcaagtcccataatatgttggactctgggtttagtcattttcccttcacaattaagtttataagtttttatatcttccaatcaataaaaaaaatttctgcttatctaaagcctcaaatgtgcatctagcatttacaaatgttaaaaaatttggaccagacttctggctagaatctttgtttgaagtttaaaccatgattgagtatttctggtgaagggcctgagattctctctcgtatccaaggaattagagaagtacaaggagtacctataacccaaatactaggccagtccaagttttaaatgaaagcaagactagttcagtgggacaggtgatcatctttgagtatccaagttctttgtaacttgccaactggatgtagtagtaggaattttaagatgaaaaaacatgaagctttctcaagtgtctcctaaaatcttccaccctggaggtagcagatcaaatggatcagaatattgtagagatggtgcattcctctgtctgtagcattatcttttatttctcatgatctatattttgagtgtcttttccttttctagtagacatttaatcttgtttctaaatctttaacaattgaatgctagcttgtgtggagatgatcattgacttttatgaagcctaagtctgtttgtcgccagctttagctgcattaagtcaccaaagaaatattacaatgcaagaaaaatagaaaagagagaaaaaaaccttgctgaatgtctcatgacaacctctggattcttcacgcagcacttacaaatacccgattgctttctgagtttaaataatttacaccattacatgttacatttgaacatgatgactttatggatacttgcagcatggtagtgatatttgcaaattaattttttttctgtactttaagactcatgttgggtccgtttaagaataagattaattaaagaactcaatgcggctctttcccgtattttgaactctggagttgatgtgaaggttgaactctggagttgatgtgaaggtgaaactaccgacactgcatgtttaatatgtatactttagaatgttctgcccatgactagctgcatttgttagacgaggctgtagtctgcagaatggtagagttagagagtgtctgaaaccacacttgttcaaaaatatgtatttaatgtttcccatgctttcattgaataatgattgcgtctattaaacatgtactaaattagtttatctgttgaaaacatggttagcctttattgcaagatttactaaccttggaataaaattgaaacgatgtcttctttccatctcctggtttcttttttctttttttttctgatttgaatacaaaaagaaataaatgtgtgattattttactaataatattcatttcttgtttatcatattcaaggtt

SEQ ID NO: 6729 - DNA, 1749 bp, Populus trichocarpa
  Intron number 1 from transcript POPTR_0017s11240.1 (locus POPTR_0017s11240) derived from phytozome v7.0 (chr-ID scaf fold_17; pos 10949506 to 10951254)
gatactcccactcgagtcgtcgacgctgcttgcaggtaaatagcgatcctttgctctgtgatcatttattttgcgtggcttgaactttcatgttgagactgtgcatgtaaaatagagtctgctaagcataaattaaaaagaatcaatagttcttagttattaactcaatgaggttaggtatttcaaaaggaacctttttctttcttgtgtttttggtggttaaagcaaaaccgaaaaaagtttcgcaactgatactttaatttctttaaagatagtaatactttaatttttagttagaaacggaaaaattaagttttttttgttcaaatacaatatttctcaatttgaaaaactgagagaatgtttttgtcttgttggatgaggagggtatgggtagataaatgattttggctgctcaagcacgccagcgtgacggtggagctataatgggtttgaaagacgcaaaggagaggagtccaaggtcataaacgtaggagtttggagcattcttgtcgtctaacaatactaatataggtatatgtatacgtatattatctctctttgcctgctgctgctccttctctttgtttatttaggagaaattaaggattgctcttctttttctgaatcttacaaacaagtataatgcacaaagcatttacaggcgtattaactgaatcactaattagtacataattgtctttatatatatatagtaagcaaacagaacgctgtgttttatgttaactttagttgagagatgtggtgaattagattttgcaagactgcacatggcctggcaccaacatgaccagaaagggtcaccggaactgtacacgagaagggtgggttaaatgtattaggtcaagtatcaatgggaagaacagatattaagtggagttggtgcggtcatatactattaatgtagatttaattggtagaaacttggaaagaatgggcatgggttgctttccaggcccgagttggtttttgaagcccgagttggtttttgaagccatcttgtctatttgagtcagccatcttgtctatttgagtcaaccgtgtcttatctctggtgacaaatgcaaaacagcttacctcagaaagcacacaagtcatcaaaaccctaacaagacaatcttctgttttgtttgttgagtcagtgaaaaatcaatggttctaatctagcacctgaatagacaatctcaaattagcaaaagggaaatgctttgtcaatcttgagatttatttgtcctgttcatgtccatcaaagtgccaatataaatggaagagcatttgagaaagcattcagacaacacaaattcggttcaccttggaatcatagctgtcaaattcaccttgcattacttgaaaagtggattgaagaatacaaatgcgagttttgagtcatgtgactacttaggactggaacatatgccatgctaaccatgatttgtgtattttaatttgatccattaattaaatcttcaagtaaaagcaaagaaaaccccttgaaacagtgtctctgatgtagcggaactcccatatccaccttataattttaaaaaagttcgagcttgaagcataatccctataaacattataagctttatatcaacttctgtaagttgtattcttttattttatataatcattacaaatcagaagctgagtgggtttagctgtataggagtttttctacagagacataaatacagtttggtttttgggcagctgaagaacacaaga

SEQ ID NO: 6730 - DNA, 1337 bp, Populus trichocarpa
  Intron number 2 from transcript POPTR_0005s07130.1 (locus POPTR_0005s07130) derived from phytozome v7.0 (chr-ID scaf fold_5; pos 4780587 to 4781923)
tgtacattttgaagagaaacaatctgattcacaaggtctgtctttcccatttttttcatcgtggtttttttttagtagtagctcagttcttaatttcgttcatcttatgaatgaccaatcatgcaattactaatttgttacatttccttcctagttaattgtcaacatcttctttcacttttgcatttctagttaattgtcggcatcttctttcccttttgcatcaaaattttactaatcattgaatataatcaaaaccatatcaagaaacatcacctgtacttttctgaatcatctttaaggcttaaactaccctagggtccacatattcctaattgtacatggtagtcgttattggtgcagctaggttacgtgcatttgctgtcagagccttaaaacttgtttacatttgttaccccacatgccccaatccatccacagctacctttttcgtaacttcacttcaaagctctctttttcctcaccaaacttaaatctgcagaagcatgtacttaaatctttgtaataatattaccttaaatgaaattaaaacaaaccgattatgatccattataagctcctaacgtgaaaaaaattaaccaccaacaaattattctgtgtctctttgtcggggaatgggacaaaagagtaatgtgtgagtcttaatggttgtacttttgtctcaaaatacagccagtctatgtgaaacaaaacctgcactgtctcattcaatctgttgtcaagagttccactggatacctggcagtagctttactgtttccttattattattcataggatccagtcctctcgaatctactgcccatcagaagaaatttacaagacataattaactaatcatatttttttgtccaaatatacagaatgtgtgcataattcattgaaatttattgatgcagaattatattttcttttggtattagaataatttagagtcagatattggattacaaagggtttttgtttccagttagaaatcttacttgcgaatgttctgactaggattcagctatgagcgcttttcatgtagaataatgtaagcttcccagtagatatatatagaaatggtctgaattcatgagccataattcgacatccatgtcacctggggtttcaaaaatgaaagtcaaaatcaaactggcatgaacagatattctatgtatacacatcttgcaagctgttcctatgtatattagaatcacattttaaggcctcatttttccttcatagcaaggacaagcatttatctcacattgaattttgatattctatgtcaaatactcgtgaatgcttgcaactcttgcagctagttacaa

SEQ ID NO: 6731 - DNA, 1753 bp, Populus trichocarpa
  Intron number 2 from transcript POPTR_0018s01700.4 (locus POPTR_0018s01700) derived from phytozome v7.0 (chr-ID scaf fold_18; pos 1554369 to 1556121)
gggtaagctttttgattcccttaataatacagggcggccggcctgttataattattttagttttcgcgaatttttttttattgttatacgttataacacatgtttgtttactttgttgagaatttttcatttttcttgaaagtctttcaggaaaattacatacaaaaagaactgttgaaaactgtgtttattagtaaaagctgaagctttttacaaatattgacacttgatggggaaggggcacttcttcttcttcttttttgtatattttggtttgcctagctttctgggtcactggaatacatggattttaagatgtctgtgtggtttgacttgtcttttttttttaaaaaaaaaaaaggtttggaatcttaattatgttgttgtgtttgcttgtcttgtaagcgagctttatgtggagtgaacaatagaagcatgtattggcttttcagatttgccattctttccttgaagtaatggctaattggatatagtatacacagggctgttcttttgaataggatttgtttttttctttttttgtaggaggtatgtattctaggtgttctttcttgactcaaactgggagaagctttgggaacaaacctttttgttcatttgcagtgttttccgggacttattttcgtgctcttttgcttttggggatggaatcttttaagagaaaatgcaaggctgttttcagtgtgaggagattgtttcattgttttatttatctgtttcttcttcttctttttagtattagctgagaaatgaactaatggtttaatttggaatcacgcgatgcttgtattatgagagtgtttatatatgtttagaaatttgtacatgtgccatgtttagaactgtggtgtgaactgatttcatgtcaagggcatttgagtggtcaagtttgtgtcttctctgatgaatgattatgtgttctgtttgttttgatggattaagtatgtttctgaattatttttttccctttagctccgtcaatagtttgtcacagccttgaattatccagaagatgtatcatatttctacatctatgattctttccttttctcttttttcttcttttgtttctctaaacgttcttctttgtttggttgttttttttttcttcaaaaaaggcactaggaaattatggtgatgagagctttctatcatggaaggtttctataaatgctgaatgttcttttgtatatttcaagttgttttgtcgattcaattttgtagcaaaatataggtaatcagatatgcaatgtccatgactcttttcagatacatcgtctggctctttttttagaattttaccttggttggtatctgtgctcatcatcaggtgaacaattaaaataatttgatgtcattgttcttttcctgcaaatcaatttgcaactattgcacagtaccctttgtatcttgagcaggtcacccttttttattgctgtttattataataagctttgcttatgttttgagtgaattattggatggttcgtttgcaagtctgaaattgattttttatttcttagaataacgttgaaggctatcttctttattttgcttttgttggggagggtatgattcatttatatcttatagttcttttacatttcttctttttcggtgcttcaacggttttttacctccactggaacatttgagcatcaaagtattgatagctggtgctaatcatatctgcggtgaaacctgatttgtaacagagcagaggttgttttgg

SEQ ID NO: 6732 - DNA, 4288 bp, Populus trichocarpa
  Intron number 2 from transcript POPTR_0019s01470.2 (locus POPTR_0019s01470) derived from phytozome v7.0 (chr-ID scaf fold_19; pos 1292892 to 1297179)
gataactggccttgtttgcattactcctggtgcaggtaatttcgacttccctcgccgtgttatgtttgctctcggtccaatcaccgtgcatgtattttgactattgagatttttattggtcttggagctagaattaagcatttaataatctttttcttgaaaaatcaaactacctaaaacattaaatagtgtggttgttttgctggagttcaatctacaataaaatatatcttcgcctgcagtaaaattatccttgcatcctttggtccaaaacaattaagcttcttggtgggggcaatgatactttttttttcataataaaaatattatttggtctctaaaatcaacaaaatataaaattatttactaataattttcttaacttagcaaaagcttcttaacaataaaatatatatttacctccgggatcaaaaaaatattgtgttgttagataaaagtattttgaggttttcaattttaaatgtacagtgaaattacatctttaactttgaaagagacaaaacataagcttagcatttatgggtattttgtacttccacatatgtattttgtgtaattgtcgaggtcgtgggggcatttcagtattttcataattttttcaaattttgtaatgcttaaagctgctggagcgtgctcgacatgttctggcgcgtgggtggcatccacaccattcaggcggtgcgtgtaacgctacccagtggacataactgaccttttatcatctctctaaatgcgtcatcatattcttttccatttggagtggtgtgtggtagcttacgatggtcgaattgtcactaatgatcgtttgatttttctctctctcttggcatgtaaagtacttcattgtcctttttttcttactttttaatttcagccttcattctattaatttcttatttcattcctttttcatttatagaagtttatattctttttaatttagtcttttaattgcaatttctcatatgttctgttttttattccagtcctcattttttttttaatttctaattgtgtcattaacacttttgttgaagttctttttctttcaatttcatcattcaatcaaattttttgttgttttaatttcatcagtttgacccttattcttttgattttttttcttttatttaagctatttttcaattcaattaaaccctccaattgaaaatttttatccctctaattaatgttttttctcacccttattttttttttatccttttgtgtaattatttttttcatgatttcatttttcaacatttaatttgttgggaatttagctttatatgatcttattgttcaacattagtttttttttaatattagttatgtaattatcttcaagttttttctatgggtttatccggatctcatgatctaggtcatgatttttacatgtcttttttaatataagttttttttaggtgttttgtttctatttcatttttcaaaatattattctaattcatctataattttttttacagatgaagtttattttttaaaataaaaaatattcatttttaaattgtattgctaatgtgtttgccttgcataatattttttatatcgtaggtttattcagtcaatttcatttgtatttatctttttattcatgaattttttagagtgtggatttatctttagttatttaaataaataagttcagtaaatacaattaaatgcatgtctcattttatgttatagaatatcttgattacttagactttttaatttacactttaaatttttttatataaaaaaacacattaaaacaacttgtatacctaatattttttttaaaaaaaaagtataacccacaacaaagcgcgtgttaaatgagtagttctcactaactagtatcagttgacttttccatctctgttccttgccatagcaaatttgttcataaattatttaacttaaagaattatttcataagttctaatttgttcgttcataactttcattcattggcattggaaggaaacatgaaaaaggaagagctagctcaaggattaatttagttcaatagactttaaaaataaaagattagggagggaatactgttcacgtgggatccaaccatgtagaacgatattttggtaaagaaagttgaagaaaaaattaatcattttcctaaagcttagatttcaatataaatttgatgaggtacaacatatataggataatccaacttatcaaaagttgaagacaaagctactaaaattgcatttcttcggggcttgtttgttattgtgattttttttaatagtattttttacttaaaaatatattaaaataattttttttattttttaaaattcattttgatttttgacataaatatatcaaaatgatctaaaaacactaaaaaatattaatttaaaattaaaaaaaaatattattttttcaaaaatattttaatttaaaacacaaaaataaaaaggttttcgtatattagatttgaagatgaaaatatcatcttttggagatagatgatatttaaagtttaaaagtttcttaaatattttttatgtagactacttttaaaaaatatttattaattaaaaatatatcaaaataataatttttatattttatttttatttttaacaataacatatcaaaataatcaaaaaattatttaaaaaattaatttaatattattttaaataaaacattattttaaaaagtaaatactaccatagagtgccaaggaaagtgaaagatatattaagtaccataactcatttgttccaatcataaaaaattatagagatcacataactcatttgttccaatcataaaaaattaatttaatatgattattgatgatattgctataaatttgcacctgactaaccatttcaaagtattgtttcaccttaaactcttgattttctagtatatttttttttttaaaaaaaagtttttaaaatgaaattatggtgcttgaagcttacaaactttctaaatcttttcctttcaatccatataagatattaaacatctccgtggtgttgggaataccgaagcttcgatgccactttattagtaacttcaaagttctaataccatagacaatcctattgatttttgcccagaaactaagcacaacaaatttaatatgttcagtaatttgcttatatccatgaaatagacagtattaatgaacaggagaaacaccacaatttacaataataatggaggacaaagaccaaacctcatacccacactctcttgcaagtgtctcgtctttctctatcacccacattttaccagcctacacaagctgctgctcattacagctcgtgtcgctgccacaatggcagaacctctctctctctctctctctctgtttggctctcgttgatacgtatgcttctgctctcaacacaaccttttataggcttttcaaatggcagctagaattcaacaaaggtaggctgcattatttcttcattaatgcgccgaatcgtggtgagctccaactcactcttcaacttttagtggccataattattgccacgtttttgcccatttcttttgtcaaagttaggtaacattcagtgcataattcttcttttagtcaaaatatgcagctccctcttaagactgggatcgtttgcaaacagggcctaaatgctattcggcaaaattttgaattttttatttaaaacccaccaaatttaagatggatgaaaagtttataaactgggccaagttaggctaaattttcaatgactgtgctatatcttgatctgaaatccatcggcctcaaaactgaggccttcatcataggggcttgatactgaagttcaaattagaaatggtattcttttcttagacgttttgctacggatttttgtagcactaaaatcctatgttgtaaaactacaatccgcctgccagttagatttgagacatggtagatttggagttttaattgatttgaattggaaaaaaaaaagagtatggaaaaaattactggttattcgtaaaataaggttgatttggagtttctataatgatatatttttcaggtcttgttcaaggatgggctgccataatcatgggaattttatctggtagtgttccatggtttaccatgatgattgttcacaaaagatggacactactgcaaaaaattgatgacacactaggagtgtttcacacccatgctgttgctggccttctagggggtgttctaacaggcctctttgcagaacctgagctctgtgcactatttttgccggtgaca

SEQ ID NO: 6733 - DNA, 1361 bp, Populus trichocarpa
  Intron number 6 from transcript POPTR_0011s09780.3 (locus POPTR_0011s09780) derived from phytozome v7.0 (chr-ID scaf fold_11; pos 12218905 to 12220265 reverse strand)
cttgttgctgttgccatctagtaaagaagttaacctgcctgcgaaggtgctccctgagaatcacttgcaaaactcgtttgttttccttttaacatcctaatgattttggtaaaatttctatcaggtacaaactgttaggtcatattttacactcagctatgcatgattgtaccatcatactctggaagatagttctgtaattttccagttgttattgtggtcatagtagcagaagttttaagcactagtggtctatgacagatagatgatttagttcattgtaacagttgtatggatcttttgtttgtataagcagtttaaactgcatttgtatgttggaggtcttacatgaatcggttgacaatttatgaaaacatgagctctggggaagtttattatgaaatctgtagttggttttcagatcgcatataaatacatgattagatagacatggataatttattacttttgcaaacatggaagatctcagccaatgaccctcatagtgagtctccattggcacaagagatttcttattttgcacaatagcatgttcaatacaatatgcatctcatagaactggtggctcattgatatggttccggagctttggttaatttgttattctgcgacatgcctatggcatgcattgaagatgaaatgaactcgacaatatatgaattatcttcttcatattgaaaagtaaaattatagttttaaagtacaacttcagggatggattattcttgtgtctaattgtgttatgaggtttgctatacttgtgtccttttgctaagcctcttgcctttgatttgcctatcgatttctgataacacttttttcaatttcacagaatatccctgagaaaaaaatattgcaggcttttgagcctgatgtgcctacagtatttgcaggtatgtctaaacaccttgccctcacttttctttatgggtttgtagagtgacaggctcactgctaccagcattcaactgttgctgcatggaaatatatttatgttactgtacaaacaatatgcttaatcttgcaccagaagattttatgttcaattttacttagtatttagcaatggtagctattttttgttttgcgtacttgttagctccactttggtagttctcgctgccatgctataggagaaatccattcatttctgataataaataatcgtggctgagtagcatattttcaacattcaatgcacaactgtgtgaccttttatgccctttgtttgtgttgtaactgtaatttaaaatagtgaaatgtggcaagcctttaccttcttttgttttgtttttatttgtgtagaatattccgtcatcatcaagaagctgaaagacctt

SEQ ID NO: 6734 - DNA, 794 bp, Populus trichocarpa
  Intron number 2 from transcript POPTR_0005s10480.1 (locus POPTR_0005s10480) derived from phytozome v7.0 (chr-ID scaf fold_5; pos 7532519 to 7533312)
aagccctgagataagctctgaacttcatttcttgggtatgctgctaaatccaagcatgtagattgctttaatgttcattttcttttcttggtgactgtatacctggaaaccaaccaacacattttaacattatgttacaactatacaatgtatactgttattgaagctggtcgaacaatcaacaaagttggtagctaataaaatcttaggctggagcctgccatatcaaatcaaagcttattgatagctgccacctgatccaattttgacgtgtcattgttatgcatttcattttcagtaataacccatgataatccttcgaccatattgatatctcaatttcccctgtcagttgggtaggcttggtgacctttcagactgctctatgtagaatatactttctgatgaaattataacttatgtttcctgcagcacagccctagtccttaattctggctgagccttttcttattctttgtaaccaaaccactccttgtgcagtacgatgcatcttccttgtgagtatgacaaggctcattgatagagttgttatttatattatcgtgatatgatttagattggttgaatgcattgttatattattattggtagtattttggttcttcattaattgtaaagggagattctccttgtgtaggggtattatgttcctcgcatgattttcatccatcaagcctgctattaatgtaaaacctttgctttctagcactacagttcctatgggatttgagtaccataactcttattgcttacgtaattaatgaatgcagggg

SEQ ID NO: 6735 - DNA, 804 bp, Populus trichocarpa
  Intron number 2 from transcript POPTR_0003s21680.1 (locus POPTR_0003s21680) derived from phytozome v7.0 (chr-ID scaf fold_3; pos 19734935 to 19735738 reverse strand)
aggtgggtcggaatctggtgcatttgtggggatttttgtctataagttcattatctcttcatattgcatttgaatattgtattgaaagaatgggacgatgaccttggatgaatcttttcccaaattgtcagttgttagaatgagtttcaaaatttgttttattacttgattgactaggtttgtttccttttgaatttaaagaatgcgaaaccctcctaatgacattttaacatattctggcttgattatatttatttttttgggactctttgtggaggtaaataatttgactctcttactggccacacagaccagctaccaatccacccaacagtggattggttgcttgatcagactgagtcatggcttatgcatgtctatctttcagttgcataacttggtcttttgtctgtcaacgaggatgattccaatcattggtgcaagtgagaacattcttgagctgaaactgattcatccacatgggattttaaagatgggggtgagtggggtacatgggtctcagccaaggaagcagagtgattgatggtatcagccactctgcagcagcagcatcatcctatgcagtggccaaatgtgcaataagcctttgtctggcgaatgctgttattgacctgaacacgggatggtgagatgagaagtactcacttttgatagcttataagatgctgtattaaattagttttcgtagttgagatcaattattctgcgcattctggcattaaattgtttttggttgcatcacatgtttctgaaatcttctcttctgtgctagctaccgaggat

SEQ ID NO: 6736 - DNA, 384 bp, Populus trichocarpa
  Intron number 2 from transcript POPTR_0005s06290.1 (locus POPTR_0005s06290) derived from phytozome v7.0 (chr-ID scaf fold_5; pos 4139498 to 4139881 reverse strand)
agagaattgaaaccactgttgcaaaggttggatttttttaactcttcatctatagggtttttgtagggtttatatacctggatgttatatcggcaataaagatttaattattttgacgatttgagactgaagaatccatgggtttttcatttttgtttgatttatgaggaagttgattgaaacattgagtaatgatgttcagaatatctgggtttagctgattttttgttttgtacaaaaagtttgctgctttgagtggatttttggtggtgaatgatgcaaattgagggcgatgaaagaaattgtttggtaatgatggtgataggatttccatttttatttatgattttgcaggcaaaagagattcgacgtcttgcagataat

SEQ ID NO: 6737 - DNA, 1780 bp, Populus trichocarpa
  Intron number 4 from transcript POPTR_0031s00230.1 (locus POPTR_0031s00230) derived from phytozome v7.0 (chr-ID scaf fold_31; pos 37950 to 39729 reverse strand)
ggtaacagttaaaggaaaggaagtaggaaagtttggtatgccattttgaaggttactcagactacgtggagtatctcaaatctcgggatgaaaccaaatcactaaccacataccaaattcttgtaggaccactggataagtatcattatggttatgattatgattatgatggttgcagaaggaaaacaattgtttgggttaacttgagtatcgacagagatggaggttttcaggtcatgtttccaaaggacattcaacaactgactattgataataatgatgatgcaacaagtttatgcgatgtttcctctcaaataaagtatgcaactgatctggaggatatcaagatttttagttgctatagcatggagagcttggtttcatcttcttggttccgctctgctccactaccatctccatcttacaacggtatattttctggtcttaaacggtttaattgttctggttgtaagagcatgaagaagttgttccctcttgtcttgctgccaagcctcgtaaacctcgaaaatattagagtttctgactgtgagaagatggaggagataataggtggaacaagaccagatgaagagggggttatgggtgaagaaaccagcagcagcaatatcgaattcaaactcccaaagttaacgatgttggcattggagggattaccagaactgaaaaggatttgtagtgcaaaactgatttgcgattctatcggagcaattgacgtaagaaattgcgagaaaatggaggagataataggtggaacaagatcagatgaagaaggggttatgggtgaagaaagcagcaccgatctcaaactccccaagttaatatttctgcaattgattagattaccagaactgaaaagcatttacagtgcaaaattgatttgcgattctctccaattaattcaagtaaggaattgtgagaagctgaagaggatgggaatttgtctttcgttgcttgaaaatggcgagcatcctaatgctaaggatgtccttcgtccctttttaaagttggttaaaggatgatattaaattaaaagtaagcaatgttgttttaattggattttaatgatttaacctaaagctacgtgtccacttaatgactgatgtgcttcttccctttgtgtagtttgaaatgttggccatctataacattgccctttgtagaatgggcttgggagacgacaatgccccttgatataaataatgaattacgggtaagcatatgttctccttttctctctctcaacatcaatctcttccctctctcttaaaacatcaaatgcaagtctctctctctctctctctctctctctctctctatatatatatatatatatatatatatatatatatatatatatatatattagatttgacccacaggtaaggaagccagacgaagacgagtgaagcatttagagagcaacaacacattttagccaaattcaactacaaagaaggtttgctcttattttattttatgacagcatgattttatgttttatgatactcgtaggaggagattggtgacttaacagaaagagggtcttctttcccgccactgtgtaatatggaatccatataacgttgtgagttggagttcttctacttctactaccttacgagaaaaactttttaactgtgctgtagaccatccaattaactgatatatttgtagctagtgtgttacattctctagtactaggtgtagaaactggaatgtggtagccatagaaactgggacagtagctggagcagtttct

SEQ ID NO: 6738 - DNA, 1858 bp, Populus trichocarpa
  Intron number 1 from transcript POPTR_0001s05850.1 (locus POPTR_0001s05850) derived from phytozome v7.0 (chr-ID scaf fold_1; pos 4583452 to 4585309)
actaccctgaatctcctcctcactcaagtaagtattgtttcgatatgtgattatgtatgtattggttattggtttttttttttttgcatatatttagtttttgcaattaaatttgaattgggttatgtgggattgttggaatctttatttttcatgatggctttttgttagaatctgtttatgtttgtttggttgatttgtttagttggtttttgtttttctagttgggagttaaaaaattgttgctttcttggtgttatgtttggtagctgagaaaatggtggttaaaggatggaaattttgataatttttagggttgcatgctaagagaaaacgaaactttgattggcaagttgtttataattggtgcaatattagttaaaaaaatgaatcttcatgtcctgtttggtagcttagaaaatggtaggagagattggacattcatatctttagtgaatgctgcatgttaagagttttttaaatgcagagatggtatagttggtgtagtttcaaaatagggtttttcattctaggtaaggtagataagaacaagaacatgacaacaagaaagcaataggattaggtttggatatgctcgctatgcttgttagttactattacttaacatggaaagtgatatatatcaaagaggcatttatcacattaccaaatctatatcaatttcaatgtgttttcatcctaatgcatagttgttaactgtattcatgattcgtgacggtgagagttacacgtggtagcttttgggagaatactagctcagtttatacttggatttcttagctgttcttcgttggccatgattttccctttccttttaatagtagcaattaagatttctttcttttttcctttcgatcaggttaagtacatatacagatgttgcttgttaggaatttattcttagaagctgacagcagttaattattcttgaagcaaatattttactctttttatgttcattgcttatgtggctacgtttacacatgtgcttagctgtttgtatgaagaatgcattgttttggagggtgaagattttgtagctagaactgacaaacgtaaaaggaaacctcttgggttgatttgctattatgctagctaacatattaaacaagaaattacatgatattacaccggtcttcttgagcaagggcagatcgcatcctcattctgttgaattttggcccacccatctctaagttgctaaaattggtggagttttggactttggtcaggtccaacactaatagtgtaattaatggtggaaattgattaagcaaaacagcttttatttactaactgatttttggaagtccatacttagaggatccttttgactaatttattggtgttttgcatatcatgagaaatttggagataagaatggagcaacatgctttgaaaagattaggcattattctatgcatttgaatttgagcttattttcatctcccatttatcccttcttgtaaattgctaggctttagtgctggcaattatacatgacttttctctactttggacaaagcctcgatggaatttcttatcctagcttcagtcctttacttcattggttgagtgggactgtgaatcaccactctcagtgaattcaaaactctgcactagcagctcttttgtggtttcataggtatggggattttcgaattttttttcttcatgttatgtggtgcatacaagatttttaaattataggctgtgtatgagataatgcttggatggttttttctgttttggtaataaattcctttcccctttatgctatatactcttttaaggtatgttaattaatttatcttttaaccttttgaaggctttgttg

SEQ ID NO: 6739 - DNA, 1583 bp, Populus trichocarpa
  Intron number 1 from transcript POPTR_0014s12800.1 (locus POPTR_0014s12800) derived from phytozome v7.0 (chr-ID scaf fold_14; pos 9433496 to 9435078)
ctactgagtaatcttttcttccctaaactactttctaaccagctttgtcccatgcttgtcttcatgtcactagctatcaactccaattagctgtttagtgacgcttgtttctatgtacgtttcatagttctagcataaaatcttccgatgcttgctccgagttttcagctacacaacctagctagagtataatgcttgagagggtttttgttattagagagatcactggaagttcgatatgtagattgggttcagaattctaagaatgtgattttagtctcagaggaagacgtgatttttcttcatcaagttcagatttttcttgattaatatggaaataaaaaaattaaggcaggatgctggaaactgtaaagtgtattcccagaaaaagaggtctggaaattttattttttgtttttgaaagattcttttaaatttactcaactgtgttgagtatttagttttccaaccttgttgttttctttttgatgaaaaaaatattctataacttgaaaaccttgcacaattcagtggtcttctgtcagtcctgcaattcttgtaaactcagagttttggattttaatcagtcaaaaacagaatctggtagattgattataggctgaaatatatatatatatatatatttaaagaagaaaaataactttctttcttagacttcccttacaatccccaacagcatgccttttgtaggtccagtaattttatgagcttcaatagctgattatgctcggccattaagagaagaaaacagcagttttgacagatcaaacatatgaccttgactttccatctgttctgcctgaattgaacgacaaaggcatgaggctgcagatacattcccatcccgcatcttcaattttatggattgcaattagttttttacctgttaccactcaatgattcgccagtttattttaaccatggataagatctaaaacatgtacccataggccgtacagtggttcaatgagtatgacataattgcttgagacaaacacagctatctcataactcaaaagcgacccgtatgcatcctgtcatatctatgtaggctggcaaaatttcgaaattgtttccattgcacaagaacaaccagttctgcactatgcagttcagttttttttacatttaaaacaaaaatataaccgtactgcctgctgcaaatctgcttgggcagtcccactcatcgtttaataattgagctcttggttttccatctgggccatctttgtcgattcagacaatgaagatggataattcagtccagagatatgaggttgttacttcatgattaatctagtccagaaacacttacatatagagtccttaagctattttgtgtatggatagaacttgagcacttacggtccagtgcatctgtttgggatttatggtttaaaaaatgggagttcagccctatggtagaagctcttacatggtctctaaattattggcaccgacaaacgtgtaggaatcatttatttccttttttttggatttttttgtttgttttctatgcagtcccgcttcaatcattctaccgtcttgcaggccaatttcgg

SEQ ID NO: 6740 - DNA, 2869 bp, Populus trichocarpa
  Intron number 1 from transcript POPTR_0007s05380.1 (locus POPTR_0007s05380) derived from phytozome v7.0 (chr-ID scaf fold_7; pos 3474458 to 3477326 reverse strand)
cgcaaaagggtatctcgctttctcccttatccattgttttatatctttcttcttgcttgctagttcaaattatgaaatactcgcttctggttttgcctttaaatttccatggaacgcttgaaattttgtttcttttgattactatgttggtttcttagttgcttgtttttgaggccggagtgaattggaaataatgatggcaacaagtgtgcttagggggggcgaaatgggatttctgagttgttttggatatttcagcttctgctgtgtggggggagtaggctccctggccgcattgcatcgtgattagctaggactgaagtgtttttggatgctcgttgcaatttaattactagtaggagattgatatgagaggctcttgacttttgatgtgaagccctgtgatttcgttgtacaacttgagttttaagccctaaacaatggttgagtaatcaatgagatcatataatggaatcagataacttcatttctactttctggtgtttatggctccctccccatttgtgaaagaggaattttgatacaccttactgtggagccatgaaagtgtggaatgggttccgtttatttatttttgtgtagaccttccttgcatgtttttctatattttaatagatgacaaagctcagaagttctggtaaacaagtaaaatatgaggctcctgcttttcttttatacaactcccaacttctctttgtttaatatgttttttccattgctctttagttcaaatttgtttggtcaattaattggaaagggtgtcttgggtatctgaatcgctaatggcaacaagaatacttaagcagaagggaatgcaatttttttgggacattttaggtttttctttgtagaaggactagaatacatcactgtattgcgtggttgtaatttgtaagtgttatgtctgaaatagtttctgcgggaactgatgttttggatacttcttacaatttaacaaacacaaaattttctgaaaaagggaagtaagggatttataatagaggtggaagcttggtttttgaggtgcatacctctatgcttcaatctttattctgtagaaatgtcaatggatggcttgagtgtgacttctatggtggattttggctgtctagttatcatgtcaacggtaaccagcagaataattttagttggagcaatcatcgaagcatatttccaatttggatatcatcaactttattttactcgctgatgttcttggcccagcattatgaatgagaggaattccattaacaatgtggaatttgtgccttttgtttttcataacaccttcccaccatttccttctatatttgataaataaataaacataaagttttggtagatgcatgaaacatgagcacttgttgtttttctcgcacgcttttcttttttctgttggataaccagacatactttctttaaaccatttgctgcttgtatgtatgacctaatatcatggctttctaagtcctcgtcagtaatttatcttgccatggaattcttatgtaaatgattaagttggaaagtgtggtttcatttcgttccattatcttccattttttgttttaagtctttggggttgctgtatttctggatttggtagtatattgttaccttggttgcaacctcgaaacatgctaatgtaaatgttgttattcttgccctgtctgccatctagtaatcagggatcttctttgaaacaatgagaatagtaatattcgaatgcattatcaaggtaaggagtcaaatttttctgcaggtcaccttaaactacctgtgtattttacacgtactctttaaaagggagaatggttctagaggttgacagtctggcacttggatggaaatccaaatggtcactagcataagtccatgcaatatgtgtcagactgaaaggcagaaacttaccgtactatttatttcatgtccatggcatgaagttgaatacaatgaggctcctggatgtattatgggactggggcatacagtttaagaaatagtttaaggccatgacatgctacagtacagtatggagtgacaatgactctctgcaattcgtgtagctattcttctaccgagtgtcattggttgcatgcctactgaaatataaatgacccatatggtatatccctgactagtgcagaaaggtgaaatgggtctatctgtcagcaaatgtctgggataaggctgcgagaacttaattatgctccaaggaataactgggcgggggagtaagaggactggccaaaggcaaaatgatgcttctaagtgtgtatttcaactcaatggtttttgatgggtagtcttgtgtatgtactatttaacataaagttggagctgtacatttaatggtcatgacaccatggcaatcaataaatcccatctaaatcatttgcttgctgacatatattcggcagcctaatttgctggagatataattgcatccttttgaaattgcttagagattttttgttcttcctgtggctggagatatgttatgtgctatgtgccttattaagtactagtttgtgcagtcaagcagcaagccagatggggatatgactagatgccacctttacttgtaactaagatgtggtgaaatggctgctgtgttcaagtattttgtaggttcccattttccacattttcactttcatgcgttttctgtgtgctcatcacatattttattaaaatactgaagttcatttatcattctgaacctttttctgcgagaatgatgtgccttttcacagtgaagttcgcagccgatgcttcaaggctaaaagtagtaccctccctcgtaattcagtattgactgagtgtgttttattgattgcagattgctcgc

SEQ ID NO: 6741 - DNA, 1350 bp, Populus trichocarpa
  Intron number 8 from transcript POPTR_0011s15060.1 (locus POPTR_0011s15060) derived from phytozome v7.0 (chr-ID scaf fold_11; pos 17243579 to 17244928 reverse strand)
tgtggctgttgtatcctattctcttcattctgcaggtatttatgctacctctcacctgttgttctagtatacagatggggcctgctctttgcatctgtccactaatcataagtgttactcatcaagagttttttgcctccgctaattttgcatacactttgtatggtaaatgaagcaatgtattaatctgatagcaattttatatcatatcataaccatgaatgtgttcagcagtctggttgaccaaggccgttgttttcacaaaattacattggtgggttaagaaactcttgttctattgttgtgaaactaaatttgatgtgaagacatgctacatgaatgaagtaggctaaggaatataatgaacagcttgtttggaaccaatacttgactagaattgattttaatgcttgaagtagattgaattgaattgattctctacttgaatttttagtttggaatatgtttcaaaacctggtaataatttgaattgagttactccagctacatcattcacccaactctccgtcttcctcaaacatcttcttcgacttaactgtcccttttatttgttgatgagagtaaagagagtgaaagagatcaaacacaaccaaggctatggctggtcctatgtgctatatggccaggaaaaagaaagaactctttcttatacaatctcaaaaatgactaataatgatcccttacatcaatagcatcccttaaatggttaatcaaacccttgtcaaaagaaatcctagccttcaataacttaatctgaaccttccaaaaatatcatgaggaaataatgcataactgccctaaaaaaagggtgttttggggataaaattctaaacgatcatttctgaaacaaattgcaccccattggatgtgctaaagggtgcgcgattatttgcagttgtacagaaattactggttttaacaagttgtagaattcatttcagtagtttagggctttctgaatgctataattggataaaatggtgttgaattgatttcatttatttcaaattctgaggattcaaaacgggctggaaattctagtttagtcatgagtggctcatttgggctggcaggctttgcgctcgtttaacaaagcatcaacaagcatcctcttctgtttcatgtgtttgaaagaaattgacgaagcattaggtttcatcaaatgattgtgcaattagtgtggtctgctactagtaattttcacatttgaattgttgaaacaagcatgatggcccgagttcaacgattatatcatatgtgcttctggaattgagatttgacctgattagccgtgtgtgcttctggacttgtttcagggttttgaggcat

SEQ ID NO: 6742 - DNA, 1196 bp, Populus trichocarpa
  Intron number 4 from transcript POPTR_0008s00390.1 (locus POPTR_0008s00390) derived from phytozome v7.0 (chr-ID scaf fold_8; pos 143411 to 144606)
aaagcaggcaactaactcaggtatgttttaagttggacaacaaccattatcatgtgcaagagagtgatgtgtaatactccaccataatttgtctaagataatgtgaattctggctttagtagctatcattattcataagaaacctgacagagcttttgatttccatgagcagagttaagttacaaatggccatgcccgttgggcatgatggttactcaatggctaagaactgtccctataagtttaatttaatactggaataaccaaatgttattgggggagaagggaggtacatttttccaggattacactttcatttgcactagcctatgataacaagaaaatggtaattaaggggtcattagtgcactctttaaacttactcaagtatgataatgagatgcccaagaagggaagtggactatcaatttgggatagagggtttgccacactgctgttggacatcgtaaagcatgaacactttggaattccttttagttaatggaagtatttaaaaactttcaggtgtagaaacatgatatggttttaataacttgtaagttaaatttagaatgttgctcagataccaaatatatttgttaggctgccaaaattactttagtttcaaggcaatccatttaggttgacttatttggttaatttatgaagaatactgtaattcatgcatattttggttgctcaaatggtcaaactaattcatccaaacttaggttcgaggttcacacatgtccattcttttgtgctaatagatacaggaactttgagaacatgtgtctgaaatgttgtgggatatcctcagtgctggtgtcaaatctgtttgggttttaaggcatgttgtcgagtattgccaagtgataacaagcttggaaaagctccagttctgctagttctgggtgccatcattaaaataataaaattgctttacagtcataaagaattatttataaattagatttccactgatctttatgatgatatgctaatgtggaggtttcttatggaatccagccccaatcttgtgtatctaaactgctacgatgaaaagaaatgtgtaaattgttgtgtttcattccaaatgttctcaattttccaagagggaaattctgctttcttgacaatttccctttggattgtaatctatgctataaggtataacttttatctctgtcaggtat

SEQ ID NO: 6743 - DNA, 752 bp, Populus trichocarpa
  Intron number 1 from transcript POPTR_0005s09550.1 (locus POPTR_0005s09550) derived from phytozome v7.0 (chr-ID scaf fold_5; pos 6651736 to 6652487)
ctaaagtcaagggttacccttcttggcctgcgaaggttatttcctcctaattttaaattcaatttttatgtcttaaaaacttctttgtagtttgatttctaattctaccacctgcacttccagaccttattgtttatcttaagaatttggttaattttttcttccaattttgattttttcgggttggtttaatgggttttagtgatgggctctgaagattagtgggttcagctcatttgttatgtgaatcaatgtggttttcgtggtgggttttatttgtattctagccattttaagttgtaaattattacaatttaaatacgggtttaaattgtgtagttggttttatttttgtttctttactgattttagtttaatttgatttggtgtctgttgagcgctttagtttcgctgcttgtattagtgttctagtactttacaacgtatatcattccctggtattttgattaatttggagggcatgaatgctgggtttaattgattcatggattggtataatttgcgtgcatttgattagatgatgattgtgtaatgattgtttctgtaatttttgtggtttttggtaacagaaagatgttggtattatctgggtgaaggcgtcttcctccaacgattgtaatttattttgttgagcctttgagagtttgtcattttggttagtgcttgagctagatttcatgggtgtttgtatttcagattagtcggcctgaagattggaaacgagcccctga

SEQ ID NO: 6744 - DNA, 1589 bp, Populus trichocarpa
  Intron number 1 from transcript POPTR_0003s16290.1 (locus POPTR_0003s16290) derived from phytozome v7.0 (chr-ID scaf fold_3; pos 15869457 to 15871045 reverse strand)
tgaaccaaccaaacagagatttaaaaatattggaggtaataaaagaaaatcgtacaagctttactaaaggatagagaggagaagaacatcgacgacgccctgttgtctaatcctctgaacttgaactccatgatattgtctgtacaaaaagtagaaaaaagaagattctgactgggagaagaaagataaagaaggcaagtttgtaatcaatacaacaatataggtgcatctatacttgtagctgtcccgccgtttctttagaggttactgggatgttttgttactatgtcttttaattttattcctagaaaaaaataattaaaatctaaaattaattagaaaaataattaaaataacatgactttatctccaattacaagctttgtcagttttgttgaaaaagacaaaaatattattttattatttcaattcacagtaatatatatcttgagctatttttaataaaagcaagtttggacagcatgatggattggaaccttgaagtgcatttttttattttaatttttttttctaaataaataaatggataacgtgttgtttaacatagcacatgaaaataaagatctaccgaaccaagcaccgtaaaacataaagaatttgtagctgaatttaataaaatcgaaaaaaatttaatatcaaaattaaaaaactgaactacaattcgaattaaggaaccaagcaccataaagcataaagaacttgtagctgaatttaataaaatcgaaaataatttaatatcaaaattaaaaaactgaactacaattcgaattaagctcgaaatcgaaatcgaataatgagagagagtaaacgcgatttcttttcttacatctgataagctagttctttttttttaatccaattttaatttatgaaaatatatatattttttggcaaaacatatgcttgcacaagtcttcttccgttatttattttaggtgaatcagcttctcggaattatagtcatgatttttttaaaaaaagtattttttattttaaaataatattttttatttttaatattttttttaacataattatatcaaaaaatataaaaatttaaataaaaaatttaaatttttttaaaatattttttaaatacaaaaataaacttcatcgaagcgataggaagccccaaactgctatggcctgaaccaacgagggaccaagaagcagaaaatcaaaagatcgaggatgtaggtttcgattgttcagggtgttataccgagtagccttaaatttaaccaagagaactttatcaagtacatgtactttttttattttggtcatcatctcttctcaaaatcctaattatcacattcaatcttccttgattgaggctatcattatcgaacaactcttgaaaattctgtgaaatgacagttgtagttgcatggacgacccatttatgctttcaccatcctctcttataccatgtttgaaatctttctttcactcaaatagttataattataatgaaagattcgatcttgtattttttttccttttattttcacttcttgaaatgttttgcagattcggcattgcagcaactctgttgtagcagttgc

SEQ ID NO: 6745 - DNA, 711 bp, Populus trichocarpa
  Intron number 2 from transcript POPTR_0003s07400.1 (locus POPTR_0003s07400) derived from phytozome v7.0 (chr-ID scaf fold_3; pos 8961327 to 8962037 reverse strand)
gtcgcgtttcaagatatcaacccttctgctttcaggtttgccaaaatcattttctctggttttttcctcaaattacatgataatgtcatacataggttttagctttctctaatttaaatcagggtttgattgaatccaataatatcatattggggaaaattatccaatctttaacggtaggtcaccttttattttataattctggctgcttaagatttaatcattatgatatgtttatttttgtgcttgtaatctcttgattgatggatacaaacatgggcattcatatgaaatgatcatatagcaaacaagtaggagtcctgatctcggacagacagcgcaaggggattctaaaccttttaaactccagattgactttactggcgttgtgtttatgaaactttattttggttgtcgtttggttttaaagacattttcttttgtcgaagcgtgtttttttatcaaatacaaagttaatgccaaacacattaaacacaggagacatttgtttgttctatagcaagtatctatcttgtttctttcagtagttcttttagcgttgtttggggtgatcttgtatgattgtttggtgccaattttgtctcctcacttactcttcttgctaaattcttttaatattttcgtaaaatgttcctttgggtttgcctcatggtaggcatttcttggtgattcctgtggagcacattccaa

SEQ ID NO: 6746 - DNA, 2492 bp, Populus trichocarpa
  Intron number 1 from transcript POPTR_0006s13760.1 (locus POPTR_0006s13760) derived from phytozome v7.0 (chr-ID scaf fold_6; pos 10986737 to 10989228 reverse strand)
tttttagctttactctacgattcattgacgatcaggtatttcaattgatctttttggttgcaaaaaatcgattgaaatggagattctcaatttctattgcttgtactttctgccattattggattttgatatttttttcgtttttattggaaaagctcattttttgctattgttttttttttaatagttgaaagaggccttttttttttttttcttgttgaggaaataaaattaaatatgttttttagtaatcttttatatgacgagtattagtctttgtagaaacgcttggtgctgcagctgcagctcactaaagaagtttcatccgcctgcattcagataatcttaaataaaaataataattccaaagaattatgaatttattaacaatataaataccctaagaaatgaataataatgataataatattcacgacagaacacatttgcagaagaataatcatcatgacaactaacctgtgattttgttgccgatttaggatcaggaagccatttataaaactgcatcatataaatttcaaatcattatcaagctgcactataagcattgacttataccattaatcaaagtcaactatcacgcgaatataagcaaaagtgcgcgtgatttacttgatttgtattgactaaaactgcatcaatgccttgagattcaccaaaactgctgtccttggtagaaattgtcaagccaccattctccttcacagaagcatgatcttgcacctaaaaaaccacaaaacttacatttctaaaactaaaaaagaaaaataaatagaaatctcaccatttgttagggttaggtcatgagagatgacacaatttctgcttcttgttgttccgttaaaggcacattctatttataacaaaaatgaagcagcaattgtcaaataaaagaatagatatcagctgctaactagcataggaatgtgaatcaagtcaaagaccgagttgtagatatgagagagtgagttagtgagattagtaacaccagttccaatgatttaagtgcaaaagattgaaagaagaagtagaagtgaagttgtgtcctttagagatggcaattgatttgtggagatttggaggacttgcttgtttgccatgtttctcaattcagtttacgaaactttagggagagaggtctattatcgtccgtgtaactgactggactcaccaacggtttgatggacaagtgagagtccctgataaggaacgaaacttaaagctccatgtagaagatgggtataatagatagacaaactaaaaggatgctggttttatatgaagtggcgagcaactttcgatttaaaccaaattgatagggtgtgtagtcactttggtaagaaaccaaactaaccaattggtttattttcattgttataataacaatttacaaagccctattaaaaaaaaaactcaacaatcatccgcatatcatatcctacccgctactcttttctctaaacttaacaagctgactctctcactcaagctagtggcaacggcaatagcaacgactaggtagccataaatttggcagggctattgccttcactttagaagttatattgcaaaaggattttcatagatctatttcttagtactaaccaaatctctcctggaggaatatagagcagctacccctaaatccagcaactttctctttcttgaccactgtagcggcccctaaatcccctccctctctcaggtcttttgactatttctatcaataattgtttgattatatgcgtaaacaaatgcccaatacatgaatgtggtggtttgcttagtcttatatacatatatatatatatatatttgctttcattccatttgtctgtactttgttgtttgattggttgaatggaggtcttgtgtgctggtttcatttgtgcaagtatttttttattttagagaaacaacatttgtgcataaaagcttgatcattgatatgtatttttcttttgtgttactataaagtgatcaaacaataagagtttgcactctttgatcaaactgttacagtaaatggtgaagttgaacctactgagcttttacttttgtttttgttccttgccagtgttaatttttcccatgtcctctccataattttgggttgcaacattaatcacttttttttttcattctttttcataagttgtatgacatgctttagtcaaatggctgaaatgtcatgcataattttatatgatctatcatcaaaagaagagacaagattaactcgaaaaaaaatgtaaattaaatgagtaaataaagaaataattttctttgaaaaaaggaaaaggcaagcctgggctagccattgcttgggcctggcttgctaggtccttgctcactggggttagatgcctctggctagcacacttaattatgaaagaaaaaagaaaacataccaagctgtttttcatagctttgcttctctttaataggcagcaagacagacaataagaaag

SEQ ID NO: 6747 - DNA, 3890 bp, Populus trichocarpa
  Intron number 19 from transcript POPTR_0017s13960.3 (locus POPTR_0017s13960) derived from phytozome v7.0 (chr-ID sca ffold_17; pos 14114369 to 14118258 reverse strand)
cgaaggtaagtgatgacactaaaagtgtctgcatgtgaatgctagtcagcttgtgtgtgtacatgttttccatgacatatgcaattgcaagtaggtgcatgaatggttagatatgggtgggtccaagatgggtaaggttactcttaacgtctcacctctttggtcccgttcattttttaaatggtacctatgtccctagctccgctcgttaatattccttttcattgtcatcactcaccaatcaacctaacattacaataatccataatttcatataaaaaacacaaatcccttaaaaactttaatagactacaatgaccttattgctgatatctcgattttcgtattacttactccacaatagttggtattatatgggcaaagcataagtatctagtttttgctcctgcatgcatatgctttataaaatgctaataaaagatatggaagttggggtgaaagttcccagcctaaatattctatatggattggtattttcacttcaatgttactctctcttttttatcttgacatgtttatttcacatataatacttgtatgcaataattcaaacagcttaaagatttgttaaaagtgttcatagaaacttaaaacagctcacttcacccaaaaatctaacatggattattactctattagactagcttttgatctccactcttttcaaccctaagatgaattaaaagataaataattgagaaaaataatactattgactgcatgttacaatatataatgtcaggttactcctttatagatatatgaatttttattaaaaagtaccaataattttttcacctttaaaagtttgtttcacctaagataaacaattcattatataagtctaaagtaaaactacaattaaataattgatctagatactatcctttctatttgttgtgttgtccttttatgtgcaatgattctagtttaagagaaagaaaagacaccacccaaaactgatttcgtgagtcttacaaaaattaattttgcacatgatgacgccccccaccccacgagtgcatctcattttgaagcaacttgtgtctcaaattaaatatcattggttattggttagagaatgttgtgattaatagccgtagtcctctttttatttagtttgtttgtttttttaagaattttatggtttggatgatattattctctatttcttttttgcaattattttgttgcttgttcaattcatttatatggttttacttaaaaggcttaaagttatgaaatgataatttgaatttgatggaaggaggaaacaatcggtctatttgattactaagcaaccataatatgcttgtttatcctataaatcatgataaaagtacaagatactctttttttattggttggagtttttcatagattcatagattaattattttgcacatgtagagaacagaaaaatattgaaaaattgggaagagggtatttttgtgaagataagaagtatgtcttcttagtatagaaacaagaaaaaagagtgttgataaatagaaaaacctttcataacattagaaactcgtgaaacttgagtaatccactgttgtaaaactgaaaatggctttgctgaaaaccatctagtaggtggcctagtgataagagcttaggattaaggggtttgctctccctgtggtttcaagttcgagtcctgtggttgctaatatgatggccactagaggcttacatggttgttaacttcaggacccgtgggattagtcgagatgcgcacaaactggcccggataaaaaaaaaaaaaaaaaaaaagaaaatggcttcgcttaagataattattgttaaagtagcagaatatcgattaaatgaaagttttattaaagttaaagaggacgttaaataatccaattaaaagaaacctttttatatattcctatgttgaggatgtaacatttcaatctccctagccacagaaggtatgatgactttttattgttatcaaattagtattgattttattttattttcattgaattgaattgctctattatttttttacttaaaagatgtcatttaaaaaaaactaattgatacaattatgaagcatgtgccatgcaagttgtataaaagttgtttatgattgtccctttgaccaaaatttaaacttagttgaccaccctgaccctgttcattgaagttttgttaaatatttaccagcttgctttaatcaatttttcatttaactactgccaccaccgaacatttaccactaccattattactaacatttcaatcacttgcccgactatcaacactcctaccttaagaattatgatccaccaaaataccaccactgcccctcaacctcctaccacaatgccaccaccacattatcatactactacaatcacctatagcataaccaccaaatcaccagcacttacctcctccactgtgacttccattttttcttccattgtcactgcctccatcaatacattttgcaatacttgagtttgtaactacttgagtaaccagtgacatcacccacttctcaacacattgtggttgtaccttggaaagattgtgttatgaagtggtgccactaattctttctcatgtaattatagtttgagtattttataaatcttctttgcaccaccacctcctcaaccaacactattgtgctacctacaccatttacaatcaactttaatcgttggtaatggtatttgtggtggtgctggtggagatggaagaggcagtgaagggggttgtggattgcggtggcagagtggtgcagggggggttaagtagttttagcctaatggtcaaacatagtcaaagattgtcaaagctggactaattggttgaaattatgatagtcaacctagtcaagaaaggtctactttgtcaagtcgatgtttggtcaaattggatacatgagtgcaactattgatagaaaatctcaggctgtgtttacttttagaaaattgtgttttatttccatctctagttctcttatatacactaaaatgatttttttttcatggaagattaaggaaacatattcactaaatacaaatcttccaaatttgaaaacaagggccttgtttggcttaaattgaaaatattaaaaggaatgatcataaaatattaggtgaaccaaacaaggtgtttttttatataatagagaattttaaaaacaaccattttgttgtttttcaactttctaaaagaattaaaaaaaacacatttttctaacaacatattttccaattagtttatgcttctatttcttagataatttttatgaaaaattgaaaaaatttacataggcacaaccttaatattgcaaatggtaaggggggttattcggtaagaaaacccatctaaaccttataattttgctactataacatgaccatttatataccattatattgtaggtgacccatttataaaaaattattgtatattattgcctatccatttgtgacatgcaccaatttaccctacattgtttagatatggatgacttaactatgtgcaatgagaaagaggatgaaatgaaataaatcttttttgtttgtatcatgccatagaatatgcgatttttgctagcacgggtgaaagtatgtttgttaatgctcgcaagttgcaaacaatattcattcttcgtataattgttaatcctttgaatcttatttccaaatagaactcgaactgttttcattgttgtaattccgtcttattcttgatttatcctttcaactatccatttagttgcttcaactctatgtgatgcatatgttattgctgtttgcttgtacttcacctttgtatcttaccctttgattctagtgtccagtctatctgtctaaagcactttgagaaaa

SEQ ID NO: 6748 - DNA, 3806 bp, Populus trichocarpa
  Intron number 1 from transcript POPTR_0013s10450.1 (locus POPTR_0013s10450) derived from phytozome v7.0 (chr-ID scaf fold_13; pos 10743409 to 10747214 reverse strand)
ataactccaattcctcttctccttctggtgcgtttttttgttttattttgtttttgatattaaggtttttattcatattgaaatttagggttgaattattggtttgatttgtgtttatcatttttggtgtggttttgatgatactatgtgatttgatatttgtattgaataaaaaagagattgagattgaattgatgaaaagaaatggactttatttagtataattttcttcttcttatttttgttttttttatgcaattagagaaatttgaagggattggaaagagtgaatccgaagagaagtgacccgtttggatttggttgactttctgaggatggcaaatttttggtgaaattataaaaattactgcgagggataatggaattgtaagtggatatgttgaaatcataaatctgtaggtaaaaatgtcatggaaaacccagttcctctagtttgtgtgatttaaagtttcggttgatttggacagacacatgctctagtttgcttgacgtaattgggtagctgacttaggctgtttgtttttgtggttgaaattgcgcttaggtgcgtttcaaaagtgtgtttgacatgaaaaatatcaaatcgatgtttttttagtgttttccaataattttgatgtgctgatattaaaaaaaaaaataataattttgatgcattttcaagcagaaaaacactctgcaccacaataccaaacacactataactctttatgtggttaagttgtaggcggctgattttcttgaaggattattatggttattgagatcagcaatgctgcatcttttgttagagataaaggttgtagctttaggatttttgataagtgaattgttaagttttgctcagagtttatttagtcaaccagtgcattgattgataaaattattattgaagtttggctttgttgtagctgcctgatgtgaaataaattgtaactttaataaatggaaagaataaaatggaaaattggttgggctagagcatatatgatatctttcgaagacaccggtcctttcaagatccctaagatctcccctctacagccttatcaactccatctccctcattctctaggatggctgaaaataatatttttaaaatatattctgattgtggagtttggtagaatggatgaaaaaaacttttgtgtgataaattgacctgtataaaatacttcaattcatcatatacaagagtcatgcaagactcgactcaaagggattttgaaaggttaaagttagatatttgaatattaatagaaatttagtagtgttaattttttcattacaaactctcccagcagactccctacattctcatgaactaacatcttgcaatcttcaatatatttatcacgtgcctcatcaagaatataggagagtctataagaaggttttgctagaaaaataacataattccagaataaatcttgagagcagcaacatggattattttcctccattcaattatatttggggccaccacattgtgagctactttggtcctaaattattttttaccacttcaatccatgttatttttgctgtaccacacctcatattcacgagagttacttttatggtactgtcctagcaatgacctggatatctcaaaatatctcaaatcagtggatcctattcccttatatataaatattgtgaactaagttaaggtatgaatttttattattttcacaatttagggtacataaaatattgatttgctttaatcatatgttttgggcgatccaagtgattgctagttcgattctatgtaagaaaatctctatattcacccttttacttcaatttattcactttcatcgctaaatgaatcaatatggtggaaacacaaaaaatgattacataagaaactagcaagaccacagcaaggtggaggtggcatctatgaggatacgttagtaaggttatgtgattatttgtggaaacacccatacttgtaagtggaatcaggttttccttgtaaaagaggtaaaaattctggtatcaattacaggagtaggttcaaggtttatggctgttataggttctgtattatgaacagtatcattgggatttttcttgtctgtattaggctaattgatgggattcaatgattggggtttttaagggaaattgttgaaggtttcaagaagtgacaattctatctgaaatttgattgcttgcaaacatatttttatagagtttttaattgatcttagctctgaaggacctggctgctaattctatgagctctttgagtcccatatcacatacttttcagttttgacaaccaaataaattgctgctaatcatttgtggtaaaagaatctgggttttaccaaattaatggtgtctctcaatgatgcaagcagttactgtttaatacagcttactcatcaccactaagagatggttgcgtgtgtgcttttctgccagatttcccaattgttgtaagtctttgatagaaacttccctgcttatttagttcatcgaattgtatgtatgccaccgtggaattatttagttcatccaattgtatgtatgccaccgtggaattatgtttgcttcctctaatgatgtagtgatttatcactattgcttccttctcattttatattttttcagtgctatagtttaattatcatgtttgttgaggtcatgtgccatgttgaatttgccaccgtggaattatgtttgcttcctctaatgatgtagtgatttatcactattgcttccttctcattttatattttttcagtgctatagtttaattatcatgtttgttgaggtcatgtgccatgttgaaccagtcattttgaaccatcattagagaattacattttcccctaaataaaacaataagagaaaaagaaaagaaagagtggtaataatcattttcattataaatctttcactaatacaccatcattactgatgttacctgctttcattagccatgctcaatgagtttgttccagtagttctagaagtggataatactataatatgcatgcagattattggaatacattttttctttagggacttggttgcatctgttaccaaggggatagattcattgatttggtttgttattttattcttttccttgttttgggagaaatatgtaggggctaattaaaggatatttatacactgcatgtttaaaattctgagtacatttgtctgttttttgtaccctttcaagtacaccctttatttcattctggctgagaatcagcacgcataatgacagatttggtctttttgaaagttatactattgttttcgttatgattaaatgaacacagccagaatgtgatgccttgatgttgaaggaaagatagtatattgaattttgagttaattataacttagttttgtagtttatgaaaatacattaattaaaccctgaagtttatcaaaaacaattaaatagtcctttgacttcaggtaaccatctttaatttagtagtatttttattccaaaaaatgccctttttttctcacctatctttccatcctatctacatttcttttcctctttctatttcccaaaataataaataattataaattgaacaaagacatgaaatagacgaaaaggatggagttataaatggatttaaaaacataaggattaaatatatagtttctgaaatcatgatgactaattaattagttttgctgtaatacgggaactaagttatataattaactcttgattttttgcctgctaaagttgcaaattaatttaattttgcatggtatgtgtacaggaa

SEQ ID NO: 6749 - DNA, 518 bp, Populus trichocarpa
  Intron number 1 from transcript POPTR_0006s26900.1 (locus POPTR_0006s26900) derived from phytozome v7.0 (chr-ID scaf fold_6; pos 24963097 to 24963614 reverse strand)
ctcatatcttggaatcctggataagtcaacagaaggtgaatctccattataactgatgagtaaattaggttctcgatcatgtgttgatgttgtgcatctgcatagtttagtccatgacaaaactaaatgtatcaggaggcaaattcatgtagctcaatccaactaatttgacattgagatttggtgtagttgaattgttatctactagctgcagttgattgatcctaatcaagaacttacttcatacttaattcataagaatattttcactctttgaaatagatagatggtgttactcgacaaatagctgtgaatcttgacacttacctgaatgagtttgatccagacggaaaacatatgggcattggtgcaataagcataacaaatccagttgcagcaagagtatcaacaacacaggaattttccttacaagtggaagagatatcacattttaaattaatgatgatagctcggaaaagaagctccaaattattgttgcatatgcagggaatccacta

SEQ ID NO: 6750 - DNA, 1580 bp, Populus trichocarpa
  Intron number 1 from transcript POPTR_0017s13640.1 (locus POPTR_0017s13640) derived from phytozome v7.0 (chr-ID scaf fold_17; pos 13739037 to 13740616 reverse strand)
agctcatacttttctctcttcaactcttcaaaaaggcaagaacttactagctcccatcttatttgaattatgttacttgaaaaattgcaccttaagtttattcttcttgttgttgttctagtaatttcatttagccttggcttcaatttggaagaatttccttgaatgagatccaaatcaatcttgaagtttggatctgggatgttcatcgtttgtttaataagatttgattttgatttttcaggattaatggggttatttgaattttatgtttttgttgaatctaaaaaggattgattagatggtttttactttaaattaattatcgggtttcgttgtgattttgacgatgaatagtagatggcaaagctgggtttttcgtgaaacatgattatcaggtctggttgaggttgaagatggcatgacataatatacattttagtccgtgacgtttcgaaagttattcattttagtccttttttgtgggttgagttgttttagaaagcatccttctgacgtgtaaatgagatttatcagatgggttcttggtaatgaatgcatggatgaactgctttggcctttttagtgattgtcacaaatatatgtagtgagtgatgaactgctattctgctatgcttcaagattagaattttgtgccttcaaacaataaggttgcttgatttcggttgatctgttttgtagtttgttttgcatgtatgttatatgtttggatcatgctttagttaatggaggttctcagacagtgctgaacaatgccgttagttttggatgaagttgaatgaacttctcgttcaatgcacttatatatatatatatatatatatatatatatataagtgcattgaagcttgtataaaagagtctattatgccatcatataattccttttttaaatttaaatcactccataaaagagatatttgagtgtgactatttattatgttcttgatcatgttgttctagccgatgagttgtagctcaactgacattgctgtctctccttccctcaaggggtctcgtgttcaaacctctcctatataaccaaaaaaaaaaccatgatgttttaggtgtcattcttttgtatatagattgaattgcaagttttgtttaacatacccatttcagctaaaattaacatattggttgcgagagcacttttttccttttagttgattagcatatttttcaacttcttaatataatgaataggtgatggttcattgatttttgtttggagagagaatttgttcacaagcaaaggatttataattaaaccaatatgtcactacctcttttgaacacctaactttgaaattaatttgtgttcataattgattgtatgcactggagtatagcagtttttgacctcataagatagcacttttgagtctcttcaattactaaaatcatagtgacctgacttaacttgacagttgctttcttgttatttgtgaatcttcatatggacattaactggcctgtatcttctccagctaagctaactgatgtttatgttcatatctaaaccttaaaatgttcttatgtaacagatttacaag

SEQ ID NO: 6751 - DNA, 1623 bp, Populus trichocarpa
  Intron number 1 from transcript POPTR_0007s12670.1 (locus POPTR_0007s12670) derived from phytozome v7.0 (chr-ID scaf fold_7; pos 12919447 to 12921069)
agcaatcaaattcgccatttttaaggttttgaaaggtaaaaactatccttctctctttgttatttccacaattatattaactcgattcatctttgcttccaaggtcaactcttctctgttttgtgatttttttagtgatttttcgtgaattttgttttagattttgtgtgtggtttttttagtgtttcaaagaaatcatgttattttttttttatttttttttttactattttacactaactattttctggttctcgttttctatagtgatcttgtttttgattggtgtacaatttgaaaaaaatgcgattctctttttccattttgtgtgtggtttcgtgttagggttttgaaagaaatcgatttctgttttcttttattgagattctagtttgtgtgcgacttctttcttgttctagatgctctgtttcttttttttttttttctcgtaaaacgttactttttctttcgtatttttggtttgtgatcagttcgactcttttgtttatgattattttttcattggtgtgtaatgtgaaagtgtgatacacacacattaagggtttaatcaatactgttcttttgggtttcaaagactttgtaatactactttacttggtaagttctgttctttggcgttttacttgctctgttcttttcttattttatctttcctttgcagattttttgcttttatgggttttctttttagagttttagggtttttatggtgggttttgtttcttgattttttgttttttgtatgttattatctgtttggattctgggaaagaaatgaaaacaggtgaacgggaaagaaatgacaaaaaatgaaatttgtgtctgtaaagtgattagttgaacaatgaaaggaatctcgggattcaagaaagcaaatgtgataattcgtaggagtttcttgatatgatttgtgaatgtatgtgaagttatttttcacttttttgactgattttgtttccttgatagtacttcaagatgataaattcattttctccttattttaattttcttagttgtgatgaaaggcaataaattggagttatgtcggctgcctctccgtcacctttctattctatattaagaaacaaaaatcaagaatccctgatcaactgtgatgatcttattttctttcaattatttttcattttttaaacgggtcacggaaaaggtgtttaaagcgttcattagcaaatgatggtaacagaaaagaatattggataattaaatttgcaatgatttgctaaactcttatttgggattttaaatttaaggcatgctaatagaagttcttctgaagtgcatcactgtttccattttcagttattggatgagaagtttgaagattttttaaaattttgctgttttttgatatgctcaactcagaaggaagttttggaattcgtaagcaagttattgatgatgtttaactcaaggtctggctgtgatgagaaaaaacacgaaaacctatgaaattagaccctctttgtgttgaagaatgaaaagttcttatatttttggtatcgtttatatttatgaatgtatatgttatttgtttcttcctttttcgtagaactgattggctgcttcatttgatcatagata

SEQ ID NO: 6752 - DNA, 1385 bp, Populus trichocarpa
  Intron number 9 from transcript POPTR_0011s04530.1 (locus POPTR_0011s04530) derived from phytozome v7.0 (chr-ID scaf fold_11; pos 4496259 to 4497643 reverse strand)
tagactgtaagttgataattttgtttttctaccaataagacaactctggatattcattttttggtgtcttatttgtttatatgagtgcatgaattctccatgtcatctgcattcaagaactgtactgctcccataacttctaagtagagttttatttttatccacatccaatatttgcttgtggtgcttgttagtttttcatttggtcgttaagctgatgccaaaaatattttaatataaattttactggagaatttacaattcagaggctggaaattgagagagaagtttaagaagaaacaagagactaagagaataccataattaagccatcacagagtgatttactcatggcatagtattggttctcttacagttttctaatgaaaagtagttttcatgtttacctttattctgccaatttatttttttctacttttccctctattctgccaatttattttcccatgaaagatgcagggaatgtttttttctacctttgcctctattctgccaatttatttttccatgaaagatggagggaatgtttttatctattagttttatttttctaactagaaaatgaggacctcttttggctcctttaaaataacaaaaggtttttttcgagaagaaaatgtaaaagcattcctattaggaccactatattccgaagtggattttcttttccctgaaaacaaagtagaaaacatgaaaaatgtatgttgtagctttaaagttttcagattttttttaagaaataggaagcttggctttctgacaaaattctatccagtgaacacattatcgaatagttttctgctttcttaaaaaaaaatgggcaagttaaaattttccaatagtaaatgcactcccactgtagtcatttaagatagttgtttagggattgaccgtgttgaggaggattcgtcttgaatgaaaactgatccttttataccagactcctttaacatgaattgatttgattctgaagtttagcttttcttttcattttttttttttttgtgattttggatttgaaccaagtcaggacttccaaaattcatgtctttcctagttcctgggccatttacatggatgtacaataaccggcctatccaagctagaatattctgcaggcatggagtgtgattgttatttccattaataatcagcacatgctgtcgtctaggcatgcatggggcatccctagaatattctgcaggcatggagtgtgattgtaatttccattaataatcagcacatgctgtcgtctaggcatgcatggtgcatccctactgtctacaatctacgttctctctaatgtgcttttccttctttcatgtaaagctactggtggaaatcctgttactttacaaagagct

SEQ ID NO: 6753 - DNA, 1561 bp, Populus trichocarpa
  Intron number 1 from transcript POPTR_0019s02680.1 (locus POPTR_0019s02680) derived from phytozome v7.0 (chr-ID scaf fold_19; pos 2480992 to 2482552)
acaagagacgatctctaagtaatttgttcaaggaggtatttattttttattttatttcttatatcaagattttccatacatttttatttttattttttgtgcaaccataaatgaaagattttattttattttattttaagacattcttgagcaataaagtttaaagctcaagtaaaacttttcccttgagaccactttctctacgaaaaactcaagtatatgcagctatttgtattaggtttattttatttgttgggatattataagcaataaagttaaaagctttagtttccatgaacaggaaagttggggtaaggtatctttaactttgttattttgcatattcatttgatgacatacaaacaaattaactcttatcaaggacccattttttgtttggttcttccatgattttcctcaatattttctgtgatttcattttcgtaccctcgaatgagataatttttttttaattgctgcccacattagttttatatattaatagtgagaaggtattagtatattattattttaatgcgatctcataattagataaagaaataactacttgtttgagactgtagtagcttctattttttaaaacatgttttcctttaaaaaatattaaatttatatttgttttagtatttttttttgatgattttgatatgcataataaaaaaaactaaaacaaattattttaatatattttaaaatgaaaagtatttgtaaaaattacatgcattaacagtaccgaatatatattaaaaaacggagtttgcatacttagataacttagttttgatgtgagaaaggtgatataaaaatattgagggatagaaaagtatatctacaaactcttatgatgatgaaggatctaggtaggaatgttaaatcttgacagtaatggaaagcaactattgagcaacataggctggatatgtatggccctagtcgatggtgggcgccataaagcgtggcaaaattgatggtttatggctgaatgtacttgacatccatagaagacttgtatctagctgtactggttgttggggcttggattattctgatcatttattctgatcatttgtttcctaccaattcgattaaattgtgtcagattgtggggtgtcgttcttcgttgattttggaacgtatctttcagcctcttagctattatgttccctgcactttatttttatgcaatgctagtccatacacacaattacatttgcatcgccttgttcacacagccaactggataggttattcttcggcctaactctttctaaggttaacaactatgattctgacacaaccagccccagaagtagagaattatttatggtgtcccgttggaacctatagagtctccattgcttgtatataactagtactgcaccctaagagggggacatggacagggggctcaagcctgagccctcacttctcttgctttgcagggctgccataagctacaatgccattggtaaaatgaacacattagttagattttgaatattctgcgatatcttatggttaaaattgcattctatgcaga

SEQ ID NO: 6754 - DNA, 1176 bp, Populus trichocarpa
  Intron number 1 from transcript POPTR_0017s01330.1 (locus POPTR_0017s01330) derived from phytozome v7.0 (chr-ID scaf fold_17; pos 924254 to 925429)
gaccaggatcaacaagacagctgtttctctgtcaggtattagaatcttctattctatgcttattttgattttaaaaaagaaaacttgtatgtgcaataagtggtttgataataaaaaaataaaatgggatgacccatcaatgaagaaagatttgacaaattaaatgggattttgattcttgcaactgaagggcaagaaatcagtagaaaaagggactcgatcaaacacagatgacggatgtttgtcagaccctgaaatctttggtgaagatatttttccaaattcctcgagaagtttaacttgttgagtccgagattgaaggcaatttttagatttcaattttagagtgtttagcagaatcattcttgaagaataaacaaaagatgatgaggtggaagataatagaaaaattaatcaagaataaacatcctctctccttcttctcaacctttgtcattcttgcttgccaaatataacaaacaaacccattaattcaatgaccataacatctagcttgtttttcctgcaatccaatccaattcaacccaaagctgtacctaggtcaatctggtatttcatcgtttaggttagataaagctgctctgtggttttgaaggtatctgttgccatttgggggattacatgatgatggattgattttgaggaagggtgactttgggtttatggagtgtgcatgttgctaagggtatgtgatggtggtggtttgttctgtttgggtggttgatgctctcctagtgtggatctagagggtttcggaatttgtgtttgtagttggttttagggtgtcccttgaggattgtaagctgtccaggtggtgtttggtgatttagggtctggttatccagacaccactgcctagttgagtggcaagatttccatggcaaacgggtctctagctctttggaggcccacctgccacctgtggttatttgatttcatgttttccagatggtaattggcagtgttaagcctccctgctcagtgccgaggtggaattcgattgaccttgcattacctctatattttcaattggcctggcccatttgcacttttctattcaccctacacgatggtagttcaaattttgacagaactgggtgttgtatttgcaaatttgcaggggtggattcaatatccattgacaggaaggcaaat

SEQ ID NO: 6755 - DNA, 2732 bp, Populus trichocarpa
  Intron number 1 from transcript POPTR_0001s36800.1 (locus POPTR_0001s36800) derived from phytozome v7.0 (chr-ID scaf fold_1; pos 35515195 to 35517926)
tggtaagcatactattactatcactctcaaaagaaaataaaatgaaaaaggcatccattgtctatcatgtaaatctcaagcaaccctcaataaagtgcaataacaatatgaaagctaaaagttaattaagtttaatataatcttaatctaaaaataattttatatttaaaaattaaaaatattttaaaaaaacttgaattaaaagataatcttatatctaacaatcttatgtacgaataatattacaaaattagttaatatatgttcctgcagagaaattattttaccataaataaacaaaaaaaaaacacttgtatttatttttcaatttcttgctaaaatttgcggctaaaaaaatataatatagtttcttgtaactaaccctaatgaatttcttttgaattacaagttagtgagcctaaacttgtaattatttaatataaatttaataatgaaataaatccttaaacaatgtctaataaaccagaataaactcaaattaaaaataattattaaatattaaataaataaataaaatatgataataaaaataaagttttcatgctaaaattcttctacatagcctgaatctttaattttcgcgcattttgaacggattttcagtcctaactataaatatatcgttctctctcgtctggatgaattaataggcatactatatatggttgaaaagtttgagatgtttagtttctagactaacttgaattgtagaaatattttagctgtagctccagatatgtcccaaacaatatacaaaaatctagtctgacagatttaacaagatttgtctagtaacttcaaccctctaaaataatatgtttttgaattttatttgatctgaaaatttactagaatatagttccatgtgtttaatattttcctgtaaaattttaatttattctgatgtacagtttgaaaaatatacctgatcttgtaatattattcagcaaatattttaagttcaaattcaaacttgatttagtttgaatcttctctgtcacatttatcctgtatcatatttggagacagagacattttttttttttcattttgtattctattattttgataggaaatcaacatgcttgatccagtattctattatatgaaaatcgatcacatgtgaattagttccagaaacgagtcaacccattttcttatgtctacttttttacttcattttttctcttttctcagtgaagaaatgcaccgccatctttttgtatttttagctgaacagaagtgcaaaaataaaaaaaactggaatcatcaattgtgaattttgttcaacagacataagaattaatcactcaggtttcatttttagatgcctgtccaagcataactgttgaatttcctttcaagttatgagctggaattattcttttgacgttatgacaatgctgttgttatattctaaggtgttaaatatgcgtttaggattggaggtgaggcatttctgttcgataattatgattattaaccaacattatcttagtagtgccccttgtatcccgaaaagataagggaaactgaaaacacactgtatttcatagctgcaggttgctattaaaggcaaatacactacagaactccaatctcctttcttggtttataaatgcttcttcacaatattctaaagtcttgatagtcatagtaatcttgagaatggattttgagaagaaataaaagtgtaaatttgtagaaaatggactggttacagttctttagtggaaaaagaaacaaccatctttggctgttcttttaataaacagttcaaaacacataggggcatagtgatgccagaggctgaataattgtgtgacgttcgaatattgtttctttaatgttttttttttaatcatacgaaactggagttgtttcatgtattgttagaaaaaactttagggtgttttttttttgttgttgtaaaaaatttaccattttctggattttattttgtttcttttgtgtaacatattttacaaaaacttgaccaaggtaaaatgtttcatcgacagcctatatgcttagttcaattgcaagaaaatattttcaattcattaagttatattatatgtcatatgaagaataatcaacctataattttccacttacagtttcatccagctattacagtttcatccagctatttcaatctattgaaacatatgttcaatgtaaaatatttcagtgaaaaagatttacatgtaaaattttaatttgtaaaatgtttttgagataggaaaatgctatgcatacgaacagatcattttaaaactccatgcaaacatattggcaagtgataaatggtgaactgtggatcacataaacattagatgattggttaaacttgaaaaaaagttattgccacatcagttgtatgaaaaactatgtatgatttgtttgcattaatgccattgctctttgagatatcaattagtcagataattgtgtttatgtctttgttctaaaggttcagtaaatattcgtgtgaaatggtggtgtaatgtggctgaatgacattgagaactctagaagctatgagcattaggcatgcttttaatgattcaatgcgtgcttcacaacaagtttgactatggttgcttatttttccttttccccactttttttggtccttgccaatttctttgcgatttttttttgttgcttcagagattggatcttaggggacacaaagttcgtagtct

SEQ ID NO: 6756 - DNA, 950 bp, Populus trichocarpa
  Intron number 8 from transcript POPTR_0001s27600.1 (locus POPTR_0001s27600) derived from phytozome v7.0 (chr-ID scaf fold_1; pos 26478251 to 26479200 reverse strand)
tcacggattgtcaaggtaatgaaaatagagactgcatcttaatttgctattagttgggatccttttctgttctgttgtctctgttcttttgttggatgcatgtctgtcagttgaggaggatgttttgtgcattttattttttatttttttcaacttcatttattggtttggtagatagcaaggttgccgaagtttgaaaaagttaaatcaatggttgtatcagctgcaagatagttttatcatgttaaatgtttagaactaaaaagcaaaccatggtcatgtgcatttgctcctcattggctgtggcttagtagctgttttgcaagttttcatggaggcacaatggtttgctacttttatactcttgcatgctctttcttgtgtgcgtgagtgcttgcacttgcctgtgtgcgtgcatgcattcgtaaatgaaaagtattgcaaaagtatatggaatgactccatgatggaaagttgagggaaactgtcgagatttgttcagttacatatatttttgaaaggcctcagttcttttgcaagcacacaccgagctatcaagtttgagctctcctgatattccgggatttctagatgattttaacagttttttttttttcctggtaaatggttattgtgcggtgtggagttgtttcacagaaatcacatggtctgagtaggtagagtcatgcatgccattttgtagatgaagaatctaaactggtattttcaattctccgttttttattcttattgagaacaagggagcttcttattttctatacagagcaatcagaacttaaagcatgtgttcatttaaatttgaaaaaatggcagctaggatttagctttgatgtgaaatttgttggaactgatgcacattttattactgtcttaggggtccgctccaagatttgataggcatcttaacattattttttgtgctgcaggtc

SEQ ID NO: 6757 - DNA, 882 bp, Populus trichocarpa
  Intron number 4 from transcript POPTR_0010s21390.1 (locus POPTR_0010s21390) derived from phytozome v7.0 (chr-ID scaf fold_10; pos 18692689 to 18693570)
ttctctgaccctgggaagcgccagcttctcaataggtacagtttagttagtggcgtatgtgtgtttgatgaataacaaatatgttatatttatagcattcgggttatatggaatagaatataatatatgtatgaaacaaattattgaaaagaatggctgtgttttaattttgaagtcgtagcttgctaaactggatttactgaatgtttaatgaaatgacatcatctcaagtttttcatattttcatgtctatgctctaatttagatcggctcaacttgtacatgaaagaatatattaaatttctctgtggaaatgcacattcttttggcttgagttgcaatgtatagattgaggaagcatgcaaagcatagtttgcatcagttttccctgtctatcaagtgagataggaaccaaattctttgtttagtcgtatcagtactgtttaattggttgcttgttgacagaaaataatcattagaagataaataaatatgagctgattttattttatgaagaagcatgaggttaacatgtcatttttgcctgccaaagtaaactcagttcacgctcatcaagcagattttatgtcttaaagaaatttcctttaaattgtgaagtcatacccctgaagttatagtacctgtgacttgatttgtcctgcttgtatccagcatttaatctcgttatctctctatgtctggggtattatgccaaaaaaaaaaagagcattagtggccatgcctaaatttgctagtggattctagattgtgatggtgttctatggaacaatgtcacagaattgcatgttacgctccttctaatgctttgcctattgaatactttcaggcttttggctccttttatatcctctggcatctttt

SEQ ID NO: 6758 - DNA, 1264 bp, Populus trichocarpa
  Intron number 1 from transcript POPTR_0002s23400.1 (locus POPTR_0002s23400) derived from phytozome v7.0 (chr-ID scaf fold_2; pos 20913882 to 20915145)
gcggtaaatttgagaaaaataatgcttactgtataagagtgtgctggtaaaagtgcataaatttgattcattccttttcatttcattcagtttgagcttcctttaatgatctttatactgaacacgctactctgtttcagattctatcagtcataatatgtctaataagggactggagtttgtttcttagcttgttaatttctttaataatgattctgggaaattgattattgttttctggtatctttatactttgttcggacagtattgaggcacagaatgcagttgcttatacatgtcttgtttttgcagcgtggatgattgatttcctaatgtcactttccattttgaaaactcagttatcttgaacgtttatccacacgagtatctgttcccctttgtaagtatttcactgcaaaaattcatactgctttggttgtgcagttctctagcgcatcttttgttccttttcttttagaatagcttctcatctccacatagtaccttagcagactgcaggcctcaaatctgaatcatccagcgttatatgtaatggacttgatttaaaattaaatcaagtttaaaaagtaatatttggatgttgtggacatgattttgtaggtgaaaatggtgattttaggtgactggaatgtgcaaaatactggctggttggattttgtttgtatgtgtgtgaatgggtacgtcaaagcttccctgtcaattgtttggcttaatccaaggcctaatttgttagatctttggttagacaacttctttggggaagccctttgtcttgtagaggttgctcatagttaaaattaagcaaacaagcacagggaagaaaattgttagcggataatgatatgtggcttcagttaaacaattatatgtgtgcgcgcacgtgtgtgggtgtgtttagggttgctagatcatgtttacaataccatagtcacgtgtacaataccctaatacacactaaaggagtataagtatagggccttgtataagtataattataatacaaccagtgtataatatattgttccgtaatatcaagcattgtaataagtctagaaagtcaattcttcgatggccaatccttcattgatgccttgcctttcttctcagatgcatatcttgcagagcacagtgctttatttattccttggtgaatttctgaattgtgtttgttaccaaaatcttcacatgcataaatgatcatttacaaatttggacttttacaggaaggtacgtggtgcattgg

SEQ ID NO: 6759 - DNA, 3931 bp, Populus trichocarpa
  Intron number 2 from transcript POPTR_0011s03140.1 (locus POPTR_0011s03140) derived from phytozome v7.0 (chr-ID scaf fold_11; pos 3202976 to 3206906 reverse strand)
agtactctaacaataggtatatacttagttcctcggctcatgaattctccatgttgcaagccctcttcaagtgctcacagttggtctttcttgctttctcatccaaagggatttgttttttctttttgcttatgtcagtgttaatttttattgctttggttttgagctgtttctttaattggttttcttccatcatcattttctttcttcaattggttttcaacgtttgttgtggggaaaaaaaataggagcctggtgtcaaggtttttagcttctgagctagatcttcgggtgtctttaaagtaaaagaacataatcattctttatgctgcagtttggattgaatttcttctcaaactacaattcacttgtctttctttcttctatttcatttcttttccttgtataagcataattaatgttttgtttttccttttctttatttcacccttagatgattgtgatgcatacatgattttgagttcttggtacatagatctggtgtattagatagacatagaagcactattataagtgtaataaggtagtagaaacaagtagagggctgggaaaatgtatgcaggcatgtgatatcagcctctttatctcctcccttgatgttaagtttgctgtttcctttttctttcttttccatcattcctcttgaactctacctctcccctttactcttttcttgcacatacatgcatgtttgagtcatctctagggctaaagagattacctatagctaaagctgtcatcttctcattagtccaaaccctcccatctcttctcacttccaaaatagcacgtcagtcggacataagaagaaaagagtacaaagtcaaattaaatgtgaaaaaaaaagaaagggtttttttatatgtcatgtcaccaaacacacaaacatatattactagggtttcaaaatccaaatccccaaatgggtttcttcatcttattttatttttccaaaacaatcactaggatctctcaatttaggattctttttcctctaattcacacgaatttcacaaaatctctgttcgaacccacgtggggaaagtgaaaagctttttgtttttcaagcatagccctagttagggttcatatttaagtaaccacttgaagtcatcaaaattgaaccgaaactttagtgcaaactattcaatcaaccatgtggattcttccataaccagtcaaaaattaagttagatttcacctagatttttaccctttttaacctcggtaagaagggtacagtaactggttagggtttaatagccagttcaatatatcagattgttgttttggtttatgaaaagaatctttggtcacgtcacacacgatttttcagttcttgactactgacaaaagggttcaagtcatgattcatgaaaatgaaccataaattttgaactcccaatctgcaaaaaaaaagaagaagaagcaataccacacagaatattgtccatttcttctccttagatccctccctctctctgttattttctttcccatagtgaaagagagatggaacaacgagaaagggttagctaaggtcatgatgatgccactgttggtcattgttgagtgtggtttgcgtttgttcaagatcttgaatatatgtatgtatgtatgtgtatgtatgtacgcaagttcttttaggaagagagagttaatacagagagagaaagagaagagacgatgtacgacaagtgctagccaatgggagacttctgtcaattttggcttttttaatgtaaatagaagcgtaaaactctagcagctgctgctgctgctcctctctgagagtttcagtcacattcaagaaaaaaaaaatagttttttatcttattacaaatgaaatagaatatcgaggtgggtaatagatggtggctcaagagattatccaccatagaagaaaaaaagaaaaatagatattgcccaccatgtaatgaggaattgacaagtgggatagatgtgaccgttgatttagcttggccaatcatgttataggactcagtgacagcttggcagagacagccaatcactggctcgacgaagttaaggtatcagaaaatctagatatctgggtcttgtcttaattgacaaaatgtgttcgcatcttactgttattattatggcaaaattttaggatgcacaaagaactgggtggaggttttcccatccatcttcttctttagggttttaaatgagttaacttaatggagttattagttgatttgactctttgatttgaatgttcttaccttaaaatcatggcttaacatcatccggtgttggtacaggggcatgattttgctctctccctcttcagtcaatttcatcatttattttgatatataattttctttttccctaatgttaagcctctactgtcacatctttaaattactagagggatatgtaactgataactagtaacttcacataaaatactgtacaatatagatttaaaaaaggaattttatataaaatttgaactctcaattttattttatttttgttatttggatgagtagtttgtctaaagcaatagctaatatggagggtattaagaaactgcctctagttgttgacacaaaagccttgaagcacgtattttactcgctaattcacacttcttggctgtgctcttaccatcttggaaaataaatggatttcaaaaaagtacatggtttcttaatctatttgaaatgatttaataatgaaaaataaaatcaaatgtaaagtcttaaatgtaataaaaaataattttcgatgttttttgagtgtttttttttttataattttgaaatcttcatatttatatgtccatataaaacataggaaaaatcatcaattctcaaaattattggagaaaaacacctacatatgcattatcgatcaactacacaaataggaagtaaccattcgaagaaaattaaagactagagacatcaaaagttgacaaacatgtgtacatgtgttaatgtaatcgtgtgcaagtgtcatgtcagttgagttaccagtgctaagtgttgcttccgttaatgttataacaaattatcaatatatgtaagtactaattttaaagaatattgctattaaatagtaattaagctatctttggatacatagaagaccatgggaagtgaaaagtttccttgataaaaggagttgtggttttcaatatatatatatatattcaagaatgacatgagaagtctcttaatacaggcctccaatgaaaaggaaatgaagaataattttccaattactttcgagtaaaaagttatctatgttcaatattttcttttctttaaaaaaaagagagaacagaatagaagaatgtatagatctgtctgttttttgttctttgataactagaatagtgtatgtttcagtttcttggtaagaggttagatgtgaagttcttataatactataacaaaatatacttcatcatttgaggggtggaggagatcttacaaacaaactactgaacccaattcccttttacttttagtaacatcccaattttggtgttgagatattgtgataaggtaaagttatatactttggccaaagtaatttacaggatgaagccttcttctccctgattagtgactttctgaggtattaacatcagagttctgaagattatccaaaaaaacatcagagttctgaaatttattagggccagagatttaatattcttgaaatcctcaattgcagataattatgaaatttaagatcaaaatgaaatatccacaggatcacttatttatgactaaaatttgtttttggggtgacattcttccacattattagaatgcacgttgtgatgacacttgctttttcttgatggaaatgatgacatgaatgcgcagtgtcaaatctacaattgaaaggtacaaaaaggcat

SEQ ID NO: 6760 - DNA, 1767 bp, Populus trichocarpa
  Intron number 9 from transcript POPTR_0002s25090.1 (locus POPTR_0002s25090) derived from phytozome v7.0 (chr-ID scaf fold_2; pos 22295736 to 22297502)
aagtcatataggtttcgatttcaaaggtaccatattgttgtccgctgaagattacttggtgtatttgaaaaacttaaactgcaatttcagctggtgtgattttttcacctggattgatagtatcaatcatatcagctggcttgcgcatgttccattccctcacatatgcaaccatcattatgcctagatttatagttgtacttgtatgctttatcagtttcagctttaatttcacatgatgcagctgcagttctaatttagttgcaactttctgctataggaaattctgcagatgttttactcttctttgaatgctcttctctttctcatttttttcccctttacctctctcttctttctttggacaactaaaatggaatgcaaagaactcttcacatagcatcagattcaaggctaaaagttgtccagcattatcataacttgtgagcaggtgtcatttgggagaaaaattagttgtgaagctgaaaaatacaagaatttttaccaacagaaatgtaatgcaaggttatcaatcgaaccaggttcattgccaatcaggaggagaagttcagtgatttcctacctcctctctagttacgtgtcatgtttgggatattagaaataaactggagtttgagagttttgttaatccagtaatattgtctcttgtttctgaaatgggacttcccattgattagaatccaactcttttgaagatgaaaggaagcatgctccatatcactttttgtggttaatagctcattgatgttgtgaacaagcaaatattcaagccccaatctgttggcaagttatgctacctggaattttgaattcaatttaattccaacactggaattttcactcagtaacaaatggtaggggtgtcaacataggggtagggctttgtcattcttttccaaaaaaaggaggtttcaggttgttgctcatatatctaaatgattgcttgtagatgtatttaatgctcatctttttcataggcactcttccttttgtctccttctacatcaatagtttggtggcatggtagaaatgtagtggtcatgtcctcaccttccctctagaaatcagtaatccaattgtaggggaagtttgtaaccagctgtgttttggggttatgttttattttgtttagggacttggtagttgagaacagttctgtaagtagaaagattaaagaaaaacagaattaaacctactagcctcacactagtagattcaaggaatttccttacctaagcttctcacctagggtttaaggattcactccttaatgaaagcatcactctcaaagcaaaaggccacactttattaataataattcactgatgctcaaattaaaacgttataagcatatttataggtttgagttattcgtattcctacttggcatggatttgtaaataagaatcataactatttctatttgaccaattaagagaaacctgaataagaaattaattttcccaagtaaaaggtgctcaacatttcttaaattgctagcaaatatttgtcttcgcagaatttttttccaaaattacaaatctgccattgcctaaattactaggccacatcattcttggaacaggaaaacatggtttctagatggttggattgtaaagcagctagattgctcatacatctgcattatgttttggaatttggaaattcttctcttacatgcaagtttctttttgttaaaattggcatgagatgcatattttctcccatttattgtgtgcagaatct

SEQ ID NO: 6761 - DNA, 887 bp, Populus trichocarpa
  Intron number 4 from transcript POPTR_0018s10670.1 (locus POPTR_0018s10670) derived from phytozome v7.0 (chr-ID scaf fold_18; pos 11553948 to 11554834 reverse strand)
ttgtattgcttgtggtggggtttacagcagctaaggtatacttttgcacacaccatacattcagaattttgtatctcaatttggtttcaatttcattgcatgattgaatctctctattgcaagatcttcttccaaatattatatggcctcaattatgatactagaatagaatattcagtttattattatttaattatatggaagaaatgatatagatatcccaatgctaatttgcattaacatgtacaattgtcagacatcggtgtattgatgtggactatctttgaaaaaggttacttttttccgacatctatttgatatatgaagaattttgagagaagtctttctcttttcttcatattactagcagtatgtttgtacaataaatagggaagagaagctaacctactaaccctcaaaacaagaaataaatactagataggaaagtatcctacactaaactagaaagcaataatctagagaatctggatagttaataccagattctctttcctaaaccatatatactaagatttctctaagatcctaactgattttgagactgatttccacactccccctcaagctgggttgtatatgttatacatgcccagcttgtgactcaattcttcaaaattagttcttggtagagctttggtgaggatgtctgcaatctgagatcttgttggagtgtaggtaaggtgaacaatgttcttctcaatcttttctgtgatgaagtgtcgatctatttcaatgtgcctgtcctgtcatgatgaactggattctttgctatgcttatggctgcttgttatcacaatgcatttggataggtgtcaatgattccaagccaagttatttaagtaatctgtgtatccacatcccttcac

SEQ ID NO: 6762 - DNA, 1504 bp, Populus trichocarpa
  Intron number 7 from transcript POPTR_0015s12710.1 (locus POPTR_0015s12710) derived from phytozome v7.0 (chr-ID scaf fold_15; pos 12942775 to 12944278)
aaggattcacctgtctactggaatcaataaatgtaataaattggatctggttgactagctctccttgaaaaactcaggattttctccagtaattacaaaaattttctatcacttctgattcccttggggaatcaaagtattgtaaccttctgacactcttgcattgaagcgtgatatttcaattttcaatgtgtacttaactttaaagttgccgtgtcttagactttgatatttcataaaagcttcaactgacccttcataacatttgtaatctctgttgacatgaatagaggacatgccaaaatacactgttcttatctttgctatcaaaggcaacaatgacatgccagccagaaccctacttcccagactactgtcttttcttttcttctttaagttataatattgaatttaactgcttgtctttatcagcttagtattcttatgtgcctaatatctttgcgtgtgcataaccacccatggacttatttagcttgtgttgattcaaagatctatgatgcctacaccaaaatatttctctcttcaatttgcctcaccttccctattatatcttaagcaccttcattcatggatcatgtttgaatggtccaaaaaatgagggtttcattgatgttttacatctctataactggatgtgaatatatggctttgagtattgtgattgtagagttcaatatgctattgcttttgcacaatggaaggatggttttgtctatccaattgttcattatactgttgcctttgcccacagggagatggttcattaattgtctgtgcaatctaggttaataatttagctgcatgtcacactttgattgtcaagatgtatatggagccatctcatttcaaagatgaaggtaagcgtctgggagagtttcagaaagatttttttttttggatgttccaatttaggattaactgaaactcgaaaggtacaaggttttgtttttaccatgaggcttatggtttttgggggttattccaaaaaaaacaaggcaccactggttttgttctttgtgatagacggagaagtttttgcttcttttattttttatctcaaagaataaagaaagttaaactgatcatggagggagtgtctggtcatttttcttaactgttgttgaagatgacaatgagttaaaacaggatggatagctgctgtttcccattttggctgatggaggagggcatgatatgatagtgatcagtctatggatgcggttgaataagagtaaggtagagagatgagctattcatccactgatccatgcgcattgtttgtcccagggcgattgttccaatctctttgttatagcgtgaatatttgattggtagtttgattcctgtttggaagcttagttgtttgctgacaatatttgtaagcttagatctgaagtcttatcattataaatctgggtggttatttattgttattttcccttgtgcagtacaagttcaaggacaggttgcagtctctgttgga

SEQ ID NO: 6763 - DNA, 1305 bp, Populus trichocarpa
  Intron number 1 from transcript POPTR_0010s08920.1 (locus POPTR_0010s08920) derived from phytozome v7.0 (chr-ID scaf fold_10; pos 9722648 to 9723952 reverse strand)
cttgtgaggagctcaagatattgcagaaggtaagatctttttcactaattactgtatatactccagccttcactgtttgtttggtttccaatgaaatagtaggatcagggacacagttgcatgaacctcagttgtttccatacttttacagttcacaaggattcagcctatatagcacaattaaagatgagttagaatttatatttcacaagtttgcaattcatgctagcgattcaagttccagcagagcagagttctggcccttccctagcatgataaacttctggtcttgacctaaactcccaagtagcaaaatagatggtgatgatgtccatgatctcatccgtttgatttgtgtagccatggatatgttgtgcaataggaaattgtagcataaacctaaatgcaggggctgtaatgagaaatatagaaaaatgtgggattaaaaatcgaaacatccaaataaaataacgacaccggtgtatgactttcattaaattttgcaactgtctaattttatattggttaggtgaagtgacgtttgtatttagcaggtttaaggtttaaaatggggtggcatttgaatttgttttcagctgtttaataattggagtagatgtcttaatccatggtcaagttttcaatatgttctcatgttcttaattatatttattatatcttgtataatatttaatttctcaatatgttttttatgaagtttttgacataattatatttttcgctcttagaatatccctgaggtctacaaaaatataatattgatttaaaaaataataatatccttattctttaaaattttaatgattaagtaattttaaactttctatttcttaaaatatttttagcaattagtagagatttttttattatattaatcttatacaactcaaatacaatgtttttataatgttgtgaacttaaacagctccagactgttaattgtccaaaagcaagaacttggatataggattggccccatctcatggccatgaaacaatttccttgccaataataaaaaagatgttgattagttgaatgcaacaatcctgaccatgttcaagcttgaaatgacgaggaaggatgataagcattaggtgaagtttatttcagagagatctagactgaaatgcttaatatagcgcagtgatataattgccaagtatctaccaaattaaagtttatttattttttgtaattgatgggatcttttctcttcctgtgaaaatacattttcatattgctacgtgaaaaaaactcactgtttactttgtttgaaggtaaacc

SEQ ID NO: 6764 - DNA, 1827 bp, Populus trichocarpa
  Intron number 2 from transcript POPTR_0010s13040.1 (locus POPTR_0010s13040) derived from phytozome v7.0 (chr-ID scaf fold_10; pos 12939400 to 12941226 reverse strand)
actacttgtgccatcatcttcttcatcttttcctggtaaaagaaagtttccattttctcccttcccatctcttcaaattcgctgtctatcatcattttttcttcaattatttagaatcattaattttaacggtctagatcagtcctttattcacatatacttaattgattaattgggtcccatttcaaaatttactctcccaccgacaaaggagttaaaagtttctcgaatatttgcactctgtcgtttgaactattaagtggcaacatgtgaactaagcaacaaaattaggaaatatgctaatctgaataaagagtgtgtgttgaattacattagtactttgcaattcataataatttatgtggttatatttggtagtgattaatctgcagttaattaaatccttgggctatagtgcctccattttcaactttcggcttttaggtttcaatctaggcacagtaggctttggcatttgtcttttcgggagttggtaactgacccactgtcttgactttttggattttaaaagtattttttaaaaaaaataatttttttttatttttttttattttaaattaatatttttttagtattttcagatcattttgatgcgctgatatcaaaaatgatttttaaaaaaataaaaaaacatcattttgatacattttcaagagaaaaacactttgaaaaacaaccgtaatcacactcgggaacacctttttgtgagaactctatgaataagtgctcccctttacggtgattttcaattgaataatactattttcgaagaaaattgtgattttttttaaattaacatgctctttttataagtttttttgacaaaataacaaaatttaaaaaataattggcgaaatagcatagtttatacctattgggaactgcaacattcaaatttgttcgttattcaaaaacatgacatttcaaagaaattgtgaaatgagttacataaattatgatgaggagagagaaaataaaaaaataaatatcaaaggcatatcaaagtttcgattagaaaaccacatgtaccattgagatgatcccgatgagacgaatctaatgacactaaggaaggtcaccaacagttattgaattgtgctacacttgctccacaaagatggcgggtggctcatttgattttggtgaaagtgtagcctactccattcattgttggtgatctttttggtattgttggattcgtcttgtcgtgatttttatgatggtactagtgatattataatctgagtttcaatacgcctctagggcttctatttgttttctctctcctctctcattgtaatttctaaagagaggagagagggaaaaaaaagaaaaagagacaaatttgaatgttgcttttttaagtccatatacaaaaagtgttatttcaccacttcttttttaaactatgttattttgttagttttctttaaaaacaatgctaataagcaaaaatacccgaaaattataaagcaatagattgttggaacccaccgataatctccacatggatcacgtgattggatgtctatcaaattttcttgtagtctatgcttgttactttttcttgtgaaatagcattactcttaatttctctacctgaatgctaatgagcttggtagttggtaggatattttagatgttttaggttttaggatattttatgtatatgcctgctaatgatatggctgctgtcctccaaaatggcatgccttatttggcttattttgttagttatttggatttataataggtgagaaatcttaactactaaatcttcaggttaagctttttaggagctgaggc

SEQ ID NO: 6765 - DNA, 1138 bp, Populus trichocarpa
  Intron number 1 from transcript POPTR_0007s02450.1 (locus POPTR_0007s02450) derived from phytozome v7.0 (chr-ID scaf fold_7; pos 1453837 to 1454974)
ttgggattgacggtgtcaaggtggacgttattcatgtaagtttctaataacccagccaccgcatccatacatccttttttttagattaaatgggaggacaacttggttaccttgcaggttatttattcatttacttttattaaaattacattattttcatttttctacaaaaataaaattttataaaaataactattctgtcaatttttttttatctataaaatccagtcaaaaaatagaaatttccaagaacagagattttggattcgagccaaaatacttgataatttaactcctgatttttgggtaacgtcgtaataaagttcgttttgtgtcacatcgaaagcgctagctagctagctagttgtgtgttagaagagttatgcttttctaatcgtgcgggaccaaatctcacctgtgtgttttcttttttctaatccttttatccggaaaattactattgaaaatttcaggatattgaagatttaaattattattaattttaaaatttataaaattaattaaaatataaataaattcaccccagttaacccaaattagtcttaaaaaaaaaaaattggcttcggctgctttgactttttttgtcggcaccttagtgcaataattctgttggtgtttgttattgtattagctaatagtaattaattatttttatttaaaaatatattaaaatagtatattttttatttttaaaaaatttattttttatattaacatattaaaaaaattaattaaaaaaacacggtatagttatgaaaacaaatagggtgttattgtaccatgttagtgtttttatttttttcaaaaatacctaggttttttttctcaacaagacaagaaagtgactgtgcagccctagaactttacagaaatatcatgtacattcatgattcatttaacatgtttttgataagataatgatttgttaaagtagtgtttatcagcgtggttaaaatattgaaaattaattttttttgttatttttatattattttgatgtattaatattaaaaataaatttgaaaaataaatagaatattattttaatatattttctaccccacacgtccataataatttttaattaatattctgctatgcatgcgcactgcagttg

SEQ ID NO: 6766 - DNA, 520 bp, Populus trichocarpa
  Intron number 4 from transcript POPTR_0016s13520.1 (locus POPTR_0016s13520) derived from phytozome v7.0 (chr-ID scaf fold_16; pos 12699797 to 12700316)
cacgtaagttttccaatccttctttacaaatcccgaataaatattgcatttggtagaatatttagatgctcaacaccttcagtccactttgatgaggataagaagtctttctagtgacatggtgatactggctgtttaaatgttcatttgtgacatttcttttgtagatgctcccaaaaaactcctttatatctctctctcacacagcatgcccatgattcaccctcctcccacagcacgcacatgggtgttagcttgtttacatatatgtgcatgcatgtatgaatgtattacacacaaatcattagctttgggattggctccttttattttttttttctcctatatcacactatgtttcactttatattttttttggtttattttttaaaccaattatatatatttgaatgctatgacttgctcagattttttttaatcacaagtgtggttgcctataatgcaagtgttgcttgattttgcagtttctgggctctctacttgataactgtgatctaat

SEQ ID NO: 6767 - DNA, 3096 bp, Populus trichocarpa
  Intron number 2 from transcript POPTR_0011s07660.1 (locus POPTR_0011s07660) derived from phytozome v7.0 (chr-ID scaf fold_11; pos 8501012 to 8504107)
agcagaaccttcactctatcatctcatttttcaaggtatatacgttgctcacaatcttgtcagggttctattttgattgttaaataagaagagaaaatccaaaatgtttttcttttcatagattagcatgttcatcctggaatcttccatatggcatgcgtagtccactcatcccactgaaaggccggaattaaggcatgtttgtttaatgaaaaataatttcttaaaagctactttctaattttttttattttttaattattaaaaaataattaaaaaaaactggtttttagaaaaacagttttcaaaactttctaagtgttataagaaattaaaaaatattttattatttattaattatatcaaatataatcttttatcttttaaatataatatatattttattttgattttttttaatttggttttttagatataatgcaattagatttatatattaacttatatttttttattgattttttagttgatttttttatccagattataattttttttattaatattatttaaaataatttataaaatatatatttttttatttgtcaaatttaatttttattttataataaacttgaaaaaatattattaattttttttacattttttttcattacagaattaaatatttaacactagaaaatgttctacagtatattttctaatgacattaataaaaattaaaaaataatttgtttttttagaatttatttcttataaaaactatttatgatagactaaattaatctttcatctattgaatgttattcttacaatgattaactaataataataataaactagcatagtacaggtatacgcacgaacaatgctgaatatgagtgattattttttgattttgtttggtttttataaaataaataatcaaattgaatattgttttaaaaaatcaaaattggttcaaactgattggttttgattctgtttaattttttaggacaaaaaccagttcaaactggtttggctcggttttttcagtttggttcggtttgtgttcggtttggtttatttttttgattttaggcttataaaattaaaaccaaacagaaccagttggtttttataaaattttaattgttttaattagtttttttcactatttaatttttttaattatttttttttaattttctcgattttctcaccttaattctggatcagaaatctcttaacgtggaaacaaaagatgagaaaatcatattgggaaaaatgggaccgatagtgacgtcataataatgaccgtacatcaagttgataaaaaagaataaaatggggttttgaagttgggccaaggaaaatatcaattaaagagaaggatctgcttatggtgggtgagtcccagttgtcgctgttattgttggccattgggctattattattactacccattttatatatatatatatatatatttcctataaaaaaaaatctcactgcgtgacatgatatatataatataatatatattttttaaattatttatttttatttttagattatttagatgtatttatatcaaaaataaaatttaaaattataaaaaatactattttaatatatttttaaataaaaaatgttttaaaaatatagtatttagttaatttcaaaagttgatgggatttttgttatcgcaagttttgttgggctttttttgtttcttggaatttttgaatagggatctgtactgctcatcttattgataaccacgttgagtgaatattttctcttttagtggaaatatccattttttctaatataatgtaatattaaaaaatataatgtaataacaaaaaaataaagaagaaataacttagataacaaacatatattatttataaaaaaaatatcgacttgtaattgttcttgttttctataaagccaaactatctcaaacatataattaaccataaaagggtaaatttctcattcattattttattaatagtgaaattttcattaattataatgttttttgttggcatttcctaaactaatattaaatatccaataaagcacaatattcttaactaaattctcacttttctaattcaaattatctttttttcatatttatatatatattcaagtaatgatttatcaattaataccatatttttaacatgtattacataatttaacaaaagttaatgaaagaaaaaaaaaagcataacgaagcagataatgaaaggatagagaatccgtgatttatatatatatatatatagtagcaaaatccatatataaaataagagtataaggataaaatatgctattttatccttatactcttatttaatacattaaggtatttttccttaatgttttgctttgctcttttttttaatctgtgctaaatagaagaaatcataccctttgaatttgtaattttatgccttttcctttggcccgttgtttaggccaaaagagagtctaatgattttgtcatggatgaatccgagttaacacactaagagggctagaatgtagctttttattttcagaggaccattttgttaaattatcctataaaaatgtgcaagtttagaggtgatcatggaacttcaaaaaacttggggggtagaggtcacccctggtcgtctcgaacgtttttgcatatgcacaagtgtcttaaaagctggcactttgtgtggtatctagcactggaacatggaggacctaccatttgatgttcttaaacttgttcttgcatatggatcccttgatgtgatcaccaaataacatatatattaggttttatttttgaaggatttgttttttccttgaaagttgtcaaacacttgcatggtgagtgcgttttttccttgaaagttgccaaacactcgcatgataaatcaaccttaatttttgaaagaacctgttagatgatcaatgattgctttgctatagaatcagtgtttatataatctagtaggttgcagccatcccgtcaacatctccgtttgcattataagttctttgaagtagaagctaacatctttatatttatgctgaatatcagaagcggtggccagagattgtcattctcctcattac

SEQ ID NO: 6768 - DNA, 850 bp, Populus trichocarpa
  Intron number 1 from transcript POPTR_0005s24350.1 (locus POPTR_0005s24350) derived from phytozome v7.0 (chr-ID scaf fold_5; pos 22930584 to 22931433)
tttgcctctgttttcatactctctgcttaccaagagtaactctcttttcctttccatttttgtacaatcttgataaacttctgctctactcctctcatcatcatcatcaattcgatttggatctgtttagccttaggttttaaatctaacactaaacagatagatctgcactttcattacctcttaaacttcttttgtaattttagtagtttgcagctaactaagaaacttaatttgaattactaatgagttgaagcatttatatgtaacttatttgaattaataacttttttttttgtttactaaatatgtactattagtgaaggaaaaagttatgtggtctttggatttattagtaaatgcatcgaaaaataaaatcactgctgaaatcatgaccagaatagaattgaggttttgggtcgatgctaattagtttatgcatttgccctgtctttttatttttcttgtgcgggtcaacattttgtgctagcccacttacttttttggagacacggcataagttggatattgacaagatttgttatttggcttggcattagttttctgttaagaattttattcttttcttttatgatgcaagattgagaaatttaattacagttttcttggatatattgatttgaagaaccagcattaagcttttgattccttgaatgtggcattgtatcttccttttgtttgggaaaaaaatttataacaaagcatttgatgctgttgaagcagttactatcttttgtttgtgaaattatgggttcctcattttcttgtttttggtaaaaggattcttcggatgatatgtttttataatctttccttgatttcaggttca

SEQ ID NO: 6769 - DNA, 1306 bp, Populus trichocarpa
  Intron number 4 from transcript POPTR_0019s10120.1 (locus POPTR_0019s10120) derived from phytozome v7.0 (chr-ID scaf fold_19; pos 11707832 to 11709137 reverse strand)
aggtatgtaaggccctttgttttcatggaagttttaactatgaaatttccaaccttattttgaacatctctgtggccccatctgtttttctgtcttctacatcttaatcatttattttaaaaaaggagatcatatttgaatttcttcccagatcagtttggaaaagagcatcaataattgacaggaaaattttagcaaacatgttgccttcaaggtagacaagaaaggacttcgattacagagctgcttgttcatctctccctgtttggttatggtagcatatacatgggcacaactgtaaagagttatatgtttatgataggtgatgatatgctctggattccaatttaaattcagggctttacaggatcgggcatttgattttgtagataatgctcctatcttcatggtgcttagtttggacgggttaatgataggttctgttgtaggctgattggaaacaagtgtacagaataattatgcagcctaccccagtgagaatgagttcccatgccagaggttgtgaaagttcaggagttcaaattaagtttgtttctttcaagtggatgatggagttttctcatatttactgaaatattgatatgatggtgaagaggatgaagtttatatcaaatgatgtttcatgcttgtaaaggccatgaaatctgtggaccaccttcttttacataattctattgctgctgagttatgatgcctgattttgtcttcctttgtgcactagggatagccagaggtagttgagttgatgagttggtaatattaatgatagaggttaacatgttttcttggagaatggtctgatcttgtttgattggagcttgtgggataggagaaacggtcaggtgtttgagggagtggggcaatctactgatagatgaagtttgatcatagagaaaaatatcctttggcattatgggtggttatttggattttaatctgttgctgtgtgccacccgacaccgtttgcatcatggcttgtattttttttacgtgttgtcacatggatttgcttgcattttaaaattttacatttactgccacattgatttatgtgtaagaactaatggtgtaaaaggaattcagttccagtcaatccatctttgctgagacttgtgctgttaacatgcatttgagtatgtatgaatgattttctgttgcacttttttcttgcgcttggtatgatattcaacaatttttggagattttttcctgttaacattttctaaaactggcctgatgtcaatatgcaggtagatctggtgaagagacattgttttcctgttta

SEQ ID NO: 6770 - DNA, 328 bp, Populus trichocarpa
  Intron number 3 from transcript POPTR_0006s13360.1 (locus POPTR_0006s13360) derived from phytozome v7.0 (chr-ID scaf fold_6; pos 10570302 to 10570629)
ctgaaaggaaatcaccacgaagtccagcaactgaggtactcagctacaactagttaatggttatacagaattacccgtgagagtacttttacagttggccatgtcactgttacaaatacctgtccacaccatttgagtgtttttagccatataattctttaattgtcaaccttctctgttgatttttttttttgagaaagaaaccttttgtattaataatattttcacaaattactgttgttgatactgttgtttactcactttgctatcctctctctgtcttgcgagcccagaagaagcgcccaagcaaaatatcagaattggaatc

SEQ ID NO: 6771 - DNA, 315 bp, Populus trichocarpa
  Intron number 2 from transcript POPTR_0003s17070.1 (locus POPTR_0003s17070) derived from phytozome v7.0 (chr-ID scaf fold_3; pos 16547454 to 16547768 reverse strand)
aggtagagttttttgaccttcaacttaggagaatatattttcgtagcttaaggcaatctcttaaagaagaaaccacaacaatacgataaagcttatgaaaagagcagcaaatgtagaaacttatctgcattcattcagattagagagcttaatgaagaagatgctgttgctcttcatgcttctttaggttacattcaaagatgtatacatcgacctgcttgctattattacattctaactcttattcacatctacttcttcaatcataatttcctgataggcaacaacacagctgcgaagcttatctggcgtgca

SEQ ID NO: 6772 - DNA, 1266 bp, Populus trichocarpa
  Intron number 4 from transcript POPTR_0006s23090.1 (locus POPTR_0006s23090) derived from phytozome v7.0 (chr-ID scaf fold_6; pos 21941398 to 21942663 reverse strand)
agaagaagattgcatttaagtatctctctgagaaggtgagcaatattatatttcttcttgtttcatgactgcctttctttacttttactcttttcagaaatataccttgttattttattctataatggtttttgtataggattgaagggttggcttgaatgatcctgcaatgaattttgaaataaaataaaatggtttgttcatatttgcactaaaccaccttggcctgctaacaaataattcacacttgtgtttgaatttgtctggctatcatttcactatctagagtcagtttttcctaccggtaaactacaaattataaagcaataaccacatggagagcaaattcagtaatgaaattcactttaaatttgcctcccttgcactgaactattcttttggtgcttgattttagcaatcaaatgttttgccacctgggacgtatacatattaggtggccttgttttcattgtggttagttcctagtttttatgctctttgatctaaatattggttgaggtcctataaattcccaattatttattaattatcaaacaagagcttgcttgtccaatttgcctatatgcggcagagcaatgcattttctgtcactcaacagtttatgtaatgctcttttctttgagtcattatagatgcaaaaatcaagcaatatagaaaccatctaccaccccaacctttaatccaggaagtggacccaaatggtgaggttcctttgtggtgtaaaaaaataataaacaaataaacagtgataaaaaattgagagagagagggtctaaactctacagaggcaacttcagtggaaagaaagaagggaagatgtgattttgtcattgtaataactaactgtactacttttgttcagtaggatgtgccattatgagttttgtagagaagtcattttccacacaccagtgaagctcttctggccagtctctaaccctcaaatcatttaaacccatcaaatacattgacatagaaataaaacttgacaggatatttgcgccttgcaattaagagctgtgaatttgatgttctattagtgagaaataaacgctatttattgataaatttgttatgtgagattctgtgttactttaaatttcatgctcttggatgtacatgaattttcctgtgacaagcgtgttactgaagtgaccataattaccattcgattccgaggttaaatcattggcttgtgatggtatttcaggcagctgacaaggaggaagcaagtagtggctgcat

SEQ ID NO: 6773 - DNA, 969 bp, Populus trichocarpa
  Intron number 20 from transcript POPTR_0014s08590.1 (locus POPTR_0014s08590) derived from phytozome v7.0 (chr-ID sca ffold_14; pos 6387656 to 6388624)
cctgcacaaggtaaattcagctcgatatacttgggacttgcgttttgaactaaaagcatgtttgttgggtttctgagaaataagtgatacgaagtcaatccattttattttttggattcttagaaatttattcatttgtgttttcttgtcgcacttggtgagtgggggtttctctttgacaacacaaagtgcctactagtttaattccccaaggtcccaagcctcaaaccaagttcagtcatacacctactaatagtatgaatctatgagtgtttgtttttgaggtagtttttgtagttttggttttaaaaaaataagttttaaaaaaatgtggttaagtgtggttagttggatttagatacgtgtttggtaaaaattatggttgaggtttatgtgtagcaaaaaacatatataaaatgtttggtagttgtgtttggaagtgtggttgcgattgcttttcaaagtgttttttacttggaaatgcatcaaaatattttttttattttttaaaaattatttttgatataagcgcatcaaaatgatctgaaaacacaaaaaaaatattaatttgaagtaaaaaaaaataaacaattttaaattttttcaaaagcgcttttgaaacacaaaaataaacagggttttacaaaactcagttaaaaaaacatgtaaaaactgcttcacaaaaactgcgtttcaaactcaattttttagtaggccccgcagtacaaaacagagtttggtttgttacaaaacactttgctgcgtttgttgcaccgctaacgcaaaagcagttgcaaaacaaacgcagcctatgacaatcgaatcaattcatttcttttctgtcatgtttctgcttcaaatagcatatctctaatcaaaagaatacattatttcagtcattattaatagtagctgctttatttctcttgaccagggttgtggcatatcttgcacgtgtgctcgaggctg

SEQ ID NO: 6774 - DNA, 997 bp, Populus trichocarpa
  Intron number 1 from transcript POPTR_0008s01610.1 (locus POPTR_0008s01610) derived from phytozome v7.0 (chr-ID scaf fold_8; pos 785676 to 786672 reverse strand)
tcacaatcaattgcctactcatattttcagtgaaggtgagtgaatactgtgtgtttcttgatgttattgtgtttgatggatgtttaattaagagagtgaaagtaatgtttgttagaagttaagggctttttggattgttgaaggtagtgaatttgatttgaacattgaaggaaagtgtgaactttctttgacgatataggaattaacgttaagcttttggagttatcagaacaatggtggaaggacaatgaggaattgggtgttaatgttaagaattggtaggtggaattgatggaagtgaaagttgtttttcataacctagtttacctcgagtcacaattcaaaagttgtttttcataaataatgtgacaaaaacaagttcagaaatatgtccggtaaaaatgattcaaaacgaatttttcggggaagagatatagtttaagtagaatccgagttaaaagttgaaaattttaacttttgattaaatcaaaatcttgactcacttttgtaacaaattttttatttcagtcagaagttgtctaatcaaatatatttataacatttctacaagtaaaaagtttaaaaaacaactcaaatcaatgcacaaaagtcataccaaacagaaccgtagttcatttgaagtaggagatatcttgacccttttgagcgtagtatagaatacagatgatcaaagaaagctatgaacttatttacaatgtagagctgtgagctgcgttgatgtgttaggattgaattatagtcaagatgcaattgggcactaaagtttaaaggtaaagaatcagaaagtggagattgatatttgtatgtaatttggatgctacgtgtgtgaacaagctttaggatgcatgcttgataaccaagaaaattgtggcttttctgggagaaaaaaaagctatgaacaagttttatgaatgtttgttcatatttgtttcattttgcaggtcaagtgggttctggggcaagatcttactaccat

SEQ ID NO: 6775 - DNA, 1636 bp, Populus trichocarpa
  Intron number 2 from transcript POPTR_0015s06720.1 (locus POPTR_0015s06720) derived from phytozome v7.0 (chr-ID scaf fold_15; pos 7713870 to 7715505)
gtactcaggtacaaaaagagttatataattatgtcattaatttttctacaagtagtgacatatcaacttcttcttttaggttaccatccaaacagaatctgcgaagcaaattgataaactccggcgcaaggaagaaaagcgaaatagacgtggaacagaacatggggttgagagtgatgtggcagttgcaagtttttcatctttacttcaagcaagtgagaggaaaaacccatttgacaatcttattgggtctggaccaggaccccattcattgtcggtgactgctcttccgcaaggtactgtcaggaaacattacaaggggtatgaggaagtcattattcccccaacaccaaccacagaaatgaaacctggagaaaagctggtaatttcttgtggtgtagattaatctctttcatgatatattgtgaagatattctgtgcattcttgcttctgttttccttgatagtgataactgtatgtcctgttggtgatattggaactaaaggtgtttttcacaaaagagaggaaagaaaaaagataacaatagaaagaaatacagttgattatcattgtctggcaaaataagatagttgaagtaattctctttgcttattattatgtctagaaacaaatgttgagatgattgttacaagttctgaacgatactttgtcatttagagcatttgttttttgtattgatgatgagaggaatcattccatttcttttctggcaagcttcatgttggcctcttaatttaggtccatttgatagctgtaagaaccaatttatgaataccccttccattctcaaactgtattgatactgaggaaaatgtatgagcttcaagctgccaagagaaattgtttgcatttcattttcccaattttcttgcaaaagtgatgctaagttttaatcattgatttgcaacaacagtgcttgcttcgattttaagaatatacacttgtttttcccaaggatagactgtttgaagaaaccaggcatcacttttcaaactcttagaagtttaactgttctgaactcctagatttctacactttaccagaggatggaaggtggtgatttgtcacatataagtaatcactgatgacatgacaactgaaacactctccagaagtgttgtcgccatgctttagatgttttctggattttggatgtttgcatttgataagaactcaggactacaatatggacgcattggaagaggctttatgcacttgcaggttggaaaactgggaccttctgcaagagagggcagttgtcaaggacttggaagctttttatggtagctaaatgaaatctgtgcaacttcttgtgtagaagattaatgataagtagtgtgttactctgggggttgcaggataaagttgtttagtgacaggacagtttgtgataatggtgtctctctttagggtgggtatggtgattcattgtggaacacttactgcttaattctcatttgcttgtgttgctctctgtatctctctctttctgtgcattgcttgttccaggaaggttgctgttactctagtagtatgctgctcattgatattgatttgtctctcacaatgtttctgtcatcttgataatttgttagattgagataaaggagttgg

SEQ ID NO: 6776 - DNA, 1963 bp, Populus trichocarpa
  Intron number 1 from transcript POPTR_0013s10630.1 (locus POPTR_0013s10630) derived from phytozome v7.0 (chr-ID scaf fold_13; pos 10983113 to 10985075 reverse strand)
gggttgtagagatacgtcaggtaatcatttgcgtgcacgtgttgtcaaatttagtggagatataaagcattaaatgcacctgaaaagtagcaacctagacatcttttctggtaaaacagggaagataataaacagtaccagacgatgtggcgtccgattactttttttatgcaaaacagcgtcgttttgggcttgaataaaagattttggtcaaagttcaatttagtcctttatcatttgatttatgttaattgcacccctaattgaccataaacttttgattaaaggcaatttagcccctgccgaacttcaattttatccccggattttgttgccttttcttttctgtccttagtctcggatttcttcaatttaacccctaaatgaccattaaactttcaattaggtccctatagtttgatatcttttgtagattagtccttggctgtgaatttctttattttaacccctaatggaccccaaaactttgattttcttataattttgttcctgatttcaatcaattaatttgaaaaaaattaaatttagtgtcttaaaattcaaatattctcaattaagcctaatttgggctgtcaaacttaagttttcaccaattaagccccttataaaattaatttgacctatttaaaatataattaaatctttgcatctaattaaatccttcaattggacccaaattaattcttaaacataattaaaatttaatttgacccatgattaaatcaagtctataaaaaatttaattatattcttggacttaattttttatgcagattcatccaataatattttaatttgacattgaatttgctttgtttctctttttttgggtataatggggtaaaagtaggtctcaaattccctttaaaattacagcttgatttttatgtatttttgaaatccttcctagcttgctttcttcacgttgctgacctttattttatttttttatttttattttgaaaataagtgaatttgaggaataactcataaatgagttatgacattgaccaaaggaatttcagaaaaaagtcaataggattttgacccatatttttatcctcctttgcatgatttcttcacgttgccagtctttattttattttttttatttttattttgaaaataagtgaatttgcagaataacccagaaatgagttatgacattgaccaaaagaatttcagaaaaaaaagtcagcaggattttgactcatattgtatcctggttttttactaggctaggtctggtcaaactttcttttatttttttcttaaactcagatcaatttagacccaatgtcaactaggatcgggtcgacctatcgagtcagatcaagttttataactaggattattataatattattaattttaactcttaatataaattaaagtaacaaaaataacatctaattagtcttttaaatatataagtctgataataattcatattaaaggtaatatatatatatatatatatatatatcttgtttaccataatcaaatgggatatatagacaatcattttgtattgtataccactaccaaatataattatgtttgtgtcttcttctctatcttgtttcctatgtcaactacctaaaaatatgtattttcaaagtactaaattattgtattttgtcaaatattgtttaaaactaaaacataatgaatgtgtagtaacaccattcaattattatatcttgtaaatcactaaccgaacataattttatttttatttttttctgtcttgttttttttattcttattatcttcatatttattgtattcggtcaataacaagacactatcttattttgtcaaatattattatttaaaactaaatcatattgaatgtatagtaccaccatttaatgtttgttctttctctcctgtcctgattgcagatttcagttaatctaaaaattatcaatctcagcaa

SEQ ID NO: 6777 - DNA, 3235 bp, Populus trichocarpa
  Intron number 3 from transcript POPTR_0003s11000.1 (locus POPTR_0003s11000) derived from phytozome v7.0 (chr-ID scaf fold_3; pos 11842590 to 11845824 reverse strand)
aagctgagcttctgcaaagtctgaaacttgctaaggtgtttttccactctcaactttattacaatgttaaagggtgtctatactcttactgatttactaactttaaacatttcatttatatgttatcagggtccagcaagcaatcaacaactcgatgtctcttcatctggattcaaatgtgccttgccaatgccattgcttggagaggacacgtgggactataatcgccatcgctggtccaaaaagatatctaatctttgtgcttatgagtggtatgtgtcttttctcaatgccatgtatattagttatgtgttatattggtaaaagtttcttttccagcagtgaaaatgacattacaatttagaccatgctatgaagcataaatattgaacccttcaactagctccttttttactccttttgaaatggattttgctatattcctatccaaaagaaaagaaaagaaaagaaaagaaaaggaaagaaaagaaaaggaaaaagggaaaaaaaatggcccttgaagctatttaaaatgcttgtgaaagcacatgcatcttgcttatatctatttgcttgttttacttataaacctgccattgtagttggaaatgtcagaggcctggacaccttccggaagactgtttggtgacaacatctaatcaggtttgcttttgtttttcttttgatattaacaaagagtatgcacccgtgtgctatgatttacctattattaacaatgtattagattaacttatcaaagttaccttgcatgaaggtggcagtggggaataagaactctgattccatatccagagatcttcttggactttatggaaggtttgtaaaatacattttcatgttcttagctcattgtattactctatttccattgtagcattatttgttaaaagtgttgccattatataagggtaaattggtaagttggcattaggaacagttttaagtacacttatcatgcaagtacgtaagaaaaatccactacctttgtgttgaagggtattctggttactcaattccctcataaaaaagcctgctgttttttcccaccgccctttctgttactgttaacactaggcaatatggactatatctgttcaatgtgtacactttacatggttagaattgaatggttataagttttcaaggaggtgttatattacactgaacaaaaaggaggaagccatgcttttcagctcatagtgggcactttcgtggggaatcgggaaaagtggcatttaccccgtatattgtatgttaagttatactatttaggattgatgtagattagctgatgggggtatttgagatttaggaatatgattaattcttgtgtatggttccaatcatctacttttctgaaataaaaatggattttctagctcattgcttaggaaattgcatggcggatttactgagcacattttgcattaaactgtaacatgtaaataattgttcattactattttctgtctattccaataacattctgaattttggttctgctgatcaccgagcctgaatttgagattcagttagctggaattagtagctatgatcagtttgatcaatgactttctgatgatttcttcatgtgaaatctatacgcgaacaaatggccaaggaagaaatatttatttatgttgttcttttttgtgtttgaggaattcatggctaactcccagtccctttctgcagatgtcatcagattggtaaaaaattgtctggagcaaactgcaatacctgccgcggttccttaagtttggcaacttgccttgattgcagtatgatcctctgtgacaagtaagcacaaagtatcttattgtttgaatgttataagatttaattcagagtgttgtgcattatccaatgatttctacgttacttgattcacagctctaatctttttctctcttgtttacactattgtatgactgaactcatatcatattattagattttttttctcccatccattctttgtatgtttaactcttgggttttcctcattttatctcttgcatttgcaaatcttctacaatctcttgcaaagtgtttatagctcaattactttggcttacatttagttgtgtcatgcattccttagtagtcgatgagtgaaaattgggaaaggtggttgcagtctttgaaatgaagtagaggagggtggtttgatgttgcttctttgtttgtgctgaatctaaagggcgagagctgaagtgcttggttgaaacatactccttaggagcactggtagcatggatgccatgctttatgatgcttggttgattctttgctttggttggcaaaataaatttgtttgattttacttactgagccttgcttatagatatgtgtatttcagtgcaggccatttacatgagcatataagggcacaaccatcccatcagcaatattactctcataaactcaagcgtttggtaatttattttcaacttttctgcataatttacagtttatggtctgtccaatttggcttgcctttcccaaataagtgagccatcaatgatttttctatgtgcaataaatgtgtgttcgacaagcgtatgcacggttgtgtagtgggaaaaaactgctgataatttgcttaacaatgccatttaactgatgcaggtcaaatgctgcaaatcaacatgcaaggtgactagcattagtgatcttttggtttgccaccactgttttgataaagccttcgacaagttctatgatatgtatactgcaacttggtatgtgtctgtattcggaactgtttcagattctttattatccatgttaacatcttctgggcctactttctttgagggctgaaaggttccaagttacttttcttggacatgtaagaagagaggattctctgaatatgaaagtaaaatttagatttgtgtttagtttttgtggcatggctgattttttgaaattgtccagggtcaaagtccgcattgttttatgttggtagattaaaccagtacttgtatttgctgattgcaggaaaggaactggactttccattatctctggctctatttgctgtgaagatcactttgaatggtgagtccagtcacattatctgatattaattttgttccaggtacgtctcatccacctgctgacatcactcgttgcttttattactgcaggcataggatgaattgcttgagtgcaggtgtagaggacagagcatatatcattgataaga

SEQ ID NO: 6778 - DNA, 2597 bp, Populus trichocarpa
  Intron number 1 from transcript POPTR_0001s37800.1 (locus POPTR_0001s37800) derived from phytozome v7.0 (chr-ID scaf fold_1; pos 36877214 to 36879810)
aagaacgaggtgtgcttttcggtttcattcttgaaatgggttgcttttattttttagtaaactgaagtgggttttgtttgttttaatgtgatttcttagctttcattctgatggtgggttgtttggttttgtgggatttttgaactggtttttgtcttcttgtttgcgttgtctctttggtcttcatgtgggttggtgtatttttagtggattgaagtgggttggcttgtgaattggttcagattatggctgacttgagcgtctctgattcggggctattttagttagcttcaacgtgatgtggttgatttagttttagtgaattgaacatacattgaagtgggatttttggtggtttgtggattgcttcgattattgaaagtgcgtgattttgtggtattgttacttcaaaatgataggtttggtttagattagtagattggagtgattctgcttcttgtggatttttcaatctatggctaatttgaaggtgaggtgtttattggtatttttgcttcaagttgatgcattaggttttaatttttagtgttgttgaattcgtttatgtttggggaccaaccacagctcatttaaattttgaggactgttttggtggtggatgtttggatgtctacgaattcttgtagggttgggtttgttttgagtgaactgaattgaggtcggtgaaggtagtaggtgctttagggatttggagatctgcaatttaagcttcactggactgaggttttaggcgtgggtttgtcagaatgccattagattgaaggtgtgttatttggtgtcattcttgcttcaggttgatgtggtcggttctagtgttaatgatttcagatgaggttatttgcagttagaggattgcctatgagtgaagagaaattttggtttgacttcaaatgaggaggatcgcccttattttaattttaggggatcaataaagtctcctttgagttgcttggtattttagaagtttggaggttttctttttatccatttactagattgatttgatgatgatttatgctgtgctttggcctcctattgatataatttcgtagtggttggtcgttctggtttttaattgacttgtgttctgggtggtttatggactggctgtgtttggtggtggtttggagtagtacatatgatcaattctatgaattttagtgtatggtggttcagtttttcaaagtgtacatttggtgtgccatcatgccttgtgcgttggttttgttattgaactaatgtaaggatacccattgcgggtgaagttgtaaatgggggctgtgagttgattttagtgctttggagacattgggggatgatcaatagtactttgggtacttccgtggaaagtcaatcatgatctggatggtgcatataactatgttatgatgccgttaactatgttagatagctctgtttgaagatcgatctatgttttcaaagttgcaaggtatggctttagaaggaaatgatgcttttggttcttgagttgcctccctggactatatacttaaaaacttggattgctagacacttatcataatgctttattctatcagtcgatctgtttctggccattttgctttatctctatatttttattgttgtcaaattgcaatcttgagaatctacctgttatttatatgatccagacggcttgttcatctggattgtagacaaattcacatggcttgttcatcatatcacacagctgtaattgtgaagtttctgagatatctaaacagtatcctcaggttcattggttttctaaattttatgctgtgctacatctataatttaggtagacctagactggaagacaaatggtttggtgctttgtattgtaaatcataaaggggttccatttttggctgtaggaacccttggctatatggatggttaacattcttgttctgcataggaaaagaaaatcatggaagttccattgatgagtggacatatatcattgatttagattgacatgactttttcactggcccttgctgtcaactgtcatatcatagtttgctgtataatgaattttttttttaatagcacaactagccaactagcaaaaataatttgcaaactagcactgctaagaaaaaaattggggaaatagcaaaattcaattggttgcactacttggttgcgctattgagagtagcacaaccaattaaaatttaataggccataaccaagatgcactactgagagtagcacaattcaatttcagcgcaacccattgaaaattttgaaatttcaaaggttgcgctattggaagtagtgcaacaacttgaggtgtgctattttccaaatttttttcaactgtgctactttgcaattttttttctcgtgtgctttttttttttaaaaaaaaaaacttcctagagagatgtaaaaacttgcatgtgggtgcacacttacatgtatgtccatgtatttgtttacacatgtttgcttaaagtgaacttctagccttgtgtcctttgcaaaagcaagttaaagaaatcaactgttaagcttcttactttccaaggttttcctgcttttgtcttgtagacccgcttaacaat

SEQ ID NO: 6779 - DNA, 985 bp, Populus trichocarpa
  Intron number 3 from transcript POPTR_0001s17020.1 (locus POPTR_0001s17020) derived from phytozome v7.0 (chr-ID scaf fold_1; pos 13852506 to 13853490)
gcccagttaaaaagactggaaggttttttttttgttactactgctactttgtagtttgtattatatttccattttcaaacttaaggtccaacaaaaaattgcatgtagccttaccagaggccatactctgtcataaatgggctaatgtttttgggtgtctctgttttcatacccttcttttgtcaaaagccttttttccttggttttctcgttttggttgtgttatcttctttatctgtccacataccctgagccaacccttttaaatctctttaaccacaaaccttctttctagactcatcaagttttcagaatcaactattatttctattacctgtaggaaaagattttgaacttaatttttgttctctaatagagtacattgttgcatggcctcttttacattcctttcttgtctagggaacttgttccctatgtcctcatttgattataatctgtatatgtttgtttatttagtttttcttgagagtctgttcccattaggttatacatgtttgtattcttgacatgctggtcacccggctttgttacttttgatctttaatatattcttacattttgataaaaaaaaaaagattcaagatgttttatccctttcagtttgttctgtgtcatcatcttgggtgatcatatcatttttcttccttgaatttaggtgatgtttaattttactttctgtctgtttcttattcttctctttgtatctgaatgaacttcatttgccagattttttaacttaattttgctctctaatagtgtacattgttgcatggcatttcaatcaagatctggtatccctttcagtttgttctgtgtcatcatctggctgatcaaatcattttttttaccttaatttttgttctgtttaatttttagtttttgtatgtttcttcttctcctcctatatgtgaatgaacaatatatgccaggttggtcacaacccgagaacaaaaaagttgatcca

SEQ ID NO: 6780 - DNA, 1071 bp, Populus trichocarpa
  Intron number 8 from transcript POPTR_0001s36130.1 (locus POPTR_0001s36130) derived from phytozome v7.0 (chr-ID scaf fold_1; pos 34625704 to 34626774 reverse strand)
cattgcaacgtattcataaacagtcacttattctggtattctatttctttgtctggtcatgagctcctttatttaattggtatttgtaaaaacagattccttctgcataccaagccaaggccttcattacttacatgctaatgattaactgctatatggcatatgattaaaagtgtgttggtgcaaaattgaggttatagatatctattaaaagtttgatattgcaaagttttgaggttgtagatatttgtgcaatacgaagtttgagtttactaggtgaaaacaagacatatttgatgtttgttctttgcaatcttgtgttgattttctttacaacatggacacaacctgattatcctgtgatttacttctactctacttatcaaggtgtttggtttactctacttatcaaggtgtttggttttgagcgtgttggaagagcatggaggtctggaaaagaatacaaaatgtcattcttgatgtcattatcatcagtgaatctcggattctggaaactttgctctggatggctcatttatgcaagccatttgtcattagatcttagttttgttttttttttttcatgatttttttaaaaaggaatgttctcttttttgtttgtagatcaaatacttttattatactgaactgtgtctttttgtgtgagaacttgccctctaatggcatactatttttgctttggaagcagatgtgcaaagtatattgttgagtatttcctctactctttttttagtattcctaatgtttgtccgctttgttttttccagatattatttgagaattcaaaaaatgctctttgataagaatgtcactataaagaaagaaagtagtttgttatggaaaatgattattaaaattaattcatcccattaaaatgtcttaatacaggagaaggataaaacaggtgtgacagtagtattaatgaattagagaagcccatgcttttcaatccaagaacttatcagttgttgattggattttgcttgtcaattgtcattgatgatgtagtgaactgctattgtgcaacattttctttgtaggcaaaagcta

SEQ ID NO: 6781 - DNA, 978 bp, Populus trichocarpa
  Intron number 6 from transcript POPTR_0001s26280.1 (locus POPTR_0001s26280) derived from phytozome v7.0 (chr-ID scaf fold_1; pos 25326288 to 25327265 reverse strand)
atcggtttttgagtatcgaatattgaaacagtcaggtgagtgaagcaggtggtataaattcttcagaatctataaacgatgaggcctttcactattccttttcttatgctttctaatgatattcctccatggagtcagtgaaggacagttgcataacaaggacaatctacatatgtttttcccttttcatacaaatgtattccaattcacttctctgagactcgcacatggaactatggaaaatacatcttctggaaagccatcagagaatggcattccatgagctgtgaacaagtaaccagtttattttaaatcagtaaacatatataggagtaggttttgtgtatctcttagaatagttaaggtggctcgtcaaaggactggaaacttccaaataacctacaccagggaagggaagggaaagggaaacttctgaaactcctagggagttccatgtgccatgactggctggtgaaaagcaagacctgaaaatagtaaataacttcctctaatcgcacattaagattctcagagccattcattggaatccatttttctttcaaagccctcggtgtattttgaaagttatccataaatgttgcataatagagaagctttcgacgcatatagctagcaataaaactaatagatgtataggagtatttacaataggtttattcacccacactgcttcttgaatgaaattaatagctttcaaaatgtctagtaaagaaattttggaagaacaaaaatcacaaatgaatgacttcttgttttggaaccatttcttaaagcatttctggtagatcatggatttttaaaaaatcaacaagataaaaccatgattttcagtgatttgcttttttctttttgtcattggaaaatgctcgctgtttgtagtaacaatattgtaagccaggttttttttttttttcacacgaagacaggcactgatcaggaaaaccaaattcccgaagc

SEQ ID NO: 6782 - DNA, 1451 bp, Populus trichocarpa
  Intron number 5 from transcript POPTR_0008s19560.1 (locus POPTR_0008s19560) derived from phytozome v7.0 (chr-ID scaf fold_8; pos 13478073 to 13479523)
cctggaagaagttgcaggttggagacattatccgggtgagtgtgcttacttttgttgttatttcactgtaaagatgaattctttgtatttaatgccattatcccttcaaatgggtgcagtttggtccttgagcccataacaacccctctgtgtaagggtacaggtccctggagcttaaaggcttctgtgtgctgcaattttatattttccattggatgttgatgtgctttaggactagattaagttttgaagaacattctggtagttgatgtcattctctttatggtattttcagagtttctttagggatgcttgtcataacctccttattattggccctgccttgacttctgtaacttattttgtaatgttgctatgtcgccttataacatcagctttcatcattttcattttacctgcttttcgttattgtaactattagaggagtgtatttaaaacgaaactttccttgtgcttttgcttagcacatcttgttaaattatttgttagcttctgcttggtaggcttatcatgttttgggatttaagttttattggaaggtggaatttgggaacctaatgaaaagtactgctgtttgagcattaagaagttgctacttttgtgggaaataaatatgctaaatgggaccatcttaggcaaaacccatactgctggagagtgttttatggatacgttattattgctggctttttcccccttaaattctctttgtttatttgctgctgctattgttcttttggtggtagtggttggtttaagtgacgtaatgcagctacaggtcaaaggtgactagataaggctatacagattttggatccttaaccattttgttccctgacaatagtgaaattattggctagttctgactgttataaatattgtctgtcaccatgttgctgttgtgctgattgtgcgaactgtaagagacgtgtggaaatgcattttatggaagcacaattctcttctatttttaaagatgacttgatttatgttgaatatttattaggatttggtattcaagattgactcaactaccttatacatattatatggaaaataactgtcgtcattataatcactatccataaaaatttctctgaaagcttctcctctcattatctgttcttttatagctttattttgcattgattacaggttaagcaggatggattctttcctgcggatctgcttttcctagcaagtacaaatgcagacggtgtctgctacgttgaggttttcttttaccatactctgtatagttactataataattgttgttgtttctgctggtctccttatttcatcgatattgccttgaaacttgaaagtgtgaactgatcagctggtaatatttatattttcatttattttctttaatttgccttatgttttcagactgcaaatttggacggggaaacaaatttgaagat

SEQ ID NO: 6783 - DNA, 968 bp, Populus trichocarpa
  Intron number 1 from transcript POPTR_0004s04000.1 (locus POPTR_0004s04000) derived from phytozome v7.0 (chr-ID scaf fold_4; pos 2834970 to 2835937 reverse strand)
actcaacaacagagacggcttttgaggactcaagggtatgcgggttttgttttgttttttaaaatttgtttggggtttttagttttttgatgtttaaagattgattttggagttatttcgtgtttgaaatttggggggtgtttttggatttggtgttgaattttgactttttgaaggttagtctctgggatgttcatggaattgaaagtatggaagttttggggattttgtaagtttttgaatttagataaaagggtggatttgaatttagaaagattgaatttaggggttattgaatttagagagggtattggcatttcaaagagttctgattttgaacttttgcattgtagttttaagggtggttttatagaaattcttgttgagttttggaattcgtatttttcttgatggcttcttgaagagtgtgctgcttttttttttttttttttgtggacggctgtttcaagttttgaaattaaagaaatgggttgtttgctgaggagatcattctttggattttgaatttaatattttgcttaccatagattttgaatcttacaaaagggatgtcatttgttaaattttgtaacggtttatggtttctctgtttaagcttggaagtatcgaattaaggaatgattggaagattttataattaaattgtagagtttttcgggaatttatgtttaatgaattccggaatacagtatgcatatccaaaagtaccaagaacttgtgagaagtgaaagttatgaattcttgtcactctttattccaattggtgaatgaaatacaacatgttgggttgtcttgttagatgtttcgatttatgcactcaaaatgatttctttgttggtctgctatctgctatcttgtattgagtatactattctcatcttgctgacatcaagttatatgtcttatttctggtgcacgttgaaattctaaagttttgtgctttcagg

SEQ ID NO: 6784 - DNA, 4391 bp, Populus trichocarpa
  Intron number 13 from transcript POPTR_0011s09160.1 (locus POPTR_0011s09160) derived from phytozome v7.0 (chr-ID sca ffold_11; pos 11312230 to 11316620 reverse strand)
atatagacattagcatagctgtcggcactccaaaggtttgtcttcatctctttcgttgactgacttattatttgtgcacacttgtatgctacctttggtactaatggtatggtgaagctccaatggtaatgcactggacttgctttctttatatgtatctgccttttgtggtgctgacaatcagtctattggttaggcatctttctcgccccttacatttttaaaagtatcttcttgtgcatgctttttttatcccaactaaattgtgggacgctattatagtttgattctggtttttaaacatggttttatttaaagaattggagcatttatgtgtatgatgagttcatcaaaataatgttttaattataatttattaggtggctagggcctaatatcatctaatctaaatttccctttaatctagtctctctgaatgcaatttttcccttgctattggttattcagcgtaaggattatttgttaggtgaagaaatgacatacttgacttctgtttgtgatatgtgggggtgggaagatttgaacctgggtagtcctaacatccatagcctcaacctaagtctttaattggatcaatgcctcattggcatattatactatactttaaaaggcgtgggaaaaacattgtgcatgtactgtggacatagactcattgcactgtggaccacaatgtaaacatagaatgtttacattgtggacgacactgtagcacctgaggagcattgtcttttctgttttctatgtcaaaagttgttgagtctggcttgtcagcgagacccaacgctattgggtctggcttggaaaccaagcccaaatcgcttcaacatgaatacgaatgctcctttggcagtgacgtaggtccccaaaactttgaattttccaagaaaagggactacaagcttcatataaaggagagaatgattaatgaagaacaatgggagaagattattgggtctggctcggcagtcatacctaatgcttttgggtctggctttggcaactagacctaatgcttttgggtctagctaggcagccaaacccaaggaatcttgggcctagctcaacaacctttcttttaagatattttcaattttattttttttcctcttatttttgtttcatatgatagagaaaataaattgatgagatttttttttatattgtacaaaagttgggtgatgataatttttttttcatttgaggttgggttgaattttcttatcaaagcatgtttgttttttgcgtttcaaaaatgctttcaaaataaattgattttttttaattcaaattaatattttttgatgtttttgtattattttgatgtgatgatataaaaaataaattttaaaaataaaaaaaatgttatcactatatatttttttaaaatattttaaaaaataatcgttagtaataatataataactagcaaattggctcgcgctttgcagtgagtcaataacaatatttttttaaaatgtaaaaatgcttgagttgggttaaaagaacggaatgtatttgtaccattgtcatcttcaattttttttttctacagtagcaccatgaatagtgcataatagagtagtgcccaatacaccaacaactaatttcttttcctttaatttttttccttaaagatatttttaattttattttttttcttctcttattaaatttttttttcatactgtaaagaaaataaattgataagatgttttttatattgtacaaaagtttggtggtgataagtttttttccacttgaggttggattgagtttccttattaaagcatgtttgtttttgcgtttcaaaaatacttttacaaaaatttgaattttttttaatattttctttacttcaaattaatattttttgatgtttttgtattattttgatgtgatgatataaaaaataaattttcttttttcaaaaatatgatctcaatatatatttttttaaaaatattttaaaaaataaccgttatgtaataatataataacttgcatattggcccacgcttcgtagctggttaataacaattttttttccaaatataaaaatgcttgagttgggttaaaagcacagaatatatttgcaccatcaccatctttagataaagtattttctacaatagcaccaagaacatagcagagtagcgcttaatacactgacaattaatttctttccctttaatttttttccttttaagatattttcaatttttttttcctcttatttaattttttttccatactgtaaaaagaaaataaattgatgagattttttttatattgtacaaaaattaggtgataataatttttttttcatttgaggttgggttgaattttcttattaaagcatgtttgtttttgctttttaaaaatgcttttaagaaatttgaattttttttattttttttacttaaaattaatattttttgatgtttttgtattattttgatttgatgatataaaaaatagattttaaaaaataaaaaatattatctcaatatatatatatatatatatatattttttttaaaatattttaagatattttcaattttattttttttaggatattgggcttgaccgccagacccaatggccttgggtccagcttcgcagcagacccaatggccttgggtctgtctctgcagccagacccaaggattttgggtctggctttagaacatgacccaatattcctgggcctggctgcgaagccaaacccaatgaaaatacgccaaaaatttcacaaaatcatgaaaatacaagtgaagcccctatttttgtattgagaagcaaatcaataaatgcgagaacctgtcatcagagagatcaatgtcggcctcaggtcttgagcctttgagaaaacccatgttacatcacaaaaactctaaaaaaccatgcaatatcactaaagatcaaacttgaaattgtattcatgattcaaatcacaagaacttaaaatttcagcatagattatcaaattaaaaccacaacaatccatgaaacgaaacaagctgaaattttctcaaaggcccaccttccatttggcatcatcgttggctaacttcaatttacccccaagatttttacctcaacaaaaaaaagaagaataaccgaacatacaaacaagcatgcttcctatctccgcctattatcaaaacagacgaggcaaaacaatgaaaaatcaaaaccaggccggatgtgaatagaaacaaaacaacaacttctagcctaaattattcttaactcaaagtttcaagctttaactcaagtatttccacccaaaaactcgagcatttagcacaagaccctcacattgattcacacctagccttgaacctcagcagactcatctctgtatgtcaaacctcaagcggagtttttttgtttttgtctattttaacgggtatgaacactcagagatacatgataataatcttcatgaggttacagtaataacattcattaccatgcatcttcaagcacctgactagtaaagcatggacatttagcaaacaagtaaaggataaaggaaagaaatgacacttatgagactttgataagttaaggatttgggacccttttatttgctttctatccttcaaaatctccaccagatcagtagccagacacaaggccattgggtctggctgggctgccagacccaatgctattgggtctggcattgccttcagatccaaggttattgggtttggctccgcagctagacccaaggctcttaggtctagcatgaccgccagacctaaggcactcaaaatatttgctatacttttcatatatatttttttaaatttaaaattaaaattgttattgacccgctgcggagcgcgggctaatatgctagtatatttgatttgtggaatactattccacagtaaatattgcacctgagttgttgaggaccacgagacataatattccaaggacaccggttattgctttgattgaccattgttgaggcgtgtattctctgctctggaggtgccagtctttaaaaagcttctgccatgtttaatctctgactaactgtatgcttgaagcatctagttcaaacattgtgattgaattaaagtatttgttctttggtttggtatttctcaatgttaatctagctgaagttgccatttggaatttcatgaacgaataaataggagaaaaaaaaatgctgcagtcctgcattccttgttgggtttcactttctttccacctctgttactttgttgaagtttcatttaatcatagaggatctcaaatgataaccttgcaaactttttttaatcgcgattccttcatgtttcatccctatgatgtccagggccttgtagttccggttatccgta

SEQ ID NO: 6785 - DNA, 580 bp, Populus trichocarpa
  Intron number 10 from transcript POPTR_0015s10360.1 (locus POPTR_0015s10360) derived from phytozome v7.0 (chr-ID sca ffold_15; pos 11315958 to 11316537)
aacttgacttggaagctgccttagccgagcgtgaggtcacgattttcttgagttgtttattatctatatttaaaattttattgattgttttaacatagttggcttctcaattatgatttaaccaacgtttatatttcatttgtagatagaactatcttctatgtacatgtgttcaatgtctgttttgtcatcaaccaggtcccatatggtttacctctgttttgaaggtcaaatttaaagccagccatgtaatgttttattgtctcaatccttggcttggagaacacagaatgagtctcttgctcccggtgctttacttgctatttgctagttagataacgcacggccaagtttccattctgttcacacatatgccatattcatgcaggataaccaaccttcaaaatagttttaatggcttggcttttcagtcataactagaaatctattttatatattgctgtaacttaaacttccactgcaacataatcaaagctcctcgtaaatatgtcaaactagctttctcattatacttaattttttcaatgttttctggatgcagtttcataataaactaaga

SEQ ID NO: 6786 - DNA, 518 bp, Populus trichocarpa
  Intron number 3 from transcript POPTR_0018s02390.1 (locus POPTR_0018s02390) derived from phytozome v7.0 (chr-ID scaf fold_18; pos 2141864 to 2142381 reverse strand)
catccccaatctctggcaacttagaggttagcatgagtttagctgttttgcttctgtttctgttgccttttgtagcatgttaaatcttgaatactttcagatgctaaacatataataatggccaaaaagagtggacattggataatatagttaatcatgcacatatctactaaatgaaagtatgacaatggtttgttgttagaaattagttgagagaagaggatcctaaattctgtggacttgcatttatcacggtatcactacctttcctgatcaaacatttcactggcttggacacttgcattgacattcagtattctgtcctgagagagaggattatgtattctgtgtttaaacggcttcatgaagaagtattaatgttaatcactctgttgtataatagcagctttacttcattgaccaaagaataaatttatgaaatcccaaacatgttaattgtattaatgacacaatgcacttgctttgcttggtgcaggttagttgctttgggggagaga

SEQ ID NO: 6787 - DNA, 575 bp, Populus trichocarpa
  Intron number 5 from transcript POPTR_0010s10180.1 (locus POPTR_0010s10180) derived from phytozome v7.0 (chr-ID scaf fold_10; pos 10748715 to 10749289 reverse strand)
ttcatgtaagccaacctgcttgtttatcaagttgcattttagcattttagcatctgtgatatgatgcagattgaatagttaaatttaaccatgcatgaataactgaatttattttagaatcatgaattcataacacttacgtccctcgtgatttctcgagacaccataactttacccaacttgataggatttaaaaatcttgctattgaaattccataatttttctgactagagaagagaatgaaattccaaattttacacaccatttccaaactccccactaccacctgactattagattatgctcttacataactatcatgagtttccaaaacaaagcatacatgaagcctcacgataacctcaacaatttccgtagttcccactgcttcattgctgtatgtatggcagtggctgcttcatttatgtttttcatgatttcttttctggtgatggatgtgatatgaacctgaaatcttgaggaactacaaatatatatagcctgttttgtgttgaaagaacagttcttgctgcatattctctaactgtaaagatatcttctctgtgccaggttc

SEQ ID NO: 6788 - DNA, 1109 bp, Populus trichocarpa
  Intron number 11 from transcript POPTR_0012s06310.1 (locus POPTR_0012s06310) derived from phytozome v7.0 (chr-ID sca ffold_12; pos 6636794 to 6637902 reverse strand)
aggaatacaggtgaggttcaccttatggtttacaattcagatagcattgtcttgcaacaatcctgtttccctggtatgagaagatttttgagaatgattctctgattaatttctgtcttgtacatctatataatatgtatggaagcattagaatgagatttcaaaaatataaacaatatccttataactgttatcaaaactatctcctgtattcaaggaaaatattatgttggtggcactttataggatatgccatataataaatggtgataatttttcatagaaaaatgccgagtttgtgttatgaaaaacagtaacatattagttataataatctctttttgtttgattgtttttaaatttttattttttttgagttcatgaaatttatttttctcacaaattcatttgtcattcttgataattttttttatcaataaataataattttgtacagttatttattttgtctaaaatttgtttattattgttgctgttgtagttgtcctcaaaccacaaattactagtagtattttgtgtaaagaaatctaatgataaacaagtaaagttttgtttacaaattacaataatgattaaaaagaaggaatagtttgaaagatttgaggagaataaaatggtggtatgtgttttattgataaagttcgttttctattaaattaccttttatttgaagagccatgtgctaaaaaacacaaagtacctagcacaaaaggcttgtggtcttttaatgccggatgccttgaacatagacaaaaagttatttaatgtaaaatcacagttgtgttgcagctgttaaagcatcaaaattcacgtttctcagcaaaacatgaattgagcagaattcacatgcattattcactccaaacataacaattgttggaatcccatattatgggaaatctgattcgccaactatcttggagaatttcaatattgatcacaactgctatgttttttttaattaaaagaataattttttgtctgagttttacatcagaacacaaatgaactgtatattagactagctgagaggaatttgtttggctcgtaacctttgattttctttgaacttgagttgcagtgttgcc

SEQ ID NO: 6789 - DNA, 1665 bp, Populus trichocarpa
  Intron number 3 from transcript POPTR_0006s24790.1 (locus POPTR_0006s24790) derived from phytozome v7.0 (chr-ID scaf fold_6; pos 23339969 to 23341633)
ttgtcaaagcaattgctttacactcgtctcgccaggttggttttctttgtttaattgtttaattcaattgaatattgcttgactgctaattctttggctgtgttttatagattttgcaatggcaacaacaacaacaacatggactgttttaattttaatttttatttcgtattaggcagtataatggttagattttggttcaaataacctgtctcaattggctgcttaagattttatttgggttgtttatgttgcattcgagtcctgaatttaggctgcccgggagggattaatgtcataatataagtagttgattgccatagaatatttagtctatataagttttggatatcacgtcgggtcatttgtgtgcccttttttatgctcgaactgcctcataaggccaactaattgtaattgcaaccgagaaagaattccattgtttagtgggtcaagtctgttgccagtgttcttgtttttttgtttaccttttcattctataccagtctagtaagtctgtaattgggatatttcatcctttctagttggaatttgacctggtttctcattattagcttccctgattctatatggattcattttgaagggactagttaactaactaagaactttacagtgtacatctgtaaagactttgtctttgacaattcacattttttagatttgaaacgatggagttgagtggtccattgtcgagtagttggtggcagattgtttaaggttagaagcgttagtgatatatctatctcctgctaattcttgagatgtggagatttattagtcgtgccatttagtcaagaactgctgttaaactagcaaatggtgttgcattggagatgaatcttgaaagagttgatggaaggttgaacctgctggtgatttgtacgatcaaaatagaacagtttgatatcatgaaatcaaccattgaatggagaagcggacatttttcaaaacttcaactctttcggcaaggggttgcacacagtttcaatttttcttgcaggatggtcgtgtaattgtgtctcgtctattgccaattaggttatatctgttgtctggctggtactcatgcactgttgtgtttgatttgtgcttttattatttctagatttaactgatacatgactgaattccgagttttagtgcaatatggaatgcaaaacaatgcttattcgttttactcatctcatataaatgtgttttttaatatatgtactgatgttcctagtgcagaaagttggatcgggaattgctaagataatagtattctgtatctttcattcttccttgtctttcatttatgttctaaacactgaacaaaataccatgagaattgtgacatataatttgagtttttagacaagtaaatagtgactgacagttgattccataaatagtgtttgcaaacaatatatatgaccctgaaaaaaaaaatgtttggtagtttttaacagaaaatgttccataaaaagtaatcaaaattgctgctgtattttaacaagcaaaatctacgtgttcctcttcaaaaacatctgtgtttgcttagcttcttgccaattctcagactatttcttggacattaatttcaatatttttcatattaatccattcatttgggtatgtgaaacagtattcctgggcgtt

SEQ ID NO: 6790 - DNA, 836 bp, Populus trichocarpa
  Intron number 2 from transcript POPTR_0006s04700.1 (locus POPTR_0006s04700) derived from phytozome v7.0 (chr-ID scaf fold_6; pos 3230003 to 3230838 reverse strand)
tccttttcaggttgggccttgttgcaacaatcaaggtattcatacttgatgtttgtacattgttattaccacttatggtttcaacagtgtctttaaaacatcctcttatgaatatggcattaaaccttaactatcatgtaaataaagtatgttttcttggtatttctagagtactaccaggtaatgagccatatatattattccacccagatttgtccttttccagcattcttaaaatgtataggcacattcttatgaagttatgatacatgagcatattcttaaatctctatggctcaattggaataaagtgactggtttttgtagatatgattaaatctcatgtaaaagaatgagactgtaatataggagatccatttttttttgattcccgatgcatcacttgtgaagggaatttcaatgcctggcatgtaaatagagctgcattatatttgccattacggtatgattgataaagcctcatctacttgaagcaagcgtgaaattcaaatattttgataactgttcactcttgtcatccaagcaaaaagagactcactcatctgtggggagagaaaagtgagtgagtgtggatgagataccatattgttatgcacttctattgcaagcttatggagaactacataattcttatgtaggcatctaaaattacaatgaatagaacaatcacaaatattaaagcgcttccccatctctttctcttacgaggaagggtttggatgcttttcttgtatggttgttcatgagaatttcccctaatgtttctttttccttctccggcgatgcatttttcataatattgaaggatcgggcta

SEQ ID NO: 6791 - DNA, 831 bp, Populus trichocarpa
  Intron number 7 from transcript POPTR_0001s23020.1 (locus POPTR_0001s23020) derived from phytozome v7.0 (chr-ID scaf fold_1; pos 22067629 to 22068459 reverse strand)
tgaggcttaggtagggtatccttttgaattgcactggtttaattatgtaattgataataatttgtaagcatgcttgggggtgtttcccaacaccgcaatcaaaccctaattttcattggaagaccaatgatcaaacttgcacccagcaatactcttgcctatggttgtcaggctagatatgtgaaccccttgtttcttcatctgtttcctatttctttcatgctttttcaccttcactgtttatagattcttatgatttgcaaaaggttacctgatcctctctccctctctcttcttgttatatattcaatgtgaaagaattctcatagtttggcatttgctactgaatgatttttagtagttctataaagtggggacaattgctgattctctaggcattaacacacacacggacatgtgtaagaaaaccagattttggctgattggttatgcatataaacattgtttagaaagatcaatcttgcctgttttaatactggagctagagcatttacctgtaggttttttagcagaatttattgatttaaagagagctggatgttatgcggggaacaaactataataaattagtagaaattttttgagatcgtgagaggcatatggccattttgatttttgtgctccctgtgagttcaaagtgattttcaccatttcattctttgtacttttagattagactgcaaacagtattagaaattataatggcttttgttgtataattttgaaatttggaactaaaataagttttattttttaaaaagcataaaatccaacacaagctttattgttgtttacaggtatatattgaaa

SEQ ID NO: 6792 - DNA, 2543 bp, Populus trichocarpa
  Intron number 5 from transcript POPTR_0001s36810.1 (locus POPTR_0001s36810) derived from phytozome v7.0 (chr-ID scaf fold_1; pos 35561200 to 35563742 reverse strand)
gttgaaggtattctttttccctctacatctattctgtttctctgaatttgtttctgccttgaatgataagacatgatactgtaattataaaatgactatcagtgttttaatccgaagtgaagtatgatagataaattgagaagaaagttgttttgatttcaattggagtttaacaaatttgattgatgtgaaagttttgcgttttatttctctcataactacatcttgttagttgtaaattaagaaggatttatgcagaaacctcaggctgcaaccaggaaggtttagtgcatgatgcgggacaggttccagtttttatcacacaaatgctttatggtgggccttggcttggaaaattggagatttaaggttttagattaaagaaaagtgatacagggtttgtagaattgcggttgagttattagacaattagcataacattgtaaatagatgatagataaccttatgtcgtgtttacttttagaaataaattttccaattttatctccacttttgtcattattctaaactcaatttgtccataaaaacaagcttactaactggtacttctataaaacagagaatgaggtccttgtttggattgtttaaaataatgaatgtcaaaaagattacataatagatgaaccaaagagggcctttgtttattaaagaggagaaattggaaaacaaacttttagtagttttcttgttttctagagaactggaaaaaccgaaacacatgttcaaagtaaatactacttggtaaacacatttgtcttagttttctgttttcaagaaatcttttctagacaactaactcatgtaagtactacttaaaacatcaaactaagtgtttaactctcattactcatgcttaatgcaccatactatcttaaggagccaattgctggatttttcttttaaaagagggtattctctataaaattaaacgattacattagcatgtatattgggaatcaaaactcgtaatgctaattagacctgaactaaataatgaaaacttttattcttatgtggaataaggaatagaacaagaaactcaaatcttcatcatgagatgatattttatatatcctaattcctgctagaatataattacttatgtttcacataaaaattaagctgataacatggtcacttaaaagtaagcttaaaattcccatgttgttgaggatgggttagtgacatgttttgcccttgtatttttatatggaagttgctcccaattttatttttattttttaatagattctacccttgttttgtaggttatgtaaaaaatctgcccctgtctagttcctttgattgggtgccatgtgttaaagatttgtgcataacagcataagaaaattacatgtggaaattttaaaaataataataaaaaaaaaaccaattttgagtatcaaggaaattaaattaaaattataggaaaaaagattgggtttttcaaaattagaaattataaaaatactaaagaaataaattaaactatatttattaggtaaagtatattttttcctcaaatttaaaacaaaggttggattttttaaaattaaaaattaaattaatatttacaaattaattaaaatgttattgaagaaattaaattaaaaatattgggtaaagtatacaacctttattcctaaaattttaattcaatttctttactattcaaatttgggccttttctttaccccccttcacttttttttagaaactttttgaccttttgttaaattttcacgtgtaattttcttatgccttgacgaattgattttttacatgtggtatcaaatacaatagaactggacgtgaggtaaacaaccttatgaaacttatagtagaaaggagaattcataaaaaaatcattgagagacaaaatccataaaaaaataacagtataggagtaaaaaaatgtgccattaaacctggcacaggcaatatcttcaaaaggggtatcaattacttcggtaatgctaactaattttagactggttctttgatgacaatctgacaaaatatatatcttgaaatgtatataaaggtactgtattttttaacttgacttggaggctgctttaattagaaaagcaacaatggattgtagagaaaactagattcctaaaagtcatcatgcattatttatttgttgtgcagagtcctgactcctgagtggccttgctcatgattttggtggcttctccatgtgaactgtaacatatggaatatgatttattttgaattcacaactatcctttctccaaatgttatatcatggctagcagaaaaacaaaaactgactgctgctgcttttcaatttcatattaccatgacagattatgtgcactagatgcttgttattgaatgttagaattcaaaatctggggatagccattaaaattataaaaaatctcgctacattagtttttgtgtatgtttaaataacacaaatatatgacttagctaattgcaattttccttttgaagttgtgtgaactgtccttccacaaaactcgccactt

SEQ ID NO: 6793 - DNA, 2853 bp, Populus trichocarpa
  Intron number 8 from transcript POPTR_0015s04950.1 (locus POPTR_0015s04950) derived from phytozome v7.0 (chr-ID scaf fold_15; pos 5166390 to 5169242 reverse strand)
tttattgtgaatattctgatccccaaagatatcaggtctgagtcccctttctactttacactcaagagtttcttattctacatgggcatttgtagtgtttgtacacgttatttaatttagtaggtactaggttggtgcccgtgctgtgttgcgggtccgcatttccagtaaaatatttaggtgttgctagcacatatttattttttaaaaaagaaatctaataactcgggttatagtcccaaccaaataaataagttggctttatttgaaccatatggaaaaaaaaagacaatgatagtaaacgggaaaacatatatatatatataaacgatcaatgaggaccaaaataaataaataaaaataacactcaactttgattgaagggtgaaattaaaaataataaaatttctataagagttaaggaaaaaagtaagaaatcataagaataaggatcaaattgataacaccaatacatgataaaaaaaaaacttgaacatgtagaatttttcaacatgtttttttacataaaaaattgtaaatgtaaatcaaaaaatttatgcacacgtccaattaaataaatcacgaaccattgtgtaaataaatgaaaaaaaagtaagtaacgataaataaaaacataattggaaaaattgaaagatcaatgtagattaagatgtttaatatcgtaacatgggtcatttatctgttgtgtttaatgaatttgtatatgaaaatcaatttgtaatagagatggacacacacataaaatttgttgaataaaataaaagaaaaaaaaatatgcaaggttgcacatattaaaaatactatataaaaaaatatttaatctatataaaatatatataaaaaaaaattcagatgaatcatactaacctatgcaaaaattaaacacacccaatataattaaaaaataattattattcaacaaaggcttaaaaactcaaaaaaatcatagagaatggatattaattaataaataaattttaaaattattttaaaaaaaatacatgtaaaaaagccattgatataaaaaaaataaaaactttgaaaaaagaagaagcaatgaggccaggcactgcaaggtcgtccgccccagttgcttgaaacacaaacagacaacgcgttgtctggaaatcccaaaattcagctactagtgtggctggataaacgaggttttttaacccaaaaactcattttgaaatcgtttttgtcccaaaacacttaggaaacatcccgtgaatcttgttaaatcaatccatggcctccaaaaacgcaaaaaccgctttaaaacttgaaatctacctgaaacctaaaatcttttcaagctcagatatatttttttaggtgttttcaaggtaaaaaaaacacctaaccacaaccccctttatcatatggaaccttttgacacaaaaagattggtggctaaaatcttccccaatgatagctttttctcttaaagctggaatctgacaattccctctatccacccaaataagaactaaaaaaataagaaaaataaagtttggtgtcaaaatgtattttttaaaattataggaaccggtcacctaataactaaaaaatatgggggacgaaaatgaacttttgaaataaatttcaaaatcaccaccaatgttacccgtatttttcacttcgatcctcattctttcaattcaaccctcccttccaaaaagtcatgcaattggatgctgatttgagctcaaaaaggctcaattgtggaaaaaaaacgtttgaggatcaaaatattttttttaaaaaaaatatactattacaatccacaatgaattgtgagagcatgaacaatgagaatggctacagtgaattccctacatgttttagtttttgttaattgacaaattacagctgtttaaataataggacttctcagtagttgaataatgaatactgtcctgatcattatggcaatatgatttgttggtattcaccagtccacatgaaagcctgagactcccttttttataatgatcaagaggctaccactatatccattactttgttggaggaattgaaattacctctgatgtgtacattgtttattaagtctaaccttctcattatagaacaggatttaatattgtgtgaattgttttccttttgaattctatactatcactttaaattaaaagataatgttgatattttttggatgaattattaacattttagataatttctaccttaaagttgaaatttctgctgctgttcaaaatctttgttcaacaaactgtatgtaattggttcaaactgaaagctgtattttatatgcataaactttatggttaaccatcttctcaagccgaacaaaatcgaacaatggagggaatgtctgctctaaattgcctgaataaatattgttgattctgacgagctatctaattttcagttatggaacagttggattgaagattataatttgattcaataatatgcaaattatgtcaggcattctctttctaatcatacagaaagatttagctgtcaattaaggacacccatgattgttttgttcactgtgttaaagcatttcatatcttaaagcttctttcaaaagtgtgtcctctaaatagactagattctgaatgaatatactgttgggagaattgattgtggacattacagaacctataggagtaccatcatatgcaatgcctgcttgaagtggttgtttgattgtgttgggagtttatgccatggtttctttgttttcatctcttttgtgaggttgcacactttttgtatgagctcattttgaagataattgcagtaacaaggaacgagtgcttgtcgaggaactggctt

SEQ ID NO: 6794 - DNA, 1546 bp, Populus trichocarpa
  Intron number 11 from transcript POPTR_0013s06470.1 (locus POPTR_0013s06470) derived from phytozome v7.0 (chr-ID sca ffold_13; pos 5067280 to 5068825 reverse strand)
ttttgggcatcaagtatttggttgctgttcgacaggtgaattttctctctctttggtttattgagtgcttattctagacctgatgaaatttatttcaaactgtttatttatttttcttttatcagaaaattgaatgaaacatgtgtagaaaagtgctttgcattagggagtcatcctccaaaaggacagagatgtaggaaaaaaaggaaaacttggaaagatccagaatgtatgataaggaaggggatccctccattccccttgaatgtgagatagagagacccatttataaccccctgaagtgttcattgcacatgtcatgcaaaagggggcaaaaaaaacagcacggtctatagctagaagtgagagactcaacctagtgtcttgaacttttcaaaattttcgacgtagagaattttgaacaagaactgatcactgggtggattttaacaggcccaatcaaggcttcaacaaccttgtctgtactgtgacattcaggttttagctggcctgactggagtatcttgtttctgaaactggaacttgggtcatgcctgaccctttttaaaccactcgatcttccctttttcccgtgtatctacaatttttccttattcctaaattcgatgcatatttctttgggaaagtggaaactaaatttgaagtccaaatgcccctttttggttccacggctgggatagataatgtattacatcctttacctattttgtggcatgatggggcaagtcacttggattagtggcagtttcagattctgtttctttattccttgaataacaaaatgttcatcatttgtaatgcacatactttctttaatgttctcagcttccaaaccaactaattatatgtactacacatagatttcctgcctttattttctattcaggttctactgtacttctcttttcttttcatctactctggaaaatgtcatggtgaattgatcttgttctctttttgagggtttcatggacatttagcttgttttcttgatttctgcaaactctaattaatatttcttagacagatgagatagaaagctagaaaaaaacacatgccaatagagttaggaaattgggaaagatatttctagtggcctaaaatttattgtgtttgccttgtaaagaatatgccaagcagactgttgctcatgggtctaggtagctttggtagtaattctctttgcctagatcctgagggtttgcttttgggtcttgttcacaccaatggtgtgggggcttaaagggagagagatatctagcactggattggaaaaacatgcaccaaaaatatcgaggcaaggtactgatgttttaaggagggaactaacacccagcaagtggagagaagacagaagagaaacaaccaatgcttaagattttgagtttcaagcattggcctcttcatgcatccacttcatgaatttacagacacattaaagttgtaattattttttcttttcttttctttgtgtcatttgtatttttcttcatcatgcatctctgctctttgtttacactaggag

SEQ ID NO: 6795 - DNA, 2569 bp, Populus trichocarpa
  Intron number 7 from transcript POPTR_0005s12550.2 (locus POPTR_0005s12550) derived from phytozome v7.0 (chr-ID scaf fold_5; pos 9319256 to 9321824 reverse strand)
gcaggtcagtagaacagctttcaagttattacagccatgctttttcttactcattataattattatcgtatttattataatcattccttataattctgtcaagttaattataagcttccttagatttttctcttgtttttcttcttataaaggggtccaatagcaacccccttttttttccttttccatttgctatcaatggtctacattattgtagtcgacttctccacacttaacagttgcatggacggaaatttttgttagtatttatattcatagtctgctgatgggtttgcagacgaaaacaatcttgtccgtaatttatgatatgtcggtaataaatatatcgaataaaacgtgctaaaaaatttttacccgttttattttattgatatctctatcggtaaatttaacatatcaccgacagaaaaatcatatataatgtcattggtgtttttatttgtctgtcggtatattcatcgataaatataacatatcatcgaaagaatattatttgtaattttatcggtgagttagcaatagcaaagatatttacaataattcttttcaaactttttcttaaatatattttccctttttttttcagtagatatttttcctttttcacagagaaaacctttttttaatgactcaaaaagtttcatctaaaagtagttatgttcccttacactgttacacatatcaaacaatatcaggaaacgttttccagcttttctaaaaaacaaaagtacagctaagtatcagaaaaccaatttcttttctcagaaaaagaaaacccaaagaatcaaaaaaaaaaaaaaagaggcaaacatgagaaagattaggtgagagcggcaagagcagaggaaggaacgtaccacgtacgatctcaacactctgacgtcacccccagtgatgaactgtcaccatcattcaacagagcgtttgcctgctaggacatgggtcccatctcacccttttggggtgattaaaagctcccatgtggatgtgggcctctcacgtgcacgagtgattgcatttgcatgcctccctctgccccttttcgatggtcaatactactccttttagcctcacactgtcgactgacccttcgaatatatatatatatatgctataccactatgtgtagaaaactaaagctaagattctgtttagcatgacctttacaaatagaaaattcataaatatgttttttttagaaataattttttatttaaatcaagagtttgttataaaactgagtcaaaacttgatttaacaaaaagtttgaattatagattttaacttgtgagtttaatttaatgtatgtttattcatcaaatatactttcattttaacttattatttattaaaataactcttgtatatattatgatttaaagtcaaaaatcattttctttataaatatgatctaaacacttaaattcagatttacgagtaataatctactaaaaaactattccttcatttctattcaatgtggaccgatgcatcatcacaaaatgaatgaatataagaggatccagcttcccctggtatttcagaagactactgaataataattggttgtgaatttacactggaaattgtgaaacatgtagattctgacactgtaattgacaaatgtccgtatttagattttggcatcatcaacagggtctcctgactgtgtttggttttttgctacacgtatctccattttagcgttcaatgcaagggttgattccatgacatttggacaacgaaagctcccgtggtctgcccttgtaatagagccagagacagtcaaatcctactcgtgttttttgtttttggattgttggtatctgtcacatatccatacgttaaacgtcttctcagaggaaaattaaagtaaaaactgtctttttctaagaaattgaatttttactagttttatgttttccttggtgccttttttctttcgaagtcttatgatcttgattttatacacagctataagaaatatgacatgatttgatacaactgagtttgacatattcttttcattacttttttaaaatatttcctctcaataaattcttgaaagttcttaattttcctgtaattattttatcaaatacttatttatcttgttcttttattagtctattaatttttaatttaatttattatatacgagagataggtctcccttaatcttcaaatcgctaccacctagctagcctccggttcacgtctaaatcgctgcctaatcgataggatgtgttcctaatatcaatcttggaaactgttaattaggatcatcatgaaattattaagcctatgaatggacgtttaggctgacaatttgaaatgatcttagtcacgaagaaggaagacaagagtgtttgcttcctttttctttctttttatttatttatttataagaatatgtattctcatattttctcattttaattatatttttttattataaaatcacacacatatatcgacgactgttatagctaattaacttgccttttcgtttattcatgttatcaatggtgatgacagcagcacaaca

SEQ ID NO: 6796 - DNA, 1476 bp, Populus trichocarpa
  Intron number 2 from transcript POPTR_0015s08570.1 (locus POPTR_0015s08570) derived from phytozome v7.0 (chr-ID scaf fold_15; pos 9864733 to 9866208 reverse strand)
ttactaaggtcgttttcaacatttgcaaattttgttttttatatgtttgtgcatatctacaaatctgataaccatggcctcaaattacgttcactttcatatatcttgcctttgtggtgaaggctgtgaaattaattttattactgctcccttctcatgtgctgattattacgttctcgaaaagcttaaactcagttatcagtttctttctttgttttattttttcctggttttgttgggttgggcagttggttggagtcagtccaagagccatgaactggttctcagccttgtggtggtcgtggtgagcgccttgtatttgttatttttctacttaagaaagggttggaaagaatagtagtttaatgccttgggtaaccgtaaccgttgaggttttcctcctaattttaagtcaattgagaagatttgtagtttcattttttctttcttttttgtaaattcttgtttttcattgactttctttaatgtggttcgaaatcatgaaaattatctttgcatggtggaactaaagtataagttttgttttggtcctgcctttactgtgttcttcattttttgctttctacaatgtattacttttcatttttataggtgcatgttttgggaattttattcagcttgtcagcacttgagtttctgcaggttgccccttatgttgtttttctggagcatttggtgtgtgaggatatagagactttggctaaattgtggtgttttcttaactctagctttggaagtgagcagtgaaaatgaatttgctttagttttcaatcataaaactccatgggattctttggtgccttaaaaagtgtttttcactcgttaatttagaggagaaaaggggagaagagtagtaaaaaagagatgagaggaaaagagaggtatgtaaattagagagaaattgtgcttggcttaaattatcatcaaatggccaactccaaatcatgtgatggataagagtcaaacaaataagaaaataaaagtaaatagctcacctttttcctttccaaacaaaaattcccaagaattttatcaggtcctccaccactcaagtatctgcaactcacctttaagattgcatttggtttgtctttgtataatccgaagaataaaatttgtagcaagttcaatgcatcttgctccattaattttattgctgccttttcccgttgtccaaattgattgtgctcattcttgatatcatggctttctctgggctctgatgatgatatattgccgaagttcaataatcaactcattccaattgctttagatgtgttatagaaaagaattgttgttgattgctgatattggtttatctgttatttgcaattatgaacagtgcagatcttgaaccttttcaattcaagtgtcttagatacgatagtatagcttcttggcagtaacttatttatactgattttgctctttgaagtgcagtttataggggcgacg

SEQ ID NO: 6797 - DNA, 1887 bp, Populus trichocarpa
  Intron number 3 from transcript POPTR_0011s13640.1 (locus POPTR_0011s13640) derived from phytozome v7.0 (chr-ID scaf fold_11; pos 16351096 to 16352982 reverse strand)
gggacgagaatatcagtttacgaggtatgtaccttttgcttgatctaccttagaaaatactattgtaacaccttaaaaatgcatttgctgtagtttgtgaatgtatgatgacttatacaagtactaaggtgtaaataaattaaataaagcaaaaatgcatgagaagatagctaaatgtcaaagaaagttaggggacaaaaactaaagtaaggctcaaactgaaattatccaacccaagtaggtgaagtaggatgatttttgcatgataaagtaggtgaagtgggacaattttttctttgtcatgcttgtgagatgttaagatgaagggagggacatgcttctccttcacgatctttcattatacaccattcctacaaactaacactagcaaagtggagcttgaatacaatagaattggtagaaggtaaatcaagggcagattgtatggggttaagaagtaaagaaagacagcaaaaagggctagagtttaaggtgagtgattaaaccaataaatatgcataaattcatttgctaatatgtttttatatcaagaatttccttaaatgcatgataatttgtagaattgatattgaatcctttttgaatggaaacttcacattataattattaattaagattgtgattgtggaagattaaaccatgattcattccattaaagtgaatggtgtattttggcacaaatgttgtgttgagataattgcacatgatatgtgaaaagggtacaacttgctttacatgaaattgtggccacctacatactacatatgctactattgaaatagcatatggatatgagaaatgaatattgaattgtcatacatgttgttcttgtacaattttatgtaaatatgatagcggggcccaaatgttgaaaacttgtggaagttttccatgcttatcacgttaatcattcactgagctatactcattggtagttaataaattattttcagaggacccaagcgagaatgtaagggggcttgggttgggtagtaggttgccaaccaaagtgatgggagagtgctagcttgaagtgtgacttgagttgtgttgttgtatctctccatatggaagttttttgtatgggtcattaaacatgtaaatgcatatgtaaacatatcatgtattaacttttttggtatgtaattgataaataggacaacaatgtacaaagatgcaaaaataggacaagttgtgtgtgcatataaatgcatgattggttggtgaatttgattgataaggcagcaataagaagtaatgaatgatgttggtttaaccaaagaccatgtttctaaaatgataaaattaatgctacgggctaagatgcatcacaatagaaataaaagaggggtttaattataattgagaagtggaagatgaagataatgataatgataaatggtgaaggacaaacatgtccgtcccttactctaagcacctcacaagcatgacagcaaaaattgtcctacatggtcatgctaaaattgtcccacttgacctactcaggttgggtaattgcattttgagccttccttttctttgatttagtttttgtctcctaactttcttttaactctacattatttgacatttagctatcttctcatgtatttttgcatcatttaatttatttacaccttactatttgtataaataatggtactttcacaaattatagcaaatgtgtttttagggtgttacaactattttctggcatatatatatatatataaatggaaaattatgttcttttgtgaccctttatgacacaatcaacttttgtgcattggccattagtgataccttcaagaagatcttactcctgttgcagaaaattatttactggcactctgtgaaagtgaccag

SEQ ID NO: 6798 - DNA, 2898 bp, Populus trichocarpa
  Intron number 2 from transcript POPTR_0003s08400.1 (locus POPTR_0003s08400) derived from phytozome v7.0 (chr-ID scaf fold_3; pos 9816534 to 9819431 reverse strand)
ccacattcgtatgccaattttcttctgtaaatcatgcagacaactattcttttgtgttgcatgttattttcccagcattgagtttaaaatgaagttcttggaggttccttgtcttactatggaaagaagcaacttatgggacaaacttagtaacgattctccattaaaaaaatattttaaatctgaggatactccttgttaagtatctatcttcatacgttttgttatacatagcttggaaggatatttttttggagataaatgacagtgtcaaggcatcgaaccatattttctttttagttagttagggaagtgctctcattccaccattactaatgttatatcatgtcaagccatccaaacacattttctttttagctagttagggaaatactctcattccaccattgctaatgtcatatcatctgggaagtatgttttcaaatgactaaatgatcatatatggtacatggtcatatttgagattgcaatgaatattcattgattttttgggagaatccactctggtaatccttgatcttcagatgtaacaatgataatttcttctcagattttgcgcgttgatcaatttatatgtagacacattgatgggccttttttgcttcatacactttcttaaacttgatttgatagtagatatctgaagaaaagggtttatctttggttaatcagcatttggggctgaagtgctaagatgatctagtgtcacatattttacagtaagtttagcccctgactgaatttcctccctgatgaagatgcatgaacaattgattttcacctggctacttgggttaagttcagttgaatttggtagtgtagtttgggactgccatcatttcttcggttggaatatgttgtgtgcttccatgttcaatcactttattctagaaagatggcaatgaaaggttgtccatggaaaagaaactatgggattttctttcttatgttccatttgtgttggttcggatggactagggagtaaatagacattgataatgccccttatgcatttagtttacaagaagtggtgcccagtctttgttgcattgattattgatcagtgtattttttatctcacggacaaaaaagacaccctaagatatcttaaggtcagttgtgtggtaatctactcttttgaattcatgtgattttagggtattcatagatgaatggtttgggcttgtaaagaacttgagtaagcttaagatttaaaggggaaaggtagatgatacttgagaaatcaagttgctggcaagtcctaacagagtttgattttttttggtgtgacgtatcatgtaaataccaaaagagttttaagaaatcggatattgagctttagaaaatagaggaataaggctggctggtggtgaagtgaaaaattgatactgtaaaagagaaactgttggttgagttcaggatgttactctatgaaatgtggatactccaatacatgacataaggagcctgcctatggatatgagttgggtacactccgaaccctgtctgagaatttcccataattagcgaattagtttctcattcttatttttaaaattttttacttttgatatgaagagaaatttaacttgaaacacaaaggataagaaaaaaaaggggtcttagagaagattggcaaaattctgagctcaagattatccgtagtagacttgtaacttgattgcttttaggttcttaatttaatgaaggggcttgagtgcatgataatatatagttttaaagggtaaggagactatgtaattaatattttgctgataggtcttggttgatgttttgggaatgattttggagagattctgtgtagaagaatgttctgttttcattttttgtttctaatatttatttttattactggaagcttcatttgaatgtttgaagagatgagctctttgacatggtgtaactttatcatttatcaacatgtcatattctgttgcacctcctgcttccttggttggaagtaactgaataaaaacagcagaaaattaaagaagagggattataactaagagaaaaaaggagagtgtttgaactctggacacatttcttcctaaattaaaagaggttgaatttccatcaatcaaagtctcgtaactttaagatcacacgaaaactaatgtgcttttcactgtttagataggtgtaatgatcgcttagttcaaagctatcagataaacacctaaaggaatcacctaaagttgatgaaaacattactaagacatatagagacctacaaaagcaagtcatgtgagttaaagttatctttagttaaacatgctcagtattccttagttgaaaactaaaagataaacgcttaaaggaatcacctaaagttgaagaaaatatgcccaggacatatagaaacaactgaattatgcaagctcttatcatgcagataaaatcatttatttcacccagcgactctgctgccacagctgatacaaggattcgtatagctcactttagatttatgtttgaactaattatgcaaagtcatgttgcatgtggacacaggtttaaagtcccaactcctaagttcccatatttgtgtgtgggtgtatgtatatgtagaatagtagcaaaaaattagatgccaagatttgatgcattgtctcacaaattgtaagaacttaaaaatgcagatgctacatgattttgatggtgggaagaaaattttacctaatattttcagtattgcaattgtctaagaaatttcaccttcatggatgatgcattataaatttaaattctagtttgctacagtccatctataaagaactagtaaattgtctgcatgccattttatttttggtctgtattacatcctcatttttttaaatgcagttcttaaagcaa

SEQ ID NO: 6799 - DNA, 3754 bp, Populus trichocarpa
  Intron number 1 from transcript POPTR_0009s16370.1 (locus POPTR_0009s16370) derived from phytozome v7.0 (chr-ID scaf fold_9; pos 12461012 to 12464765 reverse strand)
ttcacaaggccgaacatacactacaagaatcgaaggtaagccaagttcttgcctctcatgtgttaaagataagttcactttgattcgtattgtgttgtgtttgctctctctctctctctctctctgcatattttaggagaagactatcatgggtcttgtttaatgaaaacaaatatttagcaaatattatttgatagtctcgatgaggtaaaatactgatgtgggtgtggccatttagtttaatctagttcatagaatgctctatgtcgcagtttttgagattttttctgaagaatacaacaatgagaatagttggtgctttctgtcaaaattattggtcaatacagttaaaactctataaattaataccttggacaatgcaaatttattaattaattgagatattatttaaacttcaaatttaagtcggatcaaacaaaagtatcgtttcgtcgaggttattaacttgtcaatttatcgaagttatactataattctgtgttaaaatgataatcgttgtaactaggagtatttgatagttggcttagcaattcattattggctgtttatgacatagcacgcagttcgacagcttaagagcagcttgatctagatgcattaagagattatatgctgaattgaaaagggctcaaaacaaattgtttatcaactcagaaagaacttattatatggttttattagttttatttctcaacttcttacattatttgaccatactttgttatgcatccatcagattcagaaacaaaacatggctaagcaccaggattttgtttgtttttttgacacaaatcttactgacaaacaacgtcacatgagcacagtcgttgagatcctgcatttttgcatacacaattctttggcatgctgcttgcaccatagtttgataaaaaatcaactaagcattgctgactgccgttgtttccacacccccctggaaatctggccgtctttgggcaccatttgatttgacctgcattttcaaagaaagaaagaaaggcacatattcaatattttttcaaacaaaaattcatctatcaaatcgttaagtactattcatgagtactttgatcacccctaaccttgagtgggagtgaagaggcttaatagtgcgacccaagaaatcaagagaaagacaattagcttcattatcttcgattcttttatctaaactctcacttgttgaagatgttagagcgtatatatttcaagttcatgtatgcaacacaaatttataggtgtctacacctgtgacaaatttagcaatagaattattttaaaagattctgtgattatatacatggaaacaaaatatctacttacctaatttgggaaaatttaaatcttattgatgctctaaacatttattagttgccttcaaatatacaaggaaataaattaatagcctaatctaatcttattttttgaataatttatttgtatatgcttaatgttttagacttagtgtgaataaattttagcttaaacacttttaaaatcaacagaattggatttgtaaggtataattagagggaaaacgagaatggagtacacaggaactaaagtttcaccacattataaaatgtcagagaccattgtgttggttctagaagacaatggccaccgtctaatctgttgtgcttggttcaaaattaactttcattgattcaaattccatttttaagacaagaaattattgatttctcattaagaagtgttttttaggacagttgttaagagtaatttcatatttataatcaatctctatgttttttttttagaatttactgtaaaaacttaaaaatattatcacataaactaacacttattttatgtatttaattaaattttttaactcttgaaaagtaatgagaagattttgctggtgacaaaacatatttttttttagaattaatggaataaaatttaataaaaagaaatggaataaaataaaataaaatctatgtttttggattggggtttggcttgtttattttggaccataaaaagaaagaacatgaccaaagttttttttattgcttatatggaaaaacatatctgcttacctaatttgtgaaatttaaatcttattgattctctaaacatttattagttgtcttcaaatatacaaggaaagaaactaataatgtaatctaatttaatctaatttttgtttttggatcatttgtttgtatatgcatagtgttttagacttagtgtgaataaattttatcttcaacatttttaacatcaatagaattgaacttgtaaggtgtaattggagggaaaaagagaatcaagtacaaaagaattaaggtcacgtttggttaatatttcaagatagaaaagatagataaaagaagagacggaaacgtgtttggttggaaggatcaagacaaaaacataaaataaatttgtcctcgagacgtttatgaagtgagcttttgtctttttaaaacaaaaaggacaaggagacatgtcccttgcccctctatctctaatgtcttcacattgtgttctagactagaacatggtgtatagataagatgtcccttcttatgataattctggcttttcctatggttccaaattgaaaattggtcctgaaccagtagaaagctgtcatgtgtcatctgaacctcccagcaggtttacatgaccagccttaataattttcctgtcttaatttctgctgaggaattttgttgtgccactcccagttctcattttcacagatgattaatcatgcaacgaactttatctagggcttcaaataccatttaatctagtttaagactcttactttcttgcatattttaggcaaaagaatttgagccatgtaccatttctctatggttcgaaacttgatgctgaaacttttggtactcacttgccttttttcagtggatggttacttatttgtaaacaaggacttggtatcatatgtcttgttaaaagacatcccagaatctagatggcgcaggcttagcatgaatttcgttcttaaacacgctgcatagccttgtgatagtgtcgagggacactattttggcacaaaccatatcaaataagatgaactctttctcatgcttcaagcttgttgctgaatctggttgctattcctagcaatgatagtgccatttttgttgcttttaataccaccaaggatgttagttatgtttcactagcggcacatcaccaatcccttctggtttactagctcctgtctgcagactagattttaagcttgattcaaccctcaactcttttatttgatggaattttgatttggagactattggtttcaaaaaattgccatagcgattgacattatcataatttgtagcttcctctcagccatcaggatgttgagtgtctctttatttgatttaggaccacttctcttttgatttgagcatggcttacagcactggcaatgctttcattgggctgaattctttatgcacattatctatcctgcctccaactatctcaggtacaatttgtctaagaactgccttgtaaagattatttttgaggaagttgctaaatcctgatcaaccacaacttgctgcattgtcaaaattacgtgagactttgtgtggatgcaataaaagcacacatcctaaacatgaaataaaattaataactagtatatctattccctcaattccatgtcttcctataatttactacaggtgcgtgctagcttgttctctttctgtagctggtc

SEQ ID NO: 6800 - DNA, 1183 bp, Populus trichocarpa
  Intron number 15 from transcript POPTR_0008s14490.1 (locus POPTR_0008s14490) derived from phytozome v7.0 (chr-ID sca ffold_8; pos 9621151 to 9622333)
gaaggtaatgttattcttaggtacttctggtctttgcttgaattcttggttgcagatttgcatatatgcagttgaaattcttcttcatgccagtttgtcgtgcctctgacatctgcaatctgccaactatagattttctagagaattaatttccttggaaaaattatatcaataagttctatgatattttttgaagaccaacaagttcacttatcaagtttttctttcaaagaagttcatattttgttatattccacataatatccagacaatatatttcaaaaataagattataattgatcttgtttctttttaaaattaagatttacaaatatgaagaattttattatttcttttttataatcataattacatttgaatttttctgaggtttagaattatatcaatataataacaattggttacaataataaactattttacaattgagaaaaaaatatttaaaaaatggtgttaagaatttgtttaaacaaactaaaacaaagaaaaagaaaataaaaagcactccaaattgtaattttgttaaatatggagggtaatatagctatcataaccaaataagaattttcttttaacataaattataaaagtgaacttatttgtccaaaaagcttcataaaagttgataatcatttatctttcaaaagtcaacgtattagtacttttcccaattttttattcagaatttttaatgtatctttagttcatctaccaaatgatgaaaacacaccagaggctgttaatattcaaagtgccttttagtttcccttgcagagtttagagtatgttgctgtacccatcgcaacatatttaactgtgcctagaattcgtcaattcgatgagtctttgaatcatatgaaagttaggtgcaacatatttaaccgtgcttaggctttgttgattagatgtgagtctttggatcatatgaaagttatgccaattttctgaagtctagaagaatgtggtaaactacagaaagtggtttggtttatagatgacttttggtttttcttatttcctatttccatttctatccctatgaaaatttcagccaattgaggtgtctagaaaataattggtttcttttcttattacatattttcatttttcttttgttagctttgactctgatgtgatattttggttcatgttctacagattg

SEQ ID NO: 6801 - DNA, 1290 bp, Populus trichocarpa
  Intron number 1 from transcript POPTR_0002s02540.1 (locus POPTR_0002s02540) derived from phytozome v7.0 (chr-ID scaf fold_2; pos 1440510 to 1441799 reverse strand)
attctctggcttcccgttaatttcctgccgatcaggtaccttgcctttgatcacgagcaattaacttttattctgtttatttttgctctcgtttagggtttaatcaggcgaacaattaggtattcaaaatggctagaacatatagatttattagcaaagaatatattttgaatggttaattacaattataactgttgttaataacgtgattaagaagtccatgaatgcgagcagacgcgtcactaaaactgagcatctgtgtttaagttttgagttttaggagtgaatttgaattaatacagttctgtgaatcgtgtgatgttgcggtactccatgaccgcagcgctccgtaatgatgagtttattagcctagaaacctgtagtttttaacatttcaatgtgatgcatttgaaaaaaagatatgtttgtttatttattgtgattagaattttcgatgctcgtggatcttagtgttattgataagaaaccgaattttgaaattgtgtgatttgtggcaaaactgatggacgaagagtgaagttagaaagcagaatgtgaaactgtggagttgctgatgttgtcgacaaatgatgctgtttttgtgaccgtgtatgtttgcaggggggactccattgatggtcttatgtgtgtattgaggaattgtttgattcagaacttaacttaaggggatgattacaagttctgggaataattatgatagatttgtgcgtgtgtgattcttgttaatcatatgatcgttttggatggatttcggtgtgacttctgcaaattgattaaagttgttttttaactattgactcataaaaaaagtcataaatatgtgtggctaggaataactcttcacttgtgaattctaatttgtactactacatctattctttgcaaaagttgctttgagtaatttttaccaaacatactttattttaacttatttttgttacgagttatttatgaaaaacaaccttttgaattatgactcaaagtcaaaagtcttttttacaattcatgccaaacatactcttatttagtcgattgggattcgatatatgatgttgatggatttatgtagtccattaagattagatatatggatttatctaatagtagtatagtactctgtattatgttttccgatccatgtttggcctggaacctgattgttatcttgttatctttgcatttgaacaatcttcttttcaactggagagtttctgataatcttattggtagttgtttttctgacttcaaatgtgctttatgtagttgtac

SEQ ID NO: 6802 - DNA, 646 bp, Populus trichocarpa
  Intron number 11 from transcript POPTR_0005s04820.1 (locus POPTR_0005s04820) derived from phytozome v7.0 (chr-ID sca ffold_5; pos 3236587 to 3237232)
atatagcagaggtaagcatgcgccattttttgtccagaaatttcgcagctttaagttctaaaaccgatggttaagcatttacgtgtcatttgtatttgaattggtatagcttccaatatatgcattgcattctttttccagctgtttttaaattttttcagattatttcttatcctcaataaaaaaatttattttaaaatttcccagaatgataagaagaaatagttggtttaactgtacctttattatgatatcaacacattcaggataatttgcactcgacaggcagctttcacaatatgtcgtctgagcctaagtattcactgatggcatcagatatagtgtcaaactactacattgtatccagtaggttctgtatgggaacaaatctggtagttttgccttcacgttattctttaatcatgcaagttgtgcttgcagaaccaggaaatctcaaatctcaataatgcttatcattcaatgtttttgctcctctttaaaagaattccctgactgcctaactactgattgtgggctgccaggtcctatctaggaaaaaaaaaaagcgtgcaattatacttatcctatattattgtattctttttaaagttctctgtttggatgttgcagttggttcttgattaca

SEQ ID NO: 6803 - DNA, 929 bp, Populus trichocarpa
  Intron number 1 from transcript POPTR_0005s00490.1 (locus POPTR_0005s00490) derived from phytozome v7.0 (chr-ID scaf fold_5; pos 173887 to 174815)
aggttctctcttccctttttttatctgtaataaaggtaccggctttctttttattttctctctatgttgttcatgttattatttcaattctttagggtttgtttatactgtgttttgttaaatttggtttttctagacaattttgtaatatttgaggataaagttttgagctttattgtttatttggggttcttggtggaaattgccgtgtaatgttttctgggtttcactggaacgtagaaagttagcgggtttttattagtgctctaggaattgcgtcctttaatttggttgaggctggccaaaaagattgaatttttatccctttttggtattgcgattttgaaatttcaaagctgatgttgattgccagactgttttcattgcaccctaccattgttgtttgatttagtagttagttcccgccaacaacagcttagtaaaaagtttcattaggcagaattgagtgaaattttgttgttttgcgttaacttgatgtggttggaagcctgaacatgaaatctttaatctattttatctgaaaatactaaaatgtggttggaagcctgaacatgaaatctttaatctattttatctgaaaatactaaaatgtggttggaagcctgaacatgtggttggaagcctgaatatgaaatctttcattgcaccctaccaatgtggtaggttgcagtaaacaaacacacagctttcgtccatttggctggtaagatagctgaaagatggatttttatgactaagtttttgaaaatccactctgtgtccattcgttacattgtcataggtattaaaagattgcagagcttgctttggtgcttctttttccggttatctgtaaatgtgatgttttctcataatgtattacattttgggttttaatttcttacttatttgttgggtttagtcaggtg

SEQ ID NO: 6804 - DNA, 1163 bp, Populus trichocarpa
  Intron number 7 from transcript POPTR_0002s10100.1 (locus POPTR_0002s10100) derived from phytozome v7.0 (chr-ID scaf fold_2; pos 7263489 to 7264651)
atcgttttaaaggtaagttatttgttttttaattgttgaaaagtcaggtcagtaagcttaaccatgttttccagtttgttaaaagcattaatttatccttcttactagaaagtctgtatttgagtatgttgctggctcatgtacattttgtatgaatgtgtctctatatcatttattatgacttcttgcacctatgcacatttctttatgaaacactacgtcagtctggaatttctttccattctgacattgtctgatgaatgcttgagagttatctgttatgtgcccccttcctcctttggaaaaaaaatgaactcaatgatttgaatttctgtgacttgacaggagaattaactgtataaaatcaaaatgcctatactttcctagatcacatcttactaaatgatgtcctgagtttctggttgtgttgttgctatttcagtggttatgaatcattttctgtgtggctccaatgtgtttaacgagttgggaattttagattcatatatttgaaaaataggtttgtagaatgtggtaggaaaatgatagttcggtgatggatggctgatgctgtgttataaagtaacttgctgaaactctgtcaacaaggacaaggatgaagaaaaagaagaaaacttgtaataccatagtatgttccgctgcatcaatatagcacaggtgttccacaaaacaaaaccataagtttccaaaatcaaaaacatctttgtctcaactctatcacaaagaccccacaattcaaatcctaagttgacttagtttaaattgcctagaatatcagccaaattctttctttcgttcttttttttttcacactgcaacatattaatcccagcagtatcctatattgatccctctagctttgtcataaaatatgcataataatggtatatatccatacttgaccatgcctttctgtttggtttggagcctgaaactaattttggaaattgtttcagacttcctttcttttttgtaatttttaaacattttttatatctgatggtttaataataagatatgttgattttgaattgagaaagtcttttataagattactcatcctgtttgatttctggagtcagtttgatactttttttgatggttcagtttccaggcttgaagggtttgtttccaacagggag

SEQ ID NO: 6805 - DNA, 521 bp, Populus trichocarpa
  Intron number 3 from transcript POPTR_0010s13790.1 (locus POPTR_0010s13790) derived from phytozome v7.0 (chr-ID scaf fold_10; pos 13527639 to 13528159)
gagctgatccctctctaggtaactatcccttttcctctttctacaaggcctatctataattaattatatgttgtagatggtcaaaccaatcaatcacatttcacagttaaatttgtattatgattttattggatttatttttcctcgtttaatatagtttttctccgagctttaagcctgattttcaacaacaacaacaaaaaatagatggcatataatccaaattaatacaaatgaatttaaaatgcatagaattacaaacttgtttcttaaaactttcctggtacgtgcttcaaaaattaacatgggcatatcaaaagaaatggagcgcatcgtgatctaagattttaagccgggaggagtctagcgtgactgcctgaaaattaagaaactaaaaatatggggacggtgtaaaatgcaacaacggatagagctattttgcatgattctttgttatcgttaaaatgatctgtaataattcctgatggtggttatcttgaactttgaaggttggcaggcta

SEQ ID NO: 6806 - DNA, 514 bp, Populus trichocarpa
  Intron number 1 from transcript POPTR_0004s08870.1 (locus POPTR_0004s08870) derived from phytozome v7.0 (chr-ID scaf fold_4; pos 7451680 to 7452193)
attccttctctactgtgctaatccaccttcaggtattttcacttcccctttcttgaaaatttcacaattgttttttatttttatttttattttttgccttgaattctttccttattctctttatttgatattgatattgatcattgcttctcatctataagacagaggtaataatttaattatagttgtgaaaactaatctacgattaggattgataagaaaaaaaatactgggatttgtattgtaatataggatcaacagagtttcatgtataaactaaaaacaaactcgatttaagttagatttcaagtctaaatttctcgatttaatctatcagatctcattgggtttaacttgttcaattccaagagcttttttttttcaaagattttaatatatactttagtagttatgttaaataaactaattggtaggtcgggtaaaatcattttcgttttttttttttttttttcatgtagcgttgaatccacgggagccaataggttcccaagag

SEQ ID NO: 6807 - DNA, 359 bp, Populus trichocarpa
  Intron number 4 from transcript POPTR_0011s14040.1 (locus POPTR_0011s14040) derived from phytozome v7.0 (chr-ID scaf fold_11; pos 16624898 to 16625256)
ttgttacgtgcttttaggcagccagtcattttgaggtaactaccaaaaccttttataatagtcagttgaatattctgtagaatttgaagttcatgtgtatgtatgctcctcctctagatttagcattgttagccacccaaagagatgattgttttcactttgatattaaatatatgattgtcaatgatccagaatagaccacagaatgaatgcttgatttatttgtattttgccagattttttttccacctattttagatgtatatgctgcttaatatacctaccctggtatcaatttagtttattcgtctaatctatttgattttgggttttactttggtctttggaagaccagacca

SEQ ID NO: 6808 - DNA, 872 bp, Populus trichocarpa
  Intron number 1 from transcript POPTR_0007s01790.1 (locus POPTR_0007s01790) derived from phytozome v7.0 (chr-ID scaf fold_7; pos 1034491 to 1035362)
ttctttgagttgccctttgtcttctctacaaaaaggttagaactttatggtcttaatcgcttttttacttaatttctttggtgtttctaattttctggattctggggtttagttactgaaagatttatgtttttgttacaaatcttgtagggttttgtagctacccttcgtgggtttcttgctaaatttacatttgggtagataatgacatgcttacttgtgtggttgttatgtttaaaggtggctcttttggttttggttttgatgatttgttgaatttttttctgttttggtcgtaattggtgtagtgtagttcagtttcttttgcaaatacagtgaaatttggtttgatgggatttctttgctggttttaattatggtgactagtgttgtgtatctggttcttatgtttgaatttgttttcatgtaacagatgtagatttggaaacaatttccctggatattctctcaatataactatatgcaccaaacctaatcacttaaacatgttgatagctaggattagtaattagtccttgaacattaaatgcttgttcaggttaataaaacctcaaagaagatccttttagagaaaaaaatcagtaataaatttgatgataatgtgatatgaagattcttgactctgaaattagcaatcgctttatttggttatgttttgatgggttgaccaagtagtctttagttatttcaatatattttttgttttatgaggtgagggtgtgtatagcacacatatctggcaagagcttgtgtagaatattgccactgattgcatatgtttgatgtttcccattgttgcttttgttttgtcacttttggttatctgatatgtttatgccaaacagaaccat

SEQ ID NO: 6809 - DNA, 773 bp, Populus trichocarpa
  Intron number 2 from transcript POPTR_0007s06620.1 (locus POPTR_0007s06620) derived from phytozome v7.0 (chr-ID scaf fold_7; pos 5034227 to 5034999)
gagcaaactctggccgtgcttcttctgctgagaaggtacagtgagaattaaatagctccatcttgttttgatcgaatttcactttgaaatatttttttcttggttattattcaagcatcttcttgttgtctaatgagctactgtatagaaagattcagtctatgctttggtatattaatatgtttcccatctattagaacaactctgatacatttcttacattcatctaaatgttgaaattacgttgttaacatcacaatgcaattgtggagaaaaatattcagagataggtcccattctaattttactaaaaatgtgaacctttcatatctgcatcctgtttgaaatcaaagacaaatggagttcagaaaatcacatgtaatcaggattctttagtttcttagattgagatgtcttcttccctttttaagttagcccactacatgtgtggtgggcagtttctatgctaccaaactcacaacatgaaatttcgttgtgtttttaattattttcttgctattatctctatgtaattagatcattttatggtagtagattgactggtaacctagtaagaaaaattgatgctgccctagttcttttttgctgccttcatatctagtttgttttttcccccaccaagtgaggtcctcctctacaacctggctcctgtattttttcctggttgctttagtgttcacttaacttttccaaaacatttacttttcatcattacagaaactggagagacttcaagaagaggatcaaataga

SEQ ID NO: 6810 - DNA, 1173 bp, Populus trichocarpa
  Intron number 6 from transcript POPTR_0019s03590.1 (locus POPTR_0019s03590) derived from phytozome v7.0 (chr-ID scaf fold_19; pos 3686629 to 3687801 reverse strand)
tgcttcagctttactcatctcacaatattggcaaggtacttttcgtgactgcctggtgtctgattaaggttattcatgctaatccagaaaaaataatggtggaagaatctcttccccttccatcttcatagaaatgattgttttctcataaaactgccatcagcttgtctcttgacatccaaggctgtggtagaacattactttcataggatgcttttggttggattcttgtatgaaagatgttctctggctttggctgaaagcttcagaccatgttcatctacataaacaaatggaacagcaatttattctcttgctccttttccttttctttttggttggctcttttctggcttgggcatggcccttgtgctgttcccattaaatacttaacatctatgcttttataaatcaaagttgaagacagagtcaactcatccctaacgcagacttttttgccatgtgcgcttggcctatggatccactccaagtccaacaatacttatatttgtggacctaacttagatagcaatttacctactccaggacaaggacatgtaatggttaagtgtaaatctttgtgctttcatgataatttgctaattagttaataaaggtgttagtgctgtgctatttaatgatattgttgaaaatctgcaatgtagaataagaggtccacctttcatgacttgctaccataatgacaaaattgttcttgatactgcaactgcaattcaaactatggaatggatttgattcttggcaacaaaattgaattgccactgtatgctttattttgttgctcacgtaagagaggttgaacttagactgtgtgcacaccatgtctcataaaatcattcatgtagctgaactctcctattttcaaatttaaaagtaaactatctagaggttgtaggcatgtttttttgttaatgcttaactgtgttttatggggtttttgaactctctgatctactgatataatttgttctgaattcttgtacccatccatcggtatataattctgccgcatgcttcttcttattcttctttttttaatatcacattcgtaattcattatggataagatgcaatttttcttttcgattaccccccgactcccttcactgttttgcagatatcattgagtctttcaagtagtttgcttagtga

SEQ ID NO: 6811 - DNA, 1470 bp, Populus trichocarpa
  Intron number 1 from transcript POPTR_0004s04320.1 (locus POPTR_0004s04320) derived from phytozome v7.0 (chr-ID scaf fold_4; pos 3096964 to 3098433 reverse strand)
agcacaatccgggtcaccagtctgattttgctgaggtattttgcattttttttacttgtgttcgtgttgtgttgtggaaaaaaatggaaattttacgatttttttaatttttctctactaaattgtgttcctagggtttctaggttgttactggagaggctttaatggtgtaacttatgtagttttaatggtggaatagtggaattattcataaaaaagctgctaaaaccagcatttcagtgtggtctaagccttgatattttttaattctttgattgtttagcttctcttcttttgaaagagaagtatgatacaaatgctagaaatgtttttggtctcaacttttttcttttcatttgatagcatcaatttctgtttggtggtacacatgggaaggtttaaaattaacttaagtttttgagagacttttttggtagatggagactgtgcacagagaatctgctaactaaagaagtttgggctattagaaattagtaaaagagttttgactattctttctatctttcatttgtttgaaaacctaaaagagcctgaaaagtttagattagagtatcatttgtcattgcccctcctcctccaccaagctgatatcttagtttgctttttctttcttttttttcatttagaggtagcacttgaattatttccagagcttagttccaattgacgtagccatataaatgttgaccttggattaattgttgagtattccttaatcagctttcgggaaaacatatttctgttatttgtggttgagtggattcttaaatggcaacatgattttcttgttaaattagttatatgattgaatcatagactttgaaaaaatgagtttggctttggtgacaatacagtgaacaaattagttgaagttttaaatgaatgtaattgtggaattaggtccagaattgggggatgtgtggtcttaagattatctactttttggaggaaaaatgatggttgtcctggtaggaattttcaggtgctggaaagagaaaagcttataagattctgtacatgtgtttttgtggttagtttttggtgcatctgaatgtacaggaatgctaggattttgaaggattattttccatcgaggtatttattgagggataagattttgttccttacattgtcatggtacaattatttgggggattttagtgtttgcctagctagttttggcaggatcaaaatgtcctcttggcttgagttttgctttctcattttgtttcttttacgtgtcatattctccaatatgcgatcctcgccttttctttcatcaatatattttttatcctacagaagaaaaagaatgtttgctttcatattcactaggttagatgctgagaaaactataattttatatctttcttgttttcttgtcggctcttaacaccatgggctataactgcagactatctacaagatcagttttggccagatatactt

SEQ ID NO: 6812 - DNA, 2373 bp, Populus trichocarpa
  Intron number 4 from transcript POPTR_0003s09550.1 (locus POPTR_0003s09550) derived from phytozome v7.0 (chr-ID scaf fold_3; pos 10867431 to 10869803)
ttcggaaggtgaagagccctgttctagtgatacatgtaagcatcttttcttcctgtagtcttctttagaaactctttatcatgctatcattctgctgagaccttggttcgccaagcaaatccttttttaaagggtgccctgtcaactgattgtacgagagcttgagaatacattgagatctgaaatgctttaatatgcatgaggtcagcctgtccaagctgattgagatttctggaatttgtaatttcgatcaatacaatgccgaagtttgcaatccaagaacattaaatggaatccttttctgttacaatgaccataaatagtaatgcacaaaacataataaattaaatttaatgagtgtctttgagcactcattatcattattttggattgattaattaggctaaatgccataattaattgtgttggtaatatgttggcttataagctattgaagtaatagtgattggtaccatcttcactttttaacttttgctataaaccaccaaacacctactaagttaagtcaacttgattaatcatcaaaggttaagttaaaatctagtgaaaacaatctattttgttcaattttaaggatggacaccatcaaaaaaattgatttacaccgtaaaatattctgtcggtgtaaaagttgtgtttctatctatacaaatatcactgtttgatatttactgagaggaaagtattgttggctagtgtcttgttggagattttaaatttatcgataatttagtcggtgatttaaaagataggttgacataatattagcatcgatgataaaaatagatgatgatcaatttttttgtcagattattcattagtaaatattatcggcaaatcaccgaccgattaattgtcggtatatatcatgtataaccgattaatgcacaattagaatcaccgtcagccatgttctgtctgtgaatctgtaggtttataggaaaatggatttgttgtaccgactaacacaccaacataatttttatgtttgtcgatgttttagtaattttttttaaatgctatcaaataatttgacattaaataacattaaacaaaaaaaaattaaattaaagaacatatttaatattattaatttaactgtacaaattaatagtatcgtcaacataatatttttttatttttttttattttttttattttatttgtaattactgacaaaatattactttgaaaatttataagagaaacgttccgtcgctattaataatatcaccaacataatttttatttttatttatttttgaataaatggtgcttgatgtacacatgaattgattgttatagtgtaaaaaatgcaagagatgtgtctcccttagagatgcttactctcgagattcccacctgaaggtccacgtctagtcgtgaaaaaagatatctatggtcgattcgattctacaaagagtggattcgcccagtatgttagcaagtaattggaaggttgcaggtgaatagataacaaattacgtgtgtattttgtttttgttctaacttatggcctacttttggttttttgagaagttttttgtgctagtggatgctcatcactaacgcctatattttgatacaagactggggttgataaaaagaaaatagctacataatttctccctttaattaagtagatgttcgaactattgtaacctaatggtaagtttgttcacaattactagatccaggtctttcatgcctggctattgtaacctaatggtaagtattgacagtagagcctcgtcgtctctctttttctttcaacctatctccttcccattttcaatggtaaacatggtttcatttcgtttctgagagagaaaagaccttaccgagttccagaaactagttgcagtgatttcgtggttagggctattaaggatgttacatatcagaatctatcaagtttcagcactaaacttgtttcgtagttagggctatcaaggatagtatcagaatctatcaagtttcagtactaaacagttaagttgatcgcatggttggggtctgttataggcttttggaattaggatttactctctccttaactgcatgtgtgcttatatacatgcatattccaagtgcttgagaggatgtttgcaaaatgttgctttgtctcttgttatttcatgctaaatcaccaaagtcattgctattctaaattcccatgtgcaaaggcgtgtcatcctctgaggttcacttttaagcatgtcgacaatttcatctggcttaaactaggctgaccaattctgaccacgaaacttttatgatgctctttgcatctgaactgtctgaagcaggttttgagatgggttgcattgtatgttttacagggcacagagg

SEQ ID NO: 6813 - DNA, 931 bp, Populus trichocarpa
  Intron number 1 from transcript POPTR_0014s16870.1 (locus POPTR_0014s16870) derived from phytozome v7.0 (chr-ID scaf fold_14; pos 12993266 to 12994196 reverse strand)
gagagagattcaagagagctcttttcctggtaggttttcttcagctttgtaaatatatacatttttttttgttactggggtggcaataatctaatattttttttgcatgaattactgcttttcaaccgattttctttttccttgcggtaattattctgttttctttactcttttatgtttttccttttctgggttcgttccatcataatcctgtttgtttgtttttttggtaaagaaggtaagagatggatcctttttatgttagcttctttattactgaattccttgcatttttggcatcaggttattggattctgtgttttttggtatttgctattcgggatgctggttgattcttcaaatctttggggttgaatttcattattggatttaattcctgttttcatgcgtcaagtggatttggttgattttttttttcttcctagtagctagctgttctgacacgaaaagtcatactttgttgctttattgggctggcttctatattttcacactgttttttctcttctttctttgaaagaaaaaagtcaagagcttagcacatctttggaaagtaattataaatttcatgaagtcttaattttttacttcttcatgtggtttcttaattaaagccttggatttcgctggatagatcatgttcttctttctggagttagaaaatttgcagttgcctttttttgtttttgtttttactgacctcttgtttcttctatttttcactttttattgtatagaaataattatctaaaataatcaaggttgtccatgcagtcatgatttctagagtgacattccgactctctttcgatttcctgtatttcatccttgttagcaaagataatgacgttttccttctctggtattgcttgaaggttatcttaaaatctgaagattgtaaaatccattt

SEQ ID NO: 6814 - DNA, 3356 bp, Populus trichocarpa
  Intron number 6 from transcript POPTR_0018s13620.1 (locus POPTR_0018s13620) derived from phytozome v7.0 (chr-ID scaf fold_18; pos 13889164 to 13892519 reverse strand)
tttttgcttcagtggtctggtgctttggcacttgggtgagtgagttatcttcattctttttaactattacagaactcagcctgttttgttcatggtttccaatgatgtattttcaacctctcaattgctgcacatcacctgttatttctagttataggatatgaggaggttagtcaatttaggacatcaagatataaaatgactcttaaggaacaaagatcatattcattctatatcattattgaaatgttctaaaatcaagttggtccagagaaggtttctcattttaatatacaacttcctttgcgtacagtattatagaatttgcactggtaaatttactatggtagaaaaaaataataataagacattgtgtataattagatatgaaaaattataataattgcaccagaactactaaattaaagaataaggatttttttattttaatttgtccaaaatgttatcaaaatgctttgctgattggtataacattattttctaaggttttagacatcaaatattttgataactgtacgtcggctgatgcatttgaccaaaaaacatatgctaagtgctttttatgagatggtgttctgtaatttcttgtgatgaaagataaaataaggagtatcatgttttcggtgggtacatataagaccaaaaatgggaagggggggggggttgggatagaggagaaaaagtgtagaagattctagtagaaatcctggaagcagtgtctcaaattttagaaaacttcatgttgacgtggtccttttacatcacttaaaggattgtgtctctggcactttcacatgcctaatgattttttggttagtcctgactcttaatagtaaatgcctcaatataacaccccttgttgtatatgaccataacacaactcacatgcttagcatgcatgtatattaaaaggaattctcttttctttggataagagaatgcttatttcattgaaattgcagttctttaaaattcaggtagataatatcgaaagggccaagcctatgatgctagaacatgtgattgttaggttatatgatgtcattatgacttcctgagagtgcacagaatggaattcccattgaagatttgagaaatacaagtcagatgaggaatttgaaatgagattagctcttgaatgttctcacaacctattgtctggtgcgaaacctgtgtgaaagtaaagcaaaatctgcttgtggttgtgccatcatgggattgaatatgaacctgacttgctaatgcgcttaaaaagtgggctaatgatgacaaagatatgtgagaaataagatggcgattttgatttgtgaaatacgattcttggttaccagagaaaggtttcttattgcaaggaatggcttgtgccaagaaagcttacaggtataccttgagatgaaatttaacaaaatccaagaggatgtgctttatgtggctagatttggttggttgagaagcagtatcttaataaagaaaaagaaattatagctgagacgcaaatgttaggacatgctttgaaacaataaatgactacataattaatgaatacatgcatgaggagttaggtggtacctatttaggtaacaaagggaaggcatctaaaatgggttgccacttccattttagacctatggatatgtaggtgatcatgtgttatcccattcaagtaataggagtgaagaacggaaggaataaaccaaaaacaatacaacataattgaatataggaaaaggatccatatgaccagttctaaacctcttcctagtctgtaaatgggtgctggaccagttggttaagctctgttctaattctaatcgagttgttagtctctgtgtcctaacttacgccttggtattatagtgagagcacataactttaaaattttagcagaccattaaatgctttggctcattggttatgattacgcagttgggttgggaagccattgatcttggaatggtattataagcatcacatcattgttggtagtttgcagaatggttaatgtgttttgtgtttttcaaaagagttgatgagggctaaatttctcctttgacactagaagccttttcctttttcttcaattttgttgaagagaagagtaccatgtgataatagttacattgttgtgccttcagaatctaatggaaggattgaataaagacacgaaaactgaaaagctaggggcagcatttatttaatcgtaagaataggtgaggtgaatctcaaaacacagacaaattctatgaaatatgcactcttatagtgagttaataaaattcctaacccaccccttcacatcaatggataattcatgattaattttttaaagcttgttaaatctgtgaaattcatggaccggccacttttattagtaggattaacaggctaaaattatgtgtatgctcttattgaccttggatttcaaagaatcatcttttccccaaaaccagctcatgaccacttctgaattctgaccagatatctactgcttgactacaaccaaggaaacaagaatatctctacactgtgaattatctttaagctgagagaaaatatgttatatttctgtttatatttgtattgattaacttacattttataaattctatagctaagggtttgttagctatgaggtgttagagagtaatataaaattatttttaggcctcttctaaccggttaagtttttaggttgagatggttttttgacatgatatcagagctttaatgatcaaaagttaatgagaactctcattaaggatgtcaaaataggtggtcttaaaaataattgttacctgcttgagaatttagatcattagtgggtccaatgagagcaaggttgacagtgaactgatttctatcacgaaaaaagtaaacaatgcaaggggtcccaactgtaaggtgctagtaaaagagaacgagagtaggttataagttgactattttaggaagagagaaaaaaaaaacaagaaagacaacttttccctcttgaaaatctttaaagcactctttaacaattatccctgaaaacctccctataaaatcccacctctcctttttcaacccttaagctgcccacctaaagaacaatcaaaccactttttttatgctaattgctaatattttcatattgttgtgtgctttgttaagcttactgtatccttgttcataaaagatgagactagaactaacttgaaccatggaacgctgcagctgtctttaaactaatattaagatgaagttatgattagtaatttgaatgtatgttgagttagatgtttggttctcattcatttcatctcatttacttttcagggcgacatctgctatttctc

SEQ ID NO: 6815 - DNA, 1216 bp, Populus trichocarpa
  Intron number 1 from transcript POPTR_0011s11350.1 (locus POPTR_0011s11350) derived from phytozome v7.0 (chr-ID scaf fold_11; pos 14072318 to 14073533)
tcttatattaaaacccttgctgaagttgttggaaggtaatttattaaagtttactccttaattttatttctcattcactttaattgtttttttacttaattttttttgtgttaattgttagttttagtagatgaaatattgatattcgtttttttagaaattatgggctttgtatattgattaatttttatttcattttcaatttaacagactgtatggaaacccaagaattggcgataaatgatttcaattctttattttttagcaattctcaattttggaactaaatttacatcttgaaatgaagtcaatgaattaaaaaaaatgtgatttccatataattcataaccgcacccaaaagagtgttatttacttggaatcccatacaaatagtcgttgtatatttccattatccaaaatgctccgcaatacgttgtttttgaaacctaccaaatatagctttcagctcttcactgccagcaaattataatgttatttatttattaatttacatcaaatagaagtgttaggctaaatccaaataatatttaaattggttccaaatggagggattgaattagaactgaatataaatcacctctacatgtagaattgatgtcatttttatctcagaatttgttctaagctagctgtgagttaattgtttttgtcattttttattgtattttatgtatttatgtgttgcatttggttgcttattatttagggtctgtgcatgcttccatccatgttgttgatgtattttgtggtttctttatgattagttatactttgaaaggttgcagtttgctgttttgtaagtgtgtttgaggtttatgaattgtacctaacctattgctagaggggtttaagtgcattttaattacacttctctaagaatcaggagtttgattgcttaattgttcttttatctgacttcgatgggaattgtgttttatagcttaatatttgatttgtgttttagattacagtaagtgagtgctattctcagagtttgaatattccttgctgcttttaatatttagcatgtctatctgtgctctttcagtttaggggagttgtagaaatgttttttttatctcactggaggaatctggaattaaatgggtttttgtgatgtttgaagtcttggttatttaaattttgtggctgtatgacagtgaggaagaagcgaggaaaaagatctattcagttt

SEQ ID NO: 6816 - DNA, 841 bp, Populus trichocarpa
  Intron number 5 from transcript POPTR_0018s01970.1 (locus POPTR_0018s01970) derived from phytozome v7.0 (chr-ID scaf fold_18; pos 1781206 to 1782046)
tcaatacaagagttggtgtggcactacccatccaggtaatcttcgacttggtgcttggttttcgtagagtattctaccgacctcgtaatgtacctcgtaatgtacatgtctttgatattggtatcagaatcttgttaattaagcagtcacgagttcgaacctcaccattttcattctatttgatagaaattaagcataagataatgtgaacatatacaagtttcaagtccaaaaagctttcacttgggagaggtgttagagaataatataaaatcatatcttgagaccttgtctaaaagcttaaactattgggttaagtcattattttacaatatatgtgtggtaaagtttcaccgacattgatttaagaatcatgcttttccttaattgaagttaactaaagcattgatttctagtatcttaagatataaatagaataaaactttctaagtgcagactgcagacagattctttcttttgataaagaagactgatactaatttcagctcccttttcttttctttctttctttttcggctttgatacagcaatcaagcccctttgtcacgttgtttctgctgagatatagtgattttactatgttaaacattcttttgtaattctggggaatttattcctagtttgagagctggtatctgccaagaaagctcatctgtttcaccctatgtcatgtttgttgtctaattaactcacacgatatatacaaaatctgtctaagttagtgcacatttagtggaagatcttcattattatttatatatcttttcctgtttaacttcatctaggtgaaaaatattggattcactggggttttcaggtt

SEQ ID NO: 6817 - DNA, 1942 bp, Populus trichocarpa
  Intron number 2 from transcript POPTR_0005s22980.1 (locus POPTR_0005s22980) derived from phytozome v7.0 (chr-ID scaf fold_5; pos 21822953 to 21824894)
tgtaagagtggatacattggactggactaccccaagtggaaagatgcggatgtgctaattattaactctggccattggtggaactatgggaagaccataagagggtaagtttaacccatccagttacgggttcctaaggaagcctttaatcatttgctttatgttttaaaactacataaatttacttcaaaacaatctagagaagatttattttgtctctttatcttcaaaatatgtttctatctttttctaacactaagtgctagtctttgtgtctttatatgtagctattttcaacttttggcatcgctgaatctggagaataccacactggggcacaataactatctatagctttttagcacaactggtctgcatatatgcataactaagaacatttgagggtaaagccggcctattcgatcgctttacctccatgagctggctcttgtgtgtgtgtgtacgcgcacgtgctcaagcatacgctttctggttttttactttgccctatagaattaggataagaccatatggttactgtagctggtctgcttaaaatgcatgtttaaggtggaaaatgcatctgccagattatagaaatttaggcctcaaggtggctagtttagatccgtgaagatacacacatcttgtttgttcatgtagtctcaatctgaacggcagagagtaagacatattatctgaacacttaacatgacctggttcttttgtgtgtaagtgtgcgagagcgtaaactatcgggtttttttttcttttacttttggcactatagaactaggataagaccatatgagtgcaaagatagtctttataaaaccttttctgtagctggtgtatatgtgcaatatgttttttctcagctcagcaacttggggatataatgggggaaaaaatccttgtgaatacacagaataacttgtagatgaaagcatgtttcgtgtggcaaacacatctgcaacattatggaaatttaggccctaaggtgacaagtttagaaggagaaaggtatatacagtttgtttgttcactaaagagtttcaatccgaggggtagtgctgaaaacatacatgcattgtatttgctgactagaagaaaatgtgtttctgttagccatgaatatggtaaagaaattattcatggtgagattatagatcttttgaatgccatgatttactgcagagtctgctgaaacttgcatctttctattgagcttgaatgcaccaacatatggaggaagttctttggtgtttgttcagttgcatatgagatggcgtgtgccattgtagatgtaaacagaatattatgaaagttgagcgcacgagaagggataaagtaaaggcagaatatgaatttgaggaatattcccaacttcctaagcatgatgaccaatcaggtttccctggaatgaatcctctttaccacttttaaaccaaagtccaaaggtgtgggttaagatgggtttgcagccttcaactggagtatggcattcaaaccaatgatttaacttgatttatggacaaaatggagaaaatatgaaagggtttttatctatttctttttcattaccgcatataaaatcacccacagctagtacgtttgccttgcaataaaaccacaatcttcttgttgctgctggcatttcatttcattataccatcagagtaacaatcttcttgttgcatgcttttgtcagttctagttgttattttacactgttaagatgttgcattctcgctcatgcacacttcatgtaggaagaggcaaggtcagaaatcagaatatgatttgttcgaggaattaattgtctcagagttgctagtgaagctattgtctgttcatgctataatgttgaaatgatatttgatatttgcttttatgttatttgccaggggttgttacttccaagaccgggggggaagtaaag

SEQ ID NO: 6818 - DNA, 940 bp, Populus trichocarpa
  Intron number 7 from transcript POPTR_0006s09390.1 (locus POPTR_0006s09390) derived from phytozome v7.0 (chr-ID scaf fold_6; pos 6901825 to 6902764 reverse strand)
tgtaaaggtatggggttccaccaccttgatctcttttttatttttaaataactagtagttgtagagaaggttaaaattctataatatatgtaaatcatatccatttcacttttttaataccattttcctgtctaaaactatgatgagtaaatgtgtgctataaaaatccgaactcaccattttcatttaaattattacaaattttgggtgaatagacaaatcttctttgtgtatctttttcgcatcaacaaaatttttacctctggaatctctagttctttcaattgcatgttctattttaaggtgtcgtaagagttataatctgctcaaataactggatttgaacagcgaagaatgaaaaaaaggttaaattgaaaggagattaggcttatcatattctggctatgtcttggtcagatatagaataagatggttatggttaacaaggacgatgtatttatgtcttagtgtcctctccaaacaaacatgattgggtgttgtggatttgggtttggatatcaattccttgcttactggtaaatgtaagtaactcaactccatatgtctcaatctcaaaaaaatttgggtttggctacttggattcgtgatttcttgtttagggctttggagaaataaataaggtagatttgtcattcaggaccagacaaaagatattgcagctgaggtggaaaataatctaatgaagactattattctgcctttttttacatcagtaaagttttttctttcccatcaaccttttttcccgttccatattacttctgtttggtaacaagcaagacgtaaaatatatcagttgatccgttaaacctgaactcgatgtattactttctcgcttccttgttaatgttactgacaaaacaaataaagattgaaaattcagaagctcaggttgtggcctttttatttcaggattcag

SEQ ID NO: 6819 - DNA, 1939 bp, Populus trichocarpa
  Intron number 2 from transcript POPTR_0006s21640.2 (locus POPTR_0006s21640) derived from phytozome v7.0 (chr-ID scaf fold_6; pos 20674224 to 20676162)
taaagggaatatcactcaattcactatatttcccggtaaatcgttctccttttcatggtttagaaatttgcatagatgtctttctgattgttttgttactttttttttttggtaattcttgtcattagttacgaatttgcagcttcaaaaggcattgtgaaactttgtattgtgctctgtataacctctggactacagcagtttgcactatttcttaacacttttttgccacaaaatgattgttttatgatcgaggctcgagacaatggaagttgtttctgcccaaatgaggatttataatttagccagtaattaagggtcaaataggatataagagtagcttttcagttttcattcacagtagtggatgtccccccaaaaggctggaagcatgcagtggcaagtttaaggttggaagcatgtttgaatcaaattagataaactagagtgttaagtgatatggtagatcgatccatattattactaagaagggcacttgttggtttgtgggaaatacaaaaatttatgatttcccagaatataaaacaatagttacaatttaactcttgattcaccaaacaatgctaccatacgcaatgtgtagctcacatggcacacacaggttgccacacataacctacacagtgtcactatgcactcacaagacacacaaatatgtctggctgtaactcaacccacacacaacacaacacaatttttttctaaaccacacaaggcactggtgtttttttttttccttttttttaaggaaaaaaacactagacacacttaagagaagaccaagttcttatatttatagaagttgtaaccaataacaagttctaacattaagtaggaaatcatctttaaataggactaacaacaaatactaggtctagtaggacaccaatacctattaggagatcaaatttctaggatataaggattaaagattaatatccacttggttaatttccaacatgatttctgtttagagagtggtagataaggaatagttgtgtgtgaataatgaacattcatactagaatttagccaaaaaaatccacttgagaaagatatattatgagaaaactggaacattcactgctcaaatgtgctgcggccatttagctctgaacggtgcccaaagacttgcattatttttggaggacttttatactgaaatggataaaatcataaaattagttcttatataatttcagagccaacaatgtctattctatgctagatgcttgatgaacttagggataaataaatgtcctaaagaagatttctttctcctatgtatgataaggaataaactgaggcaacatgaaaacatgattgttgctaaactaatcaaacatgtgccagaaaaaacatggactgtgatctgatgtaatcagatccgtttgcatggagaaaacatgtatcacccgttggaagaaatcgtgatcaatgatgattgcatctcgaagtcatttcttggcacgcagatgcagaaagcagcgcggaaatgctgcttcagtcattctggaaaagggtagcttgaaatatgaagtgctcaactggtctgacatgtcttcatctttcatggcccaaaagaccaggtgatatcataagggtgaaatactgcttcctagcatttatattttccagaacctgttcaaagactatcttcttcccatttgatacactgaatagtttatcagagaactagatacacttggttattttgatccatcgttataaaagaaagtatcacatggagttctggtacctagttgatagatcagccattcaagtccaaatttatccaccaattgttttctctaggcactttcaatatgactatttgttaaccatcaaggtaatttctcattcaggtgactgcaaaccttcaggtggtggacagaaatctgttcagggagccatttca

SEQ ID NO: 6820 - DNA, 3121 bp, Populus trichocarpa
  Intron number 6 from transcript POPTR_0010s17170.1 (locus POPTR_0010s17170) derived from phytozome v7.0 (chr-ID scaf fold_10; pos 15883000 to 15886120)
tcaacagccataaactttgcgttggacattgccaggtatattggaaaatatttcacacggtttggcaacactcagaattttcaagaaattttactaatgcacaattttatccatgattttacaaattttatcaacattaaagaacctaataagtatcattacaaatttcttgaggatcctaattagttgctaacatagccaataaattatttttttgtgacaaaggtatcacaaccaagttacagattttgcatgctaacccagatgagcctgagtctttttttttgttagtttatttattgtcggtgtattttttatttgtattatttatattagccgagtttattaaacccaatcgactcaatgacccaaaccacaaattgtttatgcttttttataagctcgtggtatcatggtatctttttttggcatttgaagaaatttgggtaagctcgtggtgtagcgcaggctcctatatatagtgaatacctaaaagagcttatctctaatggaagaaaaatggttggtgttgattaatttcacaagcgcacgaatcgtaacaagtaataaagtgatgagtagagtattgtcccacgaggatttgtaaaaattactactaattaccaaaatcttttaaattatgatctatttgagaaatcaaatgagatagttttcaaaacaaaaattaataattaaaaacaaacaactaactgattaaatattattgaattcaattctactgattctaggatttcagacttaccgtaactattcttatgtgaactttctcaattgaattaattactcctaatgttgataatcaggttttctaatttaaacactaatctctcttgagtatcaacgaattatttcgacaatcaaacttcatatactttacgaaatttctgaacttgtcgaaatttattaagtaccgtaaaacctttaacgattacaaaagttcctaggatatctttatcctatagatttcttaaggtatttcaaacaatagctaaaacaattatcacttctcagtctcaaattgaattccaaatcatgcagatgttggcctaacatacacaagcattaaaaatagaatgaaatactcaacaacttaatgtaataattcaatcaaagaaattgttcacatattcatagtaaggttacataaaaaatcccagaataaaagtctactccatagttaaatgaaagagaaacaaacttgatacgatgaacatcattcaaaagcagagagtggcagaaaagtagctaggtgtcttccaatcgccctgattttcaacccttgtttttctctgcttttcgtctcctcctttttgccgcctcctctcttgtttttggtgtattctaaggtccctctacgtctctcgtcaccctagctgatccatgtttttctcttttatattctggcctttttacccccagatggaaagaagaaaatttccttctctgttttgtattcctttcctatccggatattgcgggccggatttgaggcaggaaatgtgcgaattcaaagatctctatttctggagaaattgtagaaaatcgaatcttctttccaacgacactgatcttgtaatttttggacctctgaggcttgagatatgggccataacccgagacagcatttggagtgcaggaagttcgggtctgattcaatccttgtttttcgacttgctctttgggcttcaaaacaacaaaactgagttttgtgcccttcatatgttttgtagatcttcatcttagatatttgaaaatggtgatgaacgcctggaactgagttgtataacttcctttgcagcccaaaatcaatcaatgtttggttttactgccggattctacctactcagtaacctagtatctgaaaatacattaatttcccacaaggttaatagttcaaaaagggatccaaaattctaattaacttgtgcaacacatccaaaatatttcaaaatcaagtatgaatagtggaaaatatacatgctaaaaattctcttatcaggtggatgtaaggaaactatcttagtagaaattagctattctgagaaatgcatttttttagcctttacttccatcacatggtatttttgtttggaaccatattcctttggcatgctgtaagccagtatctttgctgttaggatctgactccttggcttttcagaaaataagtgagtttgtgaactgagactggcagtagtatgacttaagtatagcagaacctctccactttcttagttgtaaaccagtaaattttctagtatttattctttcactgataacattagtttttctttcaacattcaaacatgttgggtgagattctcttgcaaacacctctagaaattcttaatataagatcattttgaagtgagactaattacaatgaattgattcaagcatcttaagttttctttttttttattgattaacgaggcaatgcttgtcatataattcctattcaagggacgcttttctattttatgtcttgttggcttgggactcttgtgatcaattgtacttctcattagaagatgccttttggaccctgtgagggctatacagtcctgtttacatcacatgtgcctttcgtcctgcctagcttcagttacctaatgacattttaataagagtattttgtttgggtgcaactgtctgaatggtcctagtatttcattcatattttttgagaaagaagaatgagaatagttgaagaaccttacaagtatcattgtatttgaatgttaagaactgtattcttttgttgaattccctttttttccacgcttagctactttgtgaaacatgtacaagccatatagccttgtacaaataatagtgctggatttcatttatttggaaaaccagttgcagactgtaataaaattttttggtgtggccaagagagttaaaaaaacaagggtgtgtatgagaattttaaaaacttggccatagtctccccatgtaggtccaccagtagggaaaacaaaacattagaaaatctgaagctgtcgcaaaaactattatcaagtaacagatgctaccgtagtgacgttaactgttatgctaatctgagctctgtctatcttatgttaccagaggc

SEQ ID NO: 6821 - DNA, 2272 bp, Populus trichocarpa
  Intron number 2 from transcript POPTR_0001s02220.1 (locus POPTR_0001s02220) derived from phytozome v7.0 (chr-ID scaf fold_1; pos 1671356 to 1673627)
ccatttccgagaaggtattgatctccactccaatctttctggtcccatgataataagagatgatgatcatcagctgtctaatcaaattcacttcctacaattgatttttatttcatttcaatttaggttttgtgagactaaaatggaaaacaatagtagaaatactcatgttacgtacaagggcaacaaactaagcttgttcagacctcctacttgctttcattgtttctatggatagtttatgctgcaaggggaataaatgttccgacattcagttgtggctgaaagttttttggattttggatttcgtatacgagttggagaccgctgagggtactctactgatcactgcctgtatcatcatcattgatatctcgcttgggccgttgagagtgtttggtcgttgagagtgcctgctattacacgttgtgccctgaatacgatagaatttactattgtttagtttgacgctgcaaattgcgtggctaaaaactagagaactctgatctaaaattacaatctggaaatttttttattttataaattatcttaggaaaaatatcttacaattcaatttaaatacaaatagaatatcccaattaggtaaaatcttaattaaattgaggtagatctcttagcatgtctctctccttgtcactattctcgtacgtagtgtaagatagttcaagtgtttgtcaattttctgctaatgaatacttagatctattcaatctaatatctataattggattctttgcaatgtctcctaagttcttacaaatggcctccactaaaatggaaagtcacattaaaaatactttttgttcattgataatcccacctacttatactaattgatgcaacatgtatagataaaaactaaggttttcaaatttaaaattatcacacttaactatagaaaaaattgtagagaactctaatatattctaaaaagtctttattttataatttatcttttgaaaaataacctacaaagctgttgaaatacaaatacaagaaaaaaaatgttctaattagtaaagtcttaattaaatttaaaatcctaatcaaaataaaaaacaaatccaaaaataacaagaaagataaattaaattttcaaacaatagttttcgagtctaatttgagcctgaaataaaaatagttggcaaactagcttttttttttttataatgctgatctgataaaatttcaatgtaatctaataatagaataaaaaattatgtttgttgtcattaaattatgtaatagtcttgttcagaatttcttgaaacctaaaataatcttaattaaataataaaataaaaataactatgccaaaacaatgaagaaaacgccccacatcagtttttctattttgtttaattaatttgtttatgggtaattttggtgaatctgtacgtagttcattatttatctacactttcaaatcatacaacacaaggttcatcatgaaaataagctttatatttcaccttgatatgagaaatcaactacggctgttgctaaatatttctcatgttcttattagatttctttattcaaaataatagccatgtatatatatttgcaagatatcgcaagtaataatacgttggaacatatatacccaaggcaagtagaaatgtgcatccatgagactcttttctgggctccacggaaaaaaagaaaaaagaactcttaagaacttatataatctcagtttaatttttgtggataaatggatgacccctaatcgtgagttgggtcgtttctgttacagaatgatccgacaatgctctttttgttttataaagaagggtttgtggagttccagtgcattcgtaaggtggatagaaagagactcctcaatgaagaggggttttattacaatttctggatcgatttattataggaatatgtagtttcaactttcaaggtgtatttaggaaacaggaaagcagtttcgacactcctataatttgttaccataactcgcatatatgctggctgtgtatgtcagaaaatagttacacagaactggttcatgtgaatcattgctgtatccaagtattattactggctgctacaatgggttcttagatgtgggccatgtaataatttctgtaaactccatacgtttgtgtgtgaattaagcttctcaaatccacacttattgtggcacaatttttgttttctgtacatttatttgcttctgtttcgttggttttgtaactttcttgaacggtgttgagtgatgcaggtagggaaattg

SEQ ID NO: 6822 - DNA, 815 bp, Populus trichocarpa
  Intron number 1 from transcript POPTR_0012s11870.1 (locus POPTR_0012s11870) derived from phytozome v7.0 (chr-ID scaf fold_12; pos 12232873 to 12233687 reverse strand)
aaggttggtaaatctcctctgtaatggctttataatgtaggatttgattctttcaagaagaatgtatgattcgacttttcgattgattaatgtgagtttttaggtaatttaaggacatggggtggttgcatttttttgatacgatgtgaagtggccttaaaggttgggttttttatgtcaaaggatgctgtgatttgatgtcgtttgttggctgatatatcgggatttgtcacatgtttttttttcctgttagttcagttgatgtattactgtaacttgaggaagcgatgagaaacttggattcgtcaattgcaaatagatttatgattttgtggactcatgttgatggtttgtaggtgtcaactttgcttaactggagctctggtcttgcaatttttcactgattatgagaactaatagttggttcctatggcaatttccttaaatctcgagcaagaagtcttgctaaatagatttgtggatattttcactgattttgctactgcaaaatgcatgctctttagtggaagatgacaatgaaatttcaatttccttttcttctatagatatatttagctattgcagcatccttttcttttatggaaaatgcataaactaggcgctagggcgaaatgctagatattttgtactctttctttagattgaaaaatagagaacaaaacgatctgttaattctgtgtatttgagactttgagagaatattatacaccggaaagatcaaactggtttgttttagcatcataatatccttttatctcgggactaacttgttgctcatttctgttagggaagag

SEQ ID NO: 6823 - DNA, 1281 bp, Populus trichocarpa
  Intron number 5 from transcript POPTR_0001s24800.1 (locus POPTR_0001s24800) derived from phytozome v7.0 (chr-ID scaf fold_1; pos 24046956 to 24048236 reverse strand)
gagctgcaattctcggcaagtttattgtcaggtaactataacccacacattaactgtatgtatgtatgtgtatctttttgctcaagtggcattttaactcagacacaaaaggaagcaaaggataacaaaattttaaatattaagagcaacataactatgaaaagatgttcaaaatatttattttttattcatccaaatcccatatgtcaagaggctattataattttttatataggaaaaactataaaaccctagtaatataaataagaaagataaaatagaaaaattattccttcaaataagcaaaactagaaaaggataataatacaaaataaaaaaaatagtaaaataaaactaaccggaaaaaaaaacaccaaggaaaaccccccgggttaaaagaaactagtcctcaagttcatatcttagtcagaaaatgtcatgcaccacaaacatactttcgtgcatgggtcaccctatcgtgattctctaaccctatcatgcgggttaatctatcatggatccatgtgagctacccaattgagggtctctaactacgtgggctacccaatcatagatctcattatcaagattttcaataatagtaactaacgaaaacaacacattaattcaaagaagtctctttcccgagagtaacctttttatccttttctatgcgagcatgtcatattttacgatctcttttaatcataattatttaactatactcaataattaattattacgaggaattgttggaatttaacacaaataaaagtgaataaaaatagaagtttgttataagtcaaaaccttaaaagattaagaatactacaaacaattacggggatactcaaaatatttaatttttattcatttaagtttcatttgtcaatgattattataactctttatatagaaaaaattataaaactctactaatatgaataggaaatgtaaaataggaaaactattcttttaaataggaaaaaactagaaaagcataataatatataataaaaaaataaagatacggaaaaaaaaactactaaacagaaaaggaagagataaaaataactgaggaaaatattttattttcctaaaatagcttactgcatcacattcctcaatatgcgtgttcatgctctggtgtattgtgccttcatccttgaacactgtgcttttaaatcttttgaatataattattatcagcaacctgtgttgaagccatgtacgtgttgtttttccagtcgtctcaacttggaaatcaactgaacttgacgtg

SEQ ID NO: 6824 - DNA, 2106 bp, Populus trichocarpa
  Intron number 9 from transcript POPTR_0006s11750.1 (locus POPTR_0006s11750) derived from phytozome v7.0 (chr-ID scaf fold_6; pos 8943421 to 8945526 reverse strand)
acctggtctggattccttttactttcagcatccaggcaagtgactgtgagcttgacatttatgtgaaagaactttgtttgtctcttgttgcactgcaatcaatgttttttggacaattgcttaagctaataatgaaatgtaatatttccattttcatggatgactaattaacccatcatagtcagagtctctgtagtgtcaatcaatagatggttattgcatattgaccaggttctggcaaaagatactgctatgttttttgcaaaataaattgaatgttttataaaaagggaagtcatgtgcccaactcacactcggctgtgggattgaaaattgaaaggtgcatcctacacttttagtatacatgcttcataatttattagatgtaaagaattctacaagtgcattatgggttttatttaactaggttgtttgtttggcttaaagttcttcattgatattcgtattaaattcccatttttagtatgatttcttattgtagagagctttctagtataatgcggattctgtgtaatatgatacatggttgggttttgcttctctaaagagaggcctgtagactcctgtatgaggttggttttggcccatgagtaaaagacttttgttatgggaagatttttttaaaagctttgaggtgttgtgttttaaagcacctttcagaagttttgcaagtaatagatgtatcctttttgtagtagaagcagttgcttggtctctttttagaagtagtttggccctttttggcatgatggtatacattttagttgtttgtaggagctccaaatgtgggtctttttggagatagttgtgtagtgagaaatattacactgggtgtaatcgaatttggatagtgggtgcgagggcttgatcagtgactacaatcccttttttgatagtgagagttaatttgagtagtaagtgtagtggaaccacactaaattcatatatgattgttttattgcttaaattcatatataattgttttattgctttgtgttaacttgcatgacaactagtattagagcgtgtagtttatatagatcatgaaattaaagataacggacattgtagccttaagaagacatgattgctaatgatcattatactaagttttcaaaagagtaaattttatgtgtattttgttgatggcttgtatgttgatgatcatgaaatttgaagatgcacgaaattcaacttgaagatgatgtgatgcatgatggaatttgatccaagatggggtttgtattgaattcctattctaaacaatatttcagttttcctatttattacaagattatttgttgtggatggatttcttatttaatgtaagatttcttatacaacaagaaatagtttggtgttgcctcgaaaaatagagatagtagtaaaagattgttggctttgacccagagtagaagatccttgttatgaataggattaaatttggcccaagagaagatgaagtctcatattttgagaagttttctgttggttacttcaaagcatctttgagaagttttgcaggtcatgaaggcatcctttttgtcgtagaagcaatagaggtgcttggtctccttgcaatagttgattgataaattttgtgcaatagaggtatattgtttggtagttttgaggagctccaaattgttggattttctaagtgagggggattggctgggtgtattggatttgggagtgggtgtgtgaggtctttgtttgtgcatgtaagatcagtggctttgatctcgttttcgtagtgaaaattaatttgggggggtaactgaacgacattaaattcatgtgtgcttattttattgtttccatagtgaggcacaaacaacacttttagccttatggtttgtttcacctttccagttgatatgcatgtttaacgcctgcaagatcagtgttactttttattattgtgaggcattgtcttcaataactaaattgcaattactaagcctgctactaccacttaggaggtatggcaaagcctatacgagacttaaaggacaccattcagtttgtgtattgtcaatgtttatagggctggtggcttttgggtaacaaagtggagttgac

SEQ ID NO: 6825 - DNA, 810 bp, Populus trichocarpa
  Intron number 1 from transcript POPTR_0006s03390.1 (locus POPTR_0006s03390) derived from phytozome v7.0 (chr-ID scaf fold_6; pos 2160489 to 2161298)
tcgaattttatccctctctctctaaacacctcaaggtaaacatctctttctctccagatctcatgtttttctgagtcacattgccgttaattattactcactagatatatcaattgtgtatcatttatgcttaattttattgcgatgtttttttttggcgttttttttcgatttttctggttaaattgttgatcttctacgctcttaatcgattagatatctaaatcttcaaaattatgtataattcgctgtttttttttaccgcatttgctgcaacgctctcaccaggtagcgatttgattgatttatccatttcttctgattttttaaagtttattatagttactgaattgagtttatagtaacgattttattcaatttttgaaattaaattatttctagttaatttatttagatttgattatttttctcactaaatttatttctaatttgcaatttttttagatcttatcagtcccgcgcaacattttagttgatattatgatttgttaaattatagtgctaatttatgcgttttttttattaaatgaaaatctattagagtattatatctgttagattattttttttttgttatcatgtgaaattaatattattgtgaattctgtttgcttaaatcttggaggataatttcgatagatgtgtcagataattactcttattaaagctcgatttttttgaagtttaaattgctttctgtagttgttaattgctgattaaatgatttgttctttgtgaaattttgggttttgattgattggggtcctgttttttgctgaagcagcaaaa

SEQ ID NO: 6826 - DNA, 913 bp, Populus trichocarpa
  Intron number 1 from transcript POPTR_0001s12930.1 (locus POPTR_0001s12930) derived from phytozome v7.0 (chr-ID scaf fold_1; pos 10026020 to 10026932 reverse strand)
ttgacaaacacccaaccttggaggacctcctttgtgtaactattattccttcactttttttatctctctctcttttctttttatctgtgtttatttggcggtgatcatcttggctcttgcttggtttcgccttctgatctttttatacgtcgatgatcaagcgtcttctttttctatgaatatgtgatacagttactacgctttagaccttgctttaatgtatattctctagccttctaggggcttgaggtacctgtttatgacaattatttagtatcattattgaggcaattagtttagggaacatgtcttcttcattttctatgccgtagaaagtatatcttaagaagtattaacatgtacaaagggatgctagttattgcttaatctttgcagccgcgggccttataataaatacattgtcgatatgttcttatatcatgaacttttgctccagctcttattcaatccttttgaaatgatttgccatcaagtaaattggtccatctaattacaagcatttgtttcggattttttttgcgtgaatgaacatgtgttaatcctgttaaacacaaaaaaaaattacaacatgttttgatggtgttaaaactgctgactaactgatctcgaacagcgcttttaatggattttggagtttgtagctttgagctagcatagaagatatcagattctgcgatagtggataacaaggaagagttaattccagatatagaatttcttggttttcgagctgtagctgaatgaattaaaagcaatgatctattatctttaattcatggttgttgctggttatttaatcctttcctctttccctttgataattgtggactttgttcagttgttgtttaacaagatctctatcacagtgtcaggtgctctcaatccagtggaa

SEQ ID NO: 6827 - DNA, 2032 bp, Populus trichocarpa
  Intron number 5 from transcript POPTR_0014s12540.1 (locus POPTR_0014s12540) derived from phytozome v7.0 (chr-ID scaf fold_14; pos 9240213 to 9242244)
ggatctcagtaagtatattgctttgaaattattctggtgattgctctcatttgctgagctaacaagcagaaatatgtagatttaaaatcctgactcgtgttctctggtcaacatcaacaaaaacttcaaacttttcataaaattgccgtctacctactcaaactactcacacattattattcactgtaacagtgtaattacagttttcccgacacaggaggcaatgcgatcttttcaccatgatttcttctattgtcattttcaaattatacgaggatatcttgatttttttacctttttttcatagtaaaataataaaaaaaaattggtcaccttaaaataaaaaaaatattaaaacttatgtctaaaggctttgtagttttttcaattttagcacagtaaaatgatttctagttttcttaattttagcacagtaaaatgatttaactacatgatttaactatgtttcgagaaaagtttattaaacttctttctaggggttttttcatattttttgatctaagggcatttttgtatttgaataaatattaattattattaaaaagacttagtggtgcgtgtaatgcacatgcaagtgggcagctcatgtggcgcatgcggggttgtttggtgatcaaacgttgctttccgcggcggcgtttgaatcttcttggtgtcctcttcgtgatgtggcggtgcgtgtagccaataattctctagtttggcgtcgacgacctttcctctcgttcttttctctctccttgattttaacgttgcactttaaaaattcaaagtgaccattcaattttttattcctttagatttgatcttttttcttttgattattatttgttttatttagaataatttataaaattgaagttgttttttaatttcatccctttttaattttttaacgtttcaaatttgatctttattttttttattttttactttgacaattttttgaaaatgattttttttatttcatgtttttacattaaattggttgagaattgaacttcttgattgagcccggtctaggatttcatgggttacgagttttagacattaacctaagtttatgagatttacttgagtttgcttgtttttttctcttttttaaaacttatgtttttttagtttcatcattcaatatttatttaattggagattgagatatcttattttaatttttttgctttctatagaatttttttctaatttaaaaatcatttgggttatctcgattttttttattgtcattatttgttaaatttattttaataatttttttaaattgatattttttttaattcttttcttagattgattgagaattaatttttcttttcagttctatcctttaaggctcgagttttttttaatattgggttttgtgattttcatcaattttctttctactcatctatcccagtcccaacacttagactaggggttcaacgagttagcccaagttggctcaatttgtttttggattgttttttttaaaattaatatttattacgtttcattcttaaacattgagttgttttggaataagctttgtaatcttttctgatttgcttgctattgttttatctctttcgcattattcgggtcacaaagtttggttagcttgcttgatttgatggttgttttttattttttattttttttatcccttaatatttaatttgtttacaattggattttttttttttttttatgttggcttatcttggtcgtatgatctagcttatatatttgatatactcattttcctatctcattcgcatgattcgggtcacaaagtttggttgacttgcatgatttgatggttgttttttattttatttttttattttattctttaatatttaatttgtttataattagattttaacttttttattttattttatgttggcttgtcttggtcatttagcttatgtatttgatatactcatttccctaggggtttggtttacagattaattaattaattaatttttgtgcagataacacggag

SEQ ID NO: 6828 - DNA, 3898 bp, Populus trichocarpa
  Intron number 19 from transcript POPTR_0017s13960.1 (locus POPTR_0017s13960) derived from phytozome v7.0 (chr-ID sca ffold_17; pos 14114346 to 14118243 reverse strand)
acactaaaagtgtctgcatgtgaatgctagtcagcttgtgtgtgtacatgttttccatgacatatgcaattgcaagtaggtgcatgaatggttagatatgggtgggtccaagatgggtaaggttactcttaacgtctcacctctttggtcccgttcattttttaaatggtacctatgtccctagctccgctcgttaatattccttttcattgtcatcactcaccaatcaacctaacattacaataatccataatttcatataaaaaacacaaatcccttaaaaactttaatagactacaatgaccttattgctgatatctcgattttcgtattacttactccacaatagttggtattatatgggcaaagcataagtatctagtttttgctcctgcatgcatatgctttataaaatgctaataaaagatatggaagttggggtgaaagttcccagcctaaatattctatatggattggtattttcacttcaatgttactctctcttttttatcttgacatgtttatttcacatataatacttgtatgcaataattcaaacagcttaaagatttgttaaaagtgttcatagaaacttaaaacagctcacttcacccaaaaatctaacatggattattactctattagactagcttttgatctccactcttttcaaccctaagatgaattaaaagataaataattgagaaaaataatactattgactgcatgttacaatatataatgtcaggttactcctttatagatatatgaatttttattaaaaagtaccaataattttttcacctttaaaagtttgtttcacctaagataaacaattcattatataagtctaaagtaaaactacaattaaataattgatctagatactatcctttctatttgttgtgttgtccttttatgtgcaatgattctagtttaagagaaagaaaagacaccacccaaaactgatttcgtgagtcttacaaaaattaattttgcacatgatgacgccccccaccccacgagtgcatctcattttgaagcaacttgtgtctcaaattaaatatcattggttattggttagagaatgttgtgattaatagccgtagtcctctttttatttagtttgtttgtttttttaagaattttatggtttggatgatattattctctatttcttttttgcaattattttgttgcttgttcaattcatttatatggttttacttaaaaggcttaaagttatgaaatgataatttgaatttgatggaaggaggaaacaatcggtctatttgattactaagcaaccataatatgcttgtttatcctataaatcatgataaaagtacaagatactctttttttattggttggagtttttcatagattcatagattaattattttgcacatgtagagaacagaaaaatattgaaaaattgggaagagggtatttttgtgaagataagaagtatgtcttcttagtatagaaacaagaaaaaagagtgttgataaatagaaaaacctttcataacattagaaactcgtgaaacttgagtaatccactgttgtaaaactgaaaatggctttgctgaaaaccatctagtaggtggcctagtgataagagcttaggattaaggggtttgctctccctgtggtttcaagttcgagtcctgtggttgctaatatgatggccactagaggcttacatggttgttaacttcaggacccgtgggattagtcgagatgcgcacaaactggcccggataaaaaaaaaaaaaaaaaaaaagaaaatggcttcgcttaagataattattgttaaagtagcagaatatcgattaaatgaaagttttattaaagttaaagaggacgttaaataatccaattaaaagaaacctttttatatattcctatgttgaggatgtaacatttcaatctccctagccacagaaggtatgatgactttttattgttatcaaattagtattgattttattttattttcattgaattgaattgctctattatttttttacttaaaagatgtcatttaaaaaaaactaattgatacaattatgaagcatgtgccatgcaagttgtataaaagttgtttatgattgtccctttgaccaaaatttaaacttagttgaccaccctgaccctgttcattgaagttttgttaaatatttaccagcttgctttaatcaatttttcatttaactactgccaccaccgaacatttaccactaccattattactaacatttcaatcacttgcccgactatcaacactcctaccttaagaattatgatccaccaaaataccaccactgcccctcaacctcctaccacaatgccaccaccacattatcatactactacaatcacctatagcataaccaccaaatcaccagcacttacctcctccactgtgacttccattttttcttccattgtcactgcctccatcaatacattttgcaatacttgagtttgtaactacttgagtaaccagtgacatcacccacttctcaacacattgtggttgtaccttggaaagattgtgttatgaagtggtgccactaattctttctcatgtaattatagtttgagtattttataaatcttctttgcaccaccacctcctcaaccaacactattgtgctacctacaccatttacaatcaactttaatcgttggtaatggtatttgtggtggtgctggtggagatggaagaggcagtgaagggggttgtggattgcggtggcagagtggtgcagggggggttaagtagttttagcctaatggtcaaacatagtcaaagattgtcaaagctggactaattggttgaaattatgatagtcaacctagtcaagaaaggtctactttgtcaagtcgatgtttggtcaaattggatacatgagtgcaactattgatagaaaatctcaggctgtgtttacttttagaaaattgtgttttatttccatctctagttctcttatatacactaaaatgatttttttttcatggaagattaaggaaacatattcactaaatacaaatcttccaaatttgaaaacaagggccttgtttggcttaaattgaaaatattaaaaggaatgatcataaaatattaggtgaaccaaacaaggtgtttttttatataatagagaattttaaaaacaaccattttgttgtttttcaactttctaaaagaattaaaaaaaacacatttttctaacaacatattttccaattagtttatgcttctatttcttagataatttttatgaaaaattgaaaaaatttacataggcacaaccttaatattgcaaatggtaaggggggttattcggtaagaaaacccatctaaaccttataattttgctactataacatgaccatttatataccattatattgtaggtgacccatttataaaaaattattgtatattattgcctatccatttgtgacatgcaccaatttaccctacattgtttagatatggatgacttaactatgtgcaatgagaaagaggatgaaatgaaataaatcttttttgtttgtatcatgccatagaatatgcgatttttgctagcacgggtgaaagtatgtttgttaatgctcgcaagttgcaaacaatattcattcttcgtataattgttaatcctttgaatcttatttccaaatagaactcgaactgttttcattgttgtaattccgtcttattcttgatttatcctttcaactatccatttagttgcttcaactctatgtgatgcatatgttattgctgtttgcttgtacttcacctttgtatcttaccctttgattctagtgtccagtctatctgtctaaagcactttgagaaaattcttgatgtgtatgtctctagg

SEQ ID NO: 6829 - DNA, 1554 bp, Populus trichocarpa
  Intron number 1 from transcript POPTR_0015s04610.1 (locus POPTR_0015s04610) derived from phytozome v7.0 (chr-ID scaf fold_15; pos 4812071 to 4813624 reverse strand)
ggctcttgaatcttttgactatatcacaagcagtaagatgatccatggatatgcatacctgaatgaaacagtagtttccctacagctgactcttgtgggaaagagatctttggttcagtttatgcttttttccatttataactttgtgcgatgatttataattatttacctattggtatatggttccatttttttctcaatcattaaacgaggaaagtctggtatgtttctccttataatagttgctccatatgctcatgatgcctttgaaaaaatattataatatttttgggaaacattgtgattaactacctatcagagtccccttttcttctacatatttctattcatgttcatttgcaaagcttttgtttgtagattactcttaacttcattgattatgttgaaaaacataatatgccaccttatttgatttgctcgggaaggcttttccactcaattttattccctgctggataacgtgaacatgagttacctagattactcataactttgttgcattgatgattatggtgaaaaacatgatatgcttgacagtatgcatacactttgtaaatcaacagaccatttaaatatcttttttctataaaacattgccaagcaatgatcatataagttatctgcaccaaaaaataaaaataaagaattgatgtgcgaagtttgatagttaagaagtaaagtacagattgtcacctgcatatactaaatgcaccattgtttaagattttcagttagtttaatagtgaccaagtttttatgtgttgacattcatcatacttagcaataagatgaccaagttcctgggcagtttctcctcatagtctattctttagaaaattagagttggtgtcttagaaccactgataattacaaacttgtctctaagaacattttcccagtaagagcaaagggagagaatattttgtcttcaagagcaatcttattttgagggcaacattgatgtggctggtgtagaacattatgtcaggatattagaaacaaaatgacttgacacctctgtttcattgggaatttctacattattatacttttggttgtcagataattaatcccattaacttgtctttaatatttcagaaatggtctatggctccatcaagctttaatcatgctgttctgttttcaatgctttgtgtcccgtctctcgtctaatgtaaatatgtgagtttgttattttgaggaacctttgaagatcagaaaattaataattgtattgaattgtttcatccggggatcacaacttcctttagtcattcctttcatttgattgcaagtgacagttatcatttcatttatgattacttcatcatcctgtactcatcctcatataggttctaggtaacttattccaagttaatgttgttcatagaattatgcttttaaggttcactctgattctgttcaaaattatctgtgagatggcatatattttgtccatttatcttgatttcattgtaaacttctcctgtaaatgcaggtaattttagctttacagaaagaatcacagtcaag

SEQ ID NO: 6830 - DNA, 336 bp, Populus trichocarpa
  Intron number 3 from transcript POPTR_0014s15965.1 (locus POPTR_0014s15965) derived from phytozome v7.0 (chr-ID scaf fold_14; pos 12040965 to 12041300 reverse strand)
gtggaagtaggtgatttgggacttgtcaggtttctctaagtgtatggattttactgcagatggtttagagtttcaatatatccaaaaataagtcttgtagtttgatttggtttttcacatcttaaaagtgaattgaaatacctttttatttaatctattgttctcgaaggtctctatcatggcaggggcattgctcgattctgttagattgttccttttgattttccatttgcactaaattcttttgtgcaggcattctctactgtttaattatggtttgccaggagatggaagtcacgattctgacagtatccttgttccggatccgcattagaa

SEQ ID NO: 6831 - DNA, 2571 bp, Populus trichocarpa
  Intron number 1 from transcript POPTR_0007s05380.2 (locus POPTR_0007s05380) derived from phytozome v7.0 (chr-ID scaf fold_7; pos 3474756 to 3477326 reverse strand)
cgcaaaagggtatctcgctttctcccttatccattgttttatatctttcttcttgcttgctagttcaaattatgaaatactcgcttctggttttgcctttaaatttccatggaacgcttgaaattttgtttcttttgattactatgttggtttcttagttgcttgtttttgaggccggagtgaattggaaataatgatggcaacaagtgtgcttagggggggcgaaatgggatttctgagttgttttggatatttcagcttctgctgtgtggggggagtaggctccctggccgcattgcatcgtgattagctaggactgaagtgtttttggatgctcgttgcaatttaattactagtaggagattgatatgagaggctcttgacttttgatgtgaagccctgtgatttcgttgtacaacttgagttttaagccctaaacaatggttgagtaatcaatgagatcatataatggaatcagataacttcatttctactttctggtgtttatggctccctccccatttgtgaaagaggaattttgatacaccttactgtggagccatgaaagtgtggaatgggttccgtttatttatttttgtgtagaccttccttgcatgtttttctatattttaatagatgacaaagctcagaagttctggtaaacaagtaaaatatgaggctcctgcttttcttttatacaactcccaacttctctttgtttaatatgttttttccattgctctttagttcaaatttgtttggtcaattaattggaaagggtgtcttgggtatctgaatcgctaatggcaacaagaatacttaagcagaagggaatgcaatttttttgggacattttaggtttttctttgtagaaggactagaatacatcactgtattgcgtggttgtaatttgtaagtgttatgtctgaaatagtttctgcgggaactgatgttttggatacttcttacaatttaacaaacacaaaattttctgaaaaagggaagtaagggatttataatagaggtggaagcttggtttttgaggtgcatacctctatgcttcaatctttattctgtagaaatgtcaatggatggcttgagtgtgacttctatggtggattttggctgtctagttatcatgtcaacggtaaccagcagaataattttagttggagcaatcatcgaagcatatttccaatttggatatcatcaactttattttactcgctgatgttcttggcccagcattatgaatgagaggaattccattaacaatgtggaatttgtgccttttgtttttcataacaccttcccaccatttccttctatatttgataaataaataaacataaagttttggtagatgcatgaaacatgagcacttgttgtttttctcgcacgcttttcttttttctgttggataaccagacatactttctttaaaccatttgctgcttgtatgtatgacctaatatcatggctttctaagtcctcgtcagtaatttatcttgccatggaattcttatgtaaatgattaagttggaaagtgtggtttcatttcgttccattatcttccattttttgttttaagtctttggggttgctgtatttctggatttggtagtatattgttaccttggttgcaacctcgaaacatgctaatgtaaatgttgttattcttgccctgtctgccatctagtaatcagggatcttctttgaaacaatgagaatagtaatattcgaatgcattatcaaggtaaggagtcaaatttttctgcaggtcaccttaaactacctgtgtattttacacgtactctttaaaagggagaatggttctagaggttgacagtctggcacttggatggaaatccaaatggtcactagcataagtccatgcaatatgtgtcagactgaaaggcagaaacttaccgtactatttatttcatgtccatggcatgaagttgaatacaatgaggctcctggatgtattatgggactggggcatacagtttaagaaatagtttaaggccatgacatgctacagtacagtatggagtgacaatgactctctgcaattcgtgtagctattcttctaccgagtgtcattggttgcatgcctactgaaatataaatgacccatatggtatatccctgactagtgcagaaaggtgaaatgggtctatctgtcagcaaatgtctgggataaggctgcgagaacttaattatgctccaaggaataactgggcgggggagtaagaggactggccaaaggcaaaatgatgcttctaagtgtgtatttcaactcaatggtttttgatgggtagtcttgtgtatgtactatttaacataaagttggagctgtacatttaatggtcatgacaccatggcaatcaataaatcccatctaaatcatttgcttgctgacatatattcggcagcctaatttgctggagatataattgcatccttttgaaattgcttagagattttttgttcttcctgtggctggagatatgttatgtgctatgtgccttattaagtactagtttgtgcagtcaagcagcaagccag

SEQ ID NO: 6832 - DNA, 1701 bp, Populus trichocarpa
  Intron number 11 from transcript POPTR_0009s08760.1 (locus POPTR_0009s08760) derived from phytozome v7.0 (chr-ID sca ffold_9; pos 7905292 to 7906992 reverse strand)
aaacagagcagaggcttgaggtttgtctttcaacaattttgcctcttgaaattctaatgaaataagtgctacactatctttccgttaaatgtttttcaattaattcaaaggctatcaaaattcatcatagttcatattagtgtatcaactgggtagtgatcattacatacgcaggtgagcaaactataactggagtaacaatgatgcatgttattgcctgtgttgacatagtgttacaaaattgtatttttataattttaatatattgtttaccctgtacgttagctgagaaatatttaacttgctgctttactgggttaaactaccctgtatcccccctttcttgttagtatcataggtttctgctataaatattaaaacattgtggtgttgtgcatctgcctatttaagataatggatgcttccaaatcataatctcttttagcctctttctttttttaattttggataaataagagaaatgaaaaaaggtgttgtttgatttcctggtacaactagctccaagttagatctaggaatttggagaataaagattgataagaattaaattgaagttcttattttaactatcacgccccgtttgtttgctggaaaatagttttcttttggaaagtgaattccggggaaagtgaattccgggaaagtattttccgatgtttggtagtgtaatggaaaataagttggaaaacactttccaatgtttggttatgtcatggaaaatgagctggaaaataacttattaatgttttatttttctcaagtttattaaaataatgaggaacaaatcttacaaattaaaaagttgaatgagaatgaaattgaaaaaaaatataatttcataaattatctcaagtaaaataaataataatcaaaataatagagatcaaatctaaaaaattaaaaaaaataaaagatgaagaaattaaaataataataattaacatttcataaattatttcatataaaataagtaacaatcaaaagaatgaggatcaaatttgatagataaaaaatttcaataaaaaaatgataaggaaaaagcaaatagcaattataaaaataaggaccaaagttaatgtaaaaattaaattttaagagatgaaattgaaaaataaatattcaaaacaaattatatatagcaatcaaaagtttgaggatcaaatttgatataatcagtaaataatgacatttctaaatttttcacaactcccggaaagtgttttccgcccaaattttccaggaaaacactttcctggaaaccaagccaaattttcctttgattggaaagtgttttccgttgaccaactttcctaatgacaaacaaacacaggaaaatttggaaagtgatttcccggaaaccactttccggaaaacaaacacagccaaaagggaaaacactttcctggaaaccaaaccaaatttttctttgaatggaaagtgttttccgttgaccaacttttctaatggcaaacaaacacaggaaagtttggaaagtggtttcccggaaactactttccgggaaatttttttttcatggtggggctgttgtgtgattgacagctagttacatcaggttatcaccagtctcattctgtatggtactatctttttctttctttttcttgaaattgtagttttttggcaggccttgcatcatccatttaccgctcccaatcctga

SEQ ID NO: 6833 - DNA, 1053 bp, Populus trichocarpa
  Intron number 1 from transcript POPTR_0005s03220.1 (locus POPTR_0005s03220) derived from phytozome v7.0 (chr-ID scaf fold_5; pos 2120867 to 2121919)
ctgttactagtcttgctaagaagtattctgttcaggtaattattaaagttgaatgctttttggtcactgggtttcttgttagatgttcgttcctgtttgttgatttggggggaagaaagtggtttttggtatgtgggaatcttgggatatgcttattttgcttgtagaattggataaaatgagtggtttttgccatgtttgtgatgtgcttgttttcttcttcttctttttttgtagaattggagatgattctgtttttcttgttgtatcattgctttgtttgtagagttgaaaaggtttgtgctttgtaggcagtggagtttttgctgtatgattgctctgtatctggttattgagaaatgggaagtttaagcttctgtcctctatcatttcatttggttgataggacagtatcatgtaatgccacttgaagtttgtaccgcatgattttggttctgctcttctttctagattgttaatgagtaaattatgatttttttaaaaaaaactggcaagctagcatgtgcaaaaaaaaatttagaaaatagcgcagctagaaaaaccgcagttcccacctgcaagttattaaaaaaaggcagctgggaactgttatttttatagaaactgctggtgggaattgtgtttttattttttaaatagcacaaccaatttttagtgtaaaggtgtctgttttttaagggtgtgtttgattaagttggcacactgaatttttcaaaagaaaaaaattcttcaaattaattaatttttaatgtttttatactgttctgatgttaaaaataaattttaaagaataaaaaaaattattttaatgtatttacaagcgaaaaacactttaaaatgctaaacacaaccaacattctgcagttcccaactgcgggagatgctgtaattcgctggctgtgctatttcttatttgaactatggagtcttttgtagttgatttatgatagaagcttcaaagtaaatgcactgaacatttatatatattttctttgcttggaacaggttagggatataaagcttttaaataac

SEQ ID NO: 6834 - DNA, 1312 bp, Populus trichocarpa
  Intron number 6 from transcript POPTR_0016s05590.1 (locus POPTR_0016s05590) derived from phytozome v7.0 (chr-ID scaf fold_16; pos 3522911 to 3524222)
tgcactactttcagctgttgccgcgttctctcattgtaagactgcatccttttcatgttcacataacttgtggccagttaaaatgaaacaaggcatagactaacaagaatacttgccaaaatcccatatacctcattccgcaacatgtttcccgctattcatttactgtgaaatcactttccatggacactggaagattgaatttgattcattttgcattagctattgaaattctatcatatgtgtagatttttttatatctattccagtggtttgtttttttttcattaattcaaattaaatgataggtgtattggatttgctatgatacaaaagtctttttttgataggaaaaaaaaatgtaaatgtattcttatattagaaaaatgtataaaaatgaatatttacattttttaaattattttcgattttaaatataagaatagatagcataagagacaagagataatctataaattttgactttatttaactttatctattttttttcaatgttttttatttgagaatcttttctattcttatctgatccgatctgttcttcttttttttatgttcaaaattgattagaaatttttctatttcatttcttgttagtttaatgtttggatatgtgtttggttctccagtgggttaacgctcctgtattcttcaaaactcaaccactcaaaagagttgaggatttagtaaaacccagtttagatatgcaagaacaggttccaaaagttctttgttttctttctatagaaatttactgaagtagctctggtttctatatgtccaaataattatgtcaaggaaagccagtttcttgtgaatatcatacgggcctaaaaatgtcgatcatgaagatcgtggttctttgatgatttgaaataatctgatctggtttgttgatttaaaatcatttgatttgagaattctgtatagcattatattccagataatttccatggtatcaatggcttcccatatatttggtacacaataagccttcatcactttgctagcctaacaaatgacagaaaatgggtgacacccagttttaaattttttctagttatacagctattaattattcccaaggcaaagtagcaatggtaatttgttgccttttctccttatgagttcagtccaagctcgaacactttctataatgttagtttgtttcactggatgtgatttttgtacaaattaaactctgcttaacattcatatttgtatctgtagatgtctttatttattatggacaattaatatgttgcagtgcaaatccccatagtttccttaa

SEQ ID NO: 6835 - DNA, 379 bp, Populus trichocarpa
  Intron number 7 from transcript POPTR_0018s01420.1 (locus POPTR_0018s01420) derived from phytozome v7.0 (chr-ID scaf fold_18; pos 1362070 to 1362448)
ccagaagtgcctatcgaccttgtagcccaagcacagtaagtgttttgttttgtttagattagctattctttgttagcctgttactctctttagtccatggatctttacaaatctgcatgcatattctgtgcattgtttatacacacgcatacacaattacacacaaaagggagaaaaacagaatttctcaaatttaatgaaaatgaatccatatagcgccgcaagtgtacaagaggcttgtttgattctttatctttaaacagatgatatagcaaaccatccatgctatttttctggtctctttctattctgtcattttggtagataccaccagtttagtttttaacatttgttcttgatgcctgtaatttccacaggc

SEQ ID NO: 6836 - DNA, 429 bp, Populus trichocarpa
  Intron number 1 from transcript POPTR_0018s04280.1 (locus POPTR_0018s04280) derived from phytozome v7.0 (chr-ID scaf fold_18; pos 3613556 to 3613984 reverse strand)
tcttcctgtaacttcaggtaggttctctctcttttttaaattctcaaattttgaaccaagattttgtgtttttaatcactattattttactgatacttaaagactactgttgtaatcaggtatcttttgattttttttttgttcaatttgattgtaatttgcctttaattttacaatttctagcaattagagtgtaaaattacaatttgatataaaaaatttgatttttttagtaataattcgaacaattattaattagtttgtgaagaaataaggctatgtctatgtggtattggtaggctggaagatttttatattttattgtaatcatgcattctcaaaaaataaaaaataaaaaagaatattaggatttgattctgtgatgttttttcaggtacgctgcagggagttggttggacgaagtagtga

SEQ ID NO: 6837 - DNA, 881 bp, Populus trichocarpa
  Intron number 11 from transcript POPTR_0014s10550.1 (locus POPTR_0014s10550) derived from phytozome v7.0 (chr-ID sca ffold_14; pos 7865635 to 7866515)
ctggaatactcggtaagtattttttacctccccacaactaccaactcgtcagcttcattgtgcacgcagcagaagttgacccaactactttggttactaattcttccatttggcagaataactgtcatttggatcattagcattatggtgcataaatggaatttatctgaatagaaaaaccatccaagcgtgtttgaaaactggagtgggtttatcatgctgtgatgcaagttgataatttgattcatgatgaattaacgacaaccttgatattgtcctatcctggttgcatgtccttgcatatctaattcatagaaaccaatatcgtatttaaccttgtcattttttttattctttattattagatcttttgttaaaaaagtttttcctttccttaagatgtacatgttacttagctctattttctggatggatagcacactcatgtcataagtaatttcattgagcctggcagacataatcttgcctcccactcatctgtgaggctccctaatgggaatcgcatgaatttatcaaggtggagctttggtccagggacctgaacaattgctataaaaacaattattagaatggagaaaaagcttttacaaactgttaacatttcatgacttctgcttagatatcaaaatctactaaattgtgttcatattatgggtgcataggaattgtgcctgacatatatagggagcttttctagaacactgatgcctcctcacatgggctatattccattttgaagtgtaccaattttttgtgttacctttgctcaatttccttttcccagttttcttcaccatggttgctgaagttgagattataatgactgcattcagggaattggtcgtgagagagtggagagg

SEQ ID NO: 6838 - DNA, 4935 bp, Populus trichocarpa
  Intron number 6 from transcript POPTR_0013s07670.1 (locus POPTR_0013s07670) derived from phytozome v7.0 (chr-ID scaf fold_13; pos 6516689 to 6521623)
tttggactaggtaatcactccaacatttgctctactttgctttttatggaaacaatatcggttgtcaatgatttttttttcaaaaaggaacctgagataattgcattacgattagtgtgctagaaatataggtttttagatgtaaacttttctttaattttcggggctcttcaattgattggcaaatcctggattctcctcaaccgtaacatctaatgaatagcttcttttatggtatcatcaaggaaataggataatgtccaaatttgagcatacctgtaaataggaggatttcctaaatgtccatatttgagacctggccgacccagggcttggattgatttggactgaagaaaaaatagaacgagtgacccgacttggcctggtcaaaaacccgagtcgaaccatgactcgattgtctcgggtaaaacccgaccctcaacttgatgattattttttgaaaaaaacttttttggttgaaaacatcattgttttgatctcttttttaaaaaaagatttttagggggtctactcggattgaccctcctgacctgtgatcgcggccttgcgttagttttataactatgatcaaaacttcttttgagaaatggaccagacccgatcatttctcaagaacaatagctaaaggagctaatacaatcactttttcaagggtggcttcttttaggcaaacctcctagctgtctctgcatccttatttccttgctcacaattttgatagagataccattgatttggaagagatctctagaaaagtctttagtgcttattttagccaactcttcatctttctgtagtgaattcaagtcattaggagcctttttcctagcctgtgctaaattgacaaggcaaacccttcctcccttggaaggctttcagggaaaaagattattatgaacaaaactagtggatctccctcttctcttctcatcctttcaattgagtgacttcacttttgaatagagtgagacctagcccttctacttctaagtcttttgacctcttattaacaattaagctaagctaattggaacctgtatcttagcatctcctcctttcacaagggatttgttctgctcctgcctggaagagtgatttcttacctctcttttgggtcatggatagcttcgatgactggacttctcatccttctgcatctgcccttagttacaatcgaagttgaggacaagcactactttgaaaaggtcttgtcatgtactaaaatggactttttgattccaaagcacttcactcttgtccacatccaaactggatccttttcatgtcttccaagtgcatgtagcatattgcctagctttgagcatacctgtaaataagaggatttcctaaatgttttaactttataacgaaaccttgttatagagttgcttaatatttgcattattaaaccaattagatgtaattgttcgaatttcatgtgacctgatttcctagtaacttaaaattttgaagctttttgaagtgaaaagaatgaaactggagcaaatgatgattgtatgtcagtgtagctatccccaaatgtagaaggtagaaggttagggttgtggtgatggtgagacttacgttgggtgcagtatagatgaatttgatatagtagtatgatgatatagtagtagatgggaaggcggattagaaggttgaagatgtaggccaaagtgtgttgccctttctctatccttcaaaatgtgtgttaacatgaaatgtggagcatgtagtaaccgagaaaaaatgggatgcaggatagaaaagaaaagaaccttaaggttatctagattagagttagagctagagccaatgtgttgatttttagtgcctcaatgtttgcatcagatctgcatttattttcacaggaagcataaaatcaacaaaggtataatggaaaatactaacttctcttgttggtataaagcgtagcaccatctaagatatatgatccaaaatgcaatgatgatatgcagaaatttcttcaatattctttgcattataatgtttattgcatcatttcattaatgctcaagttttttagttcttgaggagtttaagtagagtccaagacacataaattaagcataacttttaatccaactattgaaacacgttgaaattttgacagaagattttaaaggccatgttttctattaggttaaaatttcatgatgattggagatcaaaaaggcttgcaaataaggctcagaagttattgtctgagattgtttttatttatctttttttttttgaattctttctttatttatttatttagattaggactttcaatttgattagtactttactatttagaaattataatgctagatggattctattaattatgcaagttttaattaggaataattttctataaatgattttagttttaattaagaatctttttctatatggattttagatctaacaaatataaatagaaatgcctagtttattttgagaacattcatattattcaaacgttttataaaaaatcaaagattttctctaattcctcaatagtgttagggttgtaaccttaggacttgagaatcctagcttttatccatgctatatgccatgtcaattggtatcagagcatgttggcctctttgatggacgaagacggtagcaacccactttgtggtgcaggagtggaggccccccaaggtgctatgagggctcagaagtatatactagattgttttgcactagttctggaacatataatggatcattcggagcaaaccataataggtctagcttggctaataggtaacacaaacagggattgtgaaaaggagatgaacatttatatttcaataagattccttgttataaaaatgtatggcttgtcacttacaaactttcttgtggtgctagagaatggtggtttgaagttctaggatatagagcttgtacgggtaaacctttaactacatcatggaaagatttgagacaatcattaattttgaagtctatacaaaaaaattatgaagacattttaaatggggtagataagcaaatagattgttattatttgctttttgttcagccttctcgaatagaaaggaagaaaaatatggaggaagtgtcgtctcttcaaagcagacattttcaacatcacctctttgataaaaacaacactattgcaactactaatctacctgtcaatgtttcatcaaccaatggtgaagaagaaatctagaaagcttagaaattagtatcttgtagtgattttgaagatattgcaaacaaggacatgaaacaaatggtaatttctggcaattcttctaaagatattatgaaagattcttgaagtttctttatatacaaaggttgtagtattaaaagtcatagatgatgatgaggtcgagtttgaagaaaaagaatatgtgaaggaaccaagtggatttcataggatcgaaaaatataattaaatatggatttttttcttaccatgcacgtatcataaattaaattttgaagtttatagatcaaagacatgttatttcaagacatgttatttcatgaacatgttggctataatgctatatttgaagtatttgttcttttggagtggaatagttcagagggcgagttttcctgaagtgaggggactatcatggggaaatctctttaatattcttgacatagtaatttttattgtattaattcattaatgattaagaattttaggttctgaggagattaagaagacttcaagatgtactttggtagatcaaacataaaccgttggatcaaactgaaattttgatagatgatattgaaggtcttgttttttatcaagttaaaatttcataatgatcaaagaacagaaaagctttcaaataaggtttggaagttattgtgtgagattgtttttatttactttgttgtatttggatttttttttatatttagattaggattttcaatttaattagtattttactatttagaaatactaatgctaaatggattctaatagtcaagtaaattttaattaggaataatttcttataaggattttaagtcaataacccttaattatgaataatttcttataaggattttaagtctatataatttaaacagagatgtctagtttgacatttagaatattaagattttttataaaaaatcaaagattttcttcaattccacaatagtgatagggttataaccttcgagcttgagaaccataattttttttcacgctataattatttagaaattttggtttagaattaaataaaacaaactgtaaaatgccatctgagtactcttaaaaattcctgtaggaacttactaatgacataaattgatccagacaagctaagacgagtgtgaacagtcataagcacaacacttacaggattttaaatagttttgtgctacagtactgctgttgtatgatgagtagtgagttcttaaacaatctcataccaagagaccattaagtattgtggtagtttctgccttttattttggttccatgttttttatttataaaacttgttttttatttattttgcatgcaaaaatctatttcagaatagttttaactaatatgtttttttttctaaactacaatcgcaaaaactatcattatattaaacacacgacactataactcatgttatccaggcttgcttaacactcacaccccaccaaaacaatgtttttgtttagctgttcttttttgtacttcctgtgtttagttaagctcatacctattatagtaaccaaagctctataatgcatttgtaatttttatgtcgaacaagcacacattctgacaatctatgcccttttgcttggttttgccttttcacttatatgttcaaaactcaatgaacacctgcagccaattcaaagctccaggttttgtactctggccgt

SEQ ID NO: 6839 - DNA, 3430 bp, Populus trichocarpa
  Intron number 7 from transcript POPTR_0017s10890.1 (locus POPTR_0017s10890) derived from phytozome v7.0 (chr-ID scaf fold_17; pos 10458956 to 10462385 reverse strand)
tttcccaaaactttgaatcattgtttgaaaaggaggtaataacttctgcttcctcctctctccacttcttactgaagttgtttcattattagcagtcatgtacaaggaaataatagcttctaccttgtcttctctcaatagctcgctaaacttgttctgtcattgctatgtacatgtatttaatgcatcagtcgtagttagccatgaatgaagatctcagtaacatgatgtattcgcatttataaatttttgtccataaattaaaatttatcatgtattcatgtcatgatgctgtcaggaattttcatttttagcattaagttaaacttttagctgaatgatcatgttattaagtatgtggctgatcatctcgggagaattgaagtttttcaggacagtcatattggaataaattatgaaaataaattcgtgatgtatgaaaaaaatttgggaatagaaaaacctctctgattggagttttcttattctgtcaaattatatatatttggtaaacaagtccgaaagtagatgtctgctagatgaatgatggcgtggctgttaactgctgatatcattgaaaacgtggtatgtaccacataaaagcatataatcataaatcgtatgccacattagggtctttctttaaatttctctgttttttgccctttccttttgcttaaacttccccactgaccaaacaccttcactctatcacttttcacacttccatcattcaaaagtatcccaataacaatcgtggccagttaattaaatgtttccctctcttggtgaagttcattgttatgaagattcgctgcttcaagttgctctatgatttggttatatttatttccacaagtctaggaatttcttgggtggtggattagcatggtgcttttgcttgggtgtattttggtagctatgatttatcaatgttctggatggtcgtatcactttcttggttgaggtagaacttctatgggttctttcatcccctcttatttgtgttttgattgcattttgtctgacaaattgcatagaagagtatttttgttgttttgcactactatgaggcttaactcaatgacgagataaaatctggggcacttgttagttaatatggttgctaaaaatctgtagacatttaatcacgagataaaatcttcagattcaacacaatttacatacaaaacatgtgagccatagactgaatcatagatggatgtgaatcatgcaattcagttataatttaattcaacttggtatggtttgttgcatggcagagtcaactcgaataaaaaataaaccttagaggaaaaatgcataatttggaagagatggtaaacatcaaagatgctccaaatctagaagtcttgaacgacaaaatgtaaagaaatcaaaattcctgtaaagaaagagaaaggagtgggtgaaacagtgcaagaatactgataatggtgatatcaatattagggaggattactactttttattaaaattgccaggtttggtattttgactggtttgaaattagcttttggatatctttgaagtaatttacttgttaggatatccgagtaccatggaacaatttctctaatcttttgaattttgagactttagagtcttcaataacttgaaactgattaagtgaaatgaattgatataccttctgttcaataaatgtttttttttttttttttgttagaaacaaggttattaaaatcgggattctaattaggatcattggagggttcaaaaaatcagatcagaagtttggaatgtaatatcataacaccttgtgaattattaaaaccctacaaaataagaatacacataggaccttaactatcataattcaaacagttagtacaaaaatcatattcttgtgggcatcctctaattcatatcaaagtgaagtacacatacacacataaagtaaaacaaggaaattatttttttttggacaaaagaagcgtattcacagagttaagaagtaccaataattcatgtgaggagaaacaagaaatgaaaagaatcagtaataggctgtttttagatgaaaatagtaattaataaacatgtacaatgttttgaaaactcatctccaattgttcttacttaactgaattctaaagcatttgagatgcagattaaattatgttctactttggtttttatagtcaacaaagcaattttgtcacttcaatttttttttttttgtagatgtatcttttaacaatagcaaacccttcatttagggatgtttgatccacccagcctagaaacaaaagcaaacgctcgggcattaaaaatatttagtattttggttttttaatattaaatatcaaatccactatagaagtattcattatccatatctcataaattaaacagtgaagaaaaaagatccaccttctcaaattaaaaaataaaaaacaaagtactaaaactaaacagtggctccaagattaaaataaataatgaactaatacaagaaaaacaaaaaggaaacccgactacaaggaagtagcccaaaaaatttgagctgatataaagtcctagaaaatcccatcaagatctcaattttatgattttagctattaaaattccgattttactattatcttacacaaaaatgaattttactatttgaatccaagattttaataaacatggttagaaatttgtagtgtggtatttatcttctgcaatatatttttctttgtttccaaatcttaaaatccacaatttgatgtgatttaaaatatgctttctagcatgaattgaaacttgatttgacaaccataggttccactatgacatttttaacagatgccaaaatcattcattgcatgcagttggaggacggttgggttaatgatggaacaaagatagtgaacctaagtatccaaaacaaaaaaaaaacatgtggaaggggactgatttaaccaagctggcacaatgtaagggtgtgtcttattaatccatcaactaaaacatggacaagagacaatccaaatttctgaagaatatgaagtgatgatgatgatgtaccctaggtgagttgttaaatggaccttctttcatacctctttgatggagttgctatatcattttagagaatagtcctcctccttggaaacccaacgctagactaattggttcgtcatcaatccagacatctttctggtcagaatacacatcaatggtagatttcttggtttggggtataaagtttttgaattatctgtgatcatgtaagcaaagttataattgctatttctgtatattcctgctgttttgtggtaaattttaaatgtgactcatcgctccttatctcttcatttattgatgcctttatgaagatataatatatgtatttattttttcatgtaggtggtcacccttgttaagaaatttgagggtt

SEQ ID NO: 6840 - DNA, 886 bp, Populus trichocarpa
  Intron number 1 from transcript POPTR_0018s14310.1 (locus POPTR_0018s14310) derived from phytozome v7.0 (chr-ID scaf fold_18; pos 14560198 to 14561083 reverse strand)
ccactcgtgttgttgaggtacatgtataatttgcttcgttttgctcatcttcggtgagattcttgatttcttttcttagatcttttgtctcgttttttgttttcggaaatatctcaatgccctttgttgttttttccctaaaactttcctgaatgttcttcctcaacgtcccggctattcacggaaggtgcaagggagatgaatagtcatcttcctctgcaagatatcgaagaatctcttaggaggaggttggagaaaggatcttagagtgtttaaggtggagcccggaggttaccttctcttttcacgtgtgtctcttccattgagtctcattgaaccagaacctttgattgatccctcctgaatatatatgttacgggagcggaatttaatcttggatcagcttatatcattctgattaagtgattttgtagttaaggtatctctagattatatgttgtagtaatgctattcatcctgcttgagttttccggataataccagctgtttgatggttcgagtcgtatgagatatgtcctcggtcgagcccacccgtcaatgataggatggatattttggaatgaacagcattgcttaaagaaacttgtaacatcacatcacgattccacgagtagggttttaaattttgtaattcacatttttttagttatttattgatgttttgcagtgttacaaagcaatgatatatatatttggtcgaatatgcaatttgtatgtcagattatagttcacagaattcaaagattattattctgtctacttatgtaattagttttctgatatcaatatttaagagcaaattttaatatttgatgtgttgtgatttgcaggtggttcgtcatttaattctagagggacatattgt

SEQ ID NO: 6841 - DNA, 1267 bp, Populus trichocarpa
  Intron number 1 from transcript POPTR_0006s19600.1 (locus POPTR_0006s19600) derived from phytozome v7.0 (chr-ID scaf fold_6; pos 18642336 to 18643602)
acttgcgtcctcgtggcggtgctccttttctgaaggtctttatcattacctttctttggatctactcgcttagctatgtaaacatgtttgttttgattttatgtgattggctttttgggttttgaattggttctgctatgttaagcatggatttgattccgaagaaaacctggatctgtcacttatttttttcattacttatgatatctaattgctgtttttatttgttttctgggctctgggattagcttttcctgggttacaaattgaagtttgtttattcccggatggatttggcaactgtttttaaaattggttcaagttctgctttccaaatccagcaatcttccatgttgttaaactgatgttctcagttattcatctattgagagtcggattgttaagcagttcaacgatgatgaaaaaggttattccattgtaagcattgaaaagctcgggaatttttagtgtcctaattcttgttgggttacttgatatgtgtacctgctgtaactatggataaacaacaaaatgtaagctttaggtggacatttagattcttagtaatagtgatgatgaaactttggaagtttagttaggttctgcttttccagtttattctactagatgtgggtggtagcttgcggtttagcattgagcttcatattctgcaaggttgacgctcagctttgcattttcctgtggtttattatataaaaaagaatggagcttttgaatttgtggtcgggccaagcaaattgtaccatttctatttgcaccattttttattcttaaagtctccatattgaactatatcaaatccgttgacaacttgagtttaattgtccatgttaatgatcttacgcatgcccttttctgtcatattagaaaccaattatgacaagtctcttaacctggtttgatttatgttccagttgaactcttctgccccttcatcttttattttaacgaggaaatgaagctgcatgatatcagtcatttttgtggattcaaggcaatagctatatattattaatgtatattggtggcatctgttgcaatacagcatcttagttttgcaagccatggcatacatttttctcaatgaagttattgctgggggttttccctcattgcttgcttcttgcaatagcctgtttgtttttttttttttagcatactcaaccttgttgattttgttgcaagctcttgactccaactgttttcctcttatagactggagacttgcggttcgagggtcgtgacc

SEQ ID NO: 6842 - DNA, 978 bp, Populus trichocarpa
  Intron number 5 from transcript POPTR_0012s07050.1 (locus POPTR_0012s07050) derived from phytozome v7.0 (chr-ID scaf fold_12; pos 7723879 to 7724856 reverse strand)
tcatcagcaatccaaccaaatacggtgcgtgtgcttcatccctttctctctagctcaactcaattttactctgccagtcgtagcaggcaggtatctaaattatctttatgctgctacgatctgaagttgttcattaattactcttttttaaaaatcaatcctgacgagtctaacgaagattcgttattttggataattaatccaacgacgagtttagaaagataattaaatcggtaaaatgtataataaactactcagccttttcttagaaaaataccacagaggccatcctgaacatgttgtagcaatttccaaattgatacttatttgaaagttctttaattttggtataaaataaagtttattctttgtaatgaatttttttagcaactagattcttgcatgattgattgctctaattaatcatgtgctaatttagtataatgttttagtataattaatgcttgtaatataatgaattattacaatcataacgtcgtccatgacattgcgattctatttaaaactactcatctgaacatataaattgtaaatgcaatgaactattaattaaattccgtaatccattatattcaacaaaaacatactataaaatttgatatttgatttacgtagatattaattaatcactatatatcaaagttaaagtgaagtggaaacatatattaatataaacgggttggctgattttatttatgcattttatataaagaaattaatctattagtttttgaattatataatagatgataatcttgttatattacactaaaactaaataaactggtctcgacaaatttaaacctagttcattaattgtcttgagagctggctgccattgcagcaacgaagctttaaagacaagacagtgaggaaattagaaaagagtagcttcggacgttttacatgacaagttctgagtttcatgtttgtaggatttgacaacgcggactcgcc

SEQ ID NO: 6843 - DNA, 1880 bp, Populus trichocarpa
  Intron number 1 from transcript POPTR_0014s10540.1 (locus POPTR_0014s10540) derived from phytozome v7.0 (chr-ID scaf fold_14; pos 7844590 to 7846469)
ccactcttctcttactccttgctgctatctctcaggtaaattgctttccagttgcaatctctatctatttattctaaaaaaatccgatcgttacctctcagttttttgtgttctagtggagagatatcaatgcctgttcgaattcccccccccccaaatctggcggttgattttgtaatcaaaatttaattgcatttgttcgggtttaattctattcaattaaaaatacgagagtactctaattcgttgtaataaataatttaatataatcactaaataaatcgcatgtagctagaataaaatttaagcttgtaaaaaataataataataaacaagcatataaacacatgcaaaattaaactaatcaagtcctgtttcttaaacatgcctgtaaagaaagcattatattagtcagattatgtagtccatttgttgaaacatctagatgcagatcacgttgctataattgcatactttggcagttttattgttcgtacgcaaatggattgattgtaatcagtgtcttataatttcaagaacactactactaaacaaaatccatgaactaggaaaacattctaaaatatctctctacaaataacttgaacctagctctagaatgactagatgaaaaaaaagtagaaacgttgggaaaagcagaggagagaaggctgaagagctactgttttgtgtgtgcagaacatctttcactcagctcttttttaaattgatttttttgaactgaaactaatggagaattaattctgttaattaccataattaattctcttaattacccgtcataaaaaaataaaaacctatagttttgccttaaaattagatgtttttactttgaaaataaaattgtttaggtagatgatgtttattctttagattggccaaaaaaaaaaattctttatgggtctaaaatgctcacatgtgacttaacttttaagctcaagatccatttggtctagggtttttttctcttaaaagctctagtgctttacgggttaaatttaaactcttcaacttcatgctaataaaatataagaaaatcttgcaatatttcaatgctagattgatagttcttgggtttgcaaaacatgctaataagagtttttttatatcaatttcttattcacccataatttgttttaataaatggtagatgtttgattccacttttaatttgactcaaatatagctattaaatatgttttgaaataaatttataacagatttaactgctttttaacacgttaaaatcagatggataatgactttgtttctgtatgcaagttcctatatattctgtgggtggaaaggtgatatttttggaatatagagaaactgtgaagaaaatctgttaatagcacagatggctaaagaagccaggattaggcaattaaaaaaaatacacgaaattttgatgtttagttaattgcacagtaatcgggggtctcttttcctcggccaaacctcggattgattagtttcagctctgtcatctttaactgggcagttttaatcagtcgtttttgctggaagtgttttattgcaacccgccatttaagttaataacaaagttattgttttctactttgagtttttttatttttttatggagctttattagtacttatgcaaaaacatctttaaagtaggaattaattcataaatatgaccttgtgaatacaaatcagtaggaggtcgttatgtcggtctgctggtcagtcttatctttaattaatttccgttcttggattttttttcctatctgttttgattcttgaatggttactattctaaatttgaagttattgaatgttatgtggtcaacaggctactgcggaggaaccagtctccaagctcaaact

SEQ ID NO: 6844 - DNA, 870 bp, Populus trichocarpa
  Intron number 2 from transcript POPTR_0007s03540.1 (locus POPTR_0007s03540) derived from phytozome v7.0 (chr-ID scaf fold_7; pos 2033496 to 2034365)
aagctccgaatttgaggtaacataattctctcatttgctagaatgaagtttggtgtttccatggccagttttttaatctcaattcattgcctcttgactttgttatttaacagaccatttttaagattcaattcaaaagggaaaataaaatgaggctagggaaaatcaattagcgctcacctttattttctaatcatattatttaaataattgttataaaacctgatttggctcaataggtcctaacatctaatcatatgaagtaaattttatattgaattaagttgatagttcatctaattaaatctaattgacctaatgatttaacccgcaaatcagttgaattgagtgagacagaacatgatttgacctttttaggtttttttcaaagcagcaatgctgtaacaatgttattttagagcagagttctataactatcatattgatatcatctattgattggaaaaatagcccatccagataaaacatttcatgttattgatcaaaggacaaaaccaattctgagttttaacttttaacagtaaaattcatgttcaacctccacaaagtatacctattatagaaggaaataaatctggctttgcaatgcttatgttcttgctcaagtgtcctaccccaagtttggggcaaggaacaggtgcgtaactgaacagcttctatatattctacgagtataatactgagttgagcttatttgtcttcactgtccaaaaaatctccctgttgcacttggggcatcacaacaagaatacttgccctgatatcacttatctcatcaaaataattatgtagtttcattgttcttgatgtgaaggaagcttgcggacaaagttgcagctgctggattct

SEQ ID NO: 6845 - DNA, 870 bp, Populus trichocarpa
  Intron number 12 from transcript POPTR_0012s05140.1 (locus POPTR_0012s05140) derived from phytozome v7.0 (chr-ID sca ffold_12; pos 4643605 to 4644474)
gcggtaagagtacaatttcttgttatatttctgtcgtcagagatgtgcattaccttgttcattgtaatatactcaccaggggcacttgaggagatgacagtgaaattgatgatcagttgaactagaatgccttttacctagagaggaaggtttggaaattggggataaacaaacaagtattgttacttgtcgagaattggatttcccctacccgtaattatatattttacagaatttatctagcttttctaggatgcttattggtggtttattcttttgataccaagaagactagaattttcagttttcagtttgatttagcttttccaatggctttatggggaccactggaatgactgccatttgcggtttccttgtgctcttgctgattgaaggaaaaggttggacagcttcttcggttcttcctatcctcaaggaaacattcttcactgttagaacagaaattcatcgttaggataaattcccttctaaacaataaaattctcaaggtaatcgaggatctttcgcacattcgataatacccattaaaacgtgaacttcattcccttgggcaacaagaaagatctaatacacagttgactagtttatatgaactttcttgtggttcaggtatcataattgttttgatggatttcatccaagctcaatagaactacaaagtctatcctctccatcctgcacaggatacatcccatcagcattatttgttaaattctactgaatcattaatataatgataggcacaaaattttgtcatagtagtctttctgtttacttagctatgaaatgcgtgaagcatcgtaatgttattataacaattattgtaaacccacccaggtttatttcggc

SEQ ID NO: 6846 - DNA, 1802 bp, Populus trichocarpa
  Intron number 2 from transcript POPTR_0017s01290.1 (locus POPTR_0017s01290) derived from phytozome v7.0 (chr-ID scaf fold_17; pos 895981 to 897782)
gaccaagatcattaagacaacttctattctggaaggtattagaatcttctattctatgcttattttgatgtaaaaaaagaaaacttgtatgtgcaataagtggtttgataataaaaaaaattggataatccatcaatgaagaaagatttgacaaattaaatgggattttgattcttgcaactgaagggcaagaaatcagtagaaaaagggactcgatcagacacagatgacagatgtttgtcagaccctgaaatctttggtgaagatattttgccaaattcctcgagaagttgatcttgttgagtctgagattgaaggcaatttttagatttcaattttagagtgtttagcagaatcattcttgaagaataaacaaaagatgatgaagtggaagataatagaaagattaatcaagatgatggtgaatttaatttggagattagtaagaagcaacagacaattaggtgaaagaagggctcaacaaggtttcattgattgtgttgttgaacttgttgttccgtgtgctgtgaagttgttggaggacagtaatggcttgtttgagcaactattttgtctgttttcaatttgttagtaagtatattgcagaaattgaccccacacatgagccactttggagaagaattgtggtattttgtactgtggaagatggattatactgctatgttttgagaaccaattgatttgttttaaaaatgtgcaattgcatgaattgagtaaacggttccgagttatcttcataatgggctggtgttgcttgcatacgtggaggagttcaacaaagtagaggatatcttttttgacatctataataacagatggtttatcaatactggtctttgtgagagtttgttgggcaagaaagacagcaaatgacttcaagttcttgttttcaaatggcaagtaatgctcagaatattttatgatgatatctgggggcctgagctgttgtttgactttgacatgttcagatcaaatctgtatgtccacttgtggaactacataagaagtcttatcacagatctttggcagggctctatatgcctgtcaataagatggatgcaggctatactgataacagactggaaaagaagtatggggggtgttgtggtgcaagagagacagtatatgatctcagattttactgctggaatgcgggttgagggggatggagattgaagtggattttgagttgttgaattgcaaggtgatagagtggatccttacggagtattcttggtgtctgagcaaatttgtgctagcccaactcattgattaatcctacaagagctaagggattggtgtgatttgttgttatatgttctgatattaaagaaagctgcacaggaactaggaaagttatggcagctttatgtcacaagttaaacagcaccagtcatcaccttattttgaggaagggtgactttgggtttatggagtgtgcatattgtttagggtatgtggtggtggtggtggtttgttctgtttgggtggttgatgctctcgtggtgtggatctagagggttttggaatttgtgtttgtagttggttttggggtgttccttgaggattgtatgctgtccaggtggtgtttagtgatgctctcttcaccctggtgcatctctagtttatggtgggattctgcaaatagtggcttcggctcattatatttttcttttttccctttccgaaaacaagattgtagttcaaattttgacagaactgggtgttgtatttgcaaatttgcaggggtggattcagtatccgttgacaggaaggcaaat

SEQ ID NO: 6847 - DNA, 758 bp, Populus trichocarpa
  Intron number 1 from transcript POPTR_0015s13600.1 (locus POPTR_0015s13600) derived from phytozome v7.0 (chr-ID scaf fold_15; pos 13477707 to 13478464)
gggtttgctctttttccttttatctcttatataaaatgagctacggtttcttttctctttgcaaaacggagggaaaatagggttttgtcttttggtagtacaaagaacgaattttttttctgttttcccacactgcaaatgaacgaaatgatgaatttttgctatatttgaggtcattaggaagattttgcatctgggactttgtaattttctgctatttgattattttttgtttatattgttaatcatgctctttggttgttttttcatgattgaagtttgagtttatagtgccaatatgattgttatttgatggaaatttttctgctttgttgatattgtaagcccatgaagtaatgattttgatttgataagcagttgctctgtgtttggcttgattcaggtgttgttggtagaagtatagataggttgatgtggtcaatggtttggcttgatttcgttataatttgatattagattcgagactaagattatgctggctatttgattgctggaagcggagtttgttaatttttgtataggttatagaatgtttgattctgtgttaatgtcccgaggtgacgttacggagtgtgttattttagattttggaaaccactcgaatatttgtgactactcagaatacacgcatcatgcaaattctgtgttcaaactccttgctttttggagttattttccccctttctgtctggtgttcaaataacatgtgtaaggttttctaaattgttgttgcagat

SEQ ID NO: 6848 - DNA, 1813 bp, Populus trichocarpa
  Intron number 13 from transcript POPTR_0012s07540.1 (locus POPTR_0012s07540) derived from phytozome v7.0 (chr-ID sca ffold_12; pos 8455265 to 8457077)
tgaagatctcaaggaattcaaacagactagatgtaatgattggctgtttgatattggatattgttttgcttttcctgtcataagcattctggagaatactttagtgttgtttttgatatttcaaaactcatcaagcatacaaaaggcatggaaaggtaatttaatgttgattgtatttcactgcaacaacagcatttcccaaagacattacttaagacgttttaaactggaaaccagtgtcttgtaccttttaggttactaagacataaaactgtaaatatcttatcattccttttgctttctgaccaggttatgctgtcagatgtttgatagtttagtcttagatgactaaaaagatcggtaataaatgattattttggaagaagtgtgaaaacactggttaacttcgtagtatgttggtactcttgaggaattagatttttgtttttggaaaaacatgagttttggaatttttttaaaggaaaatagattgatgaggcgactggtttatataattagtttgagttcagaaactctggtaataatagaaatcagactaaaacagattgatgaggtgactggtttatatagttgattccaatgagtttggtagagggacttgcatgagttctttgatagaaattatgagttttccagaaatgttttcttcaaaacaggaaacttctgaaaatgcctttgctaactgaaaataaaaattgtttccttggaaatacatgctttttaattctccagttttctagaaaactggaaaacaccaaattagttgtactccaaattctccactatataaataagggccttgtttggttcatataatggttcatggtcattccttttattattttcaattaaatcaaacaaggcccttgatttctattttggaaaattcatatataataaacatgtttccttaattttccatggaaaaaactttttagaatgaataagaaaactagagcttgaaacaaaaaggctatttttggaaagtaaacacaaccttaacctctaaacttttctgtatcagattctctgattttccatatatatatatttcatttgtgattctgtcaaatttatctgttgagagctttggatctatggcttgtactggcatgctgtgcatcatgaaaataataggtgataaaagcagcataaattctgaatgatggtaatataaaagttagttgaatcatagttcttgcttgggtaggggggcatattttgttggcagagtttctgcaggatatacctttgtggactggcacaaacaatgcagtcaagggaaaagtagtttaggaaaatgtggaggtccctgtatgtacatgatgtggaaattgcatacaaatattattgtgagtaattgactggtacactggctcatgtatctctttcctttctgacagtcatttgtctggttgttggtgtttttatctataatcattaaattgtcttttaacttttgatcagtcactttccccttatttgatcaaacaaactcttcttggcacaatccaatggttgcttttagtttcaggcaacaatttgaatcaaaatattgttaaaaaaattttgtttgctcattggcatgtccatcactcaattggataattttttccccctgttgctatagttttcgaatttgttcattgattgcactattgttagtatctttcaattgctgatttgttatctgcctcttttttttttcttttttttttcaatttgcctgtttatgagcccggatacccttctacaacactaacaaaatctgtgaccatgctagctgtcgcgg

SEQ ID NO: 6849 - DNA, 654 bp, Populus trichocarpa
  Intron number 9 from transcript POPTR_0012s00950.1 (locus POPTR_0012s00950) derived from phytozome v7.0 (chr-ID scaf fold_12; pos 619542 to 620195 reverse strand)
atatcatatacatttgtgctggattctttaacgtggtatctcagcttgcccattatgttctgcatcttttgttattgtttccctacatggtattcttttagaatatcaccgtcttctaatttgctgtattcatgctgtttacattcaggagactgttgaataatctgttattggccttatgtaatgtccttttacatctaccaatttaagatgtccctttgcatctgccagtataagcttttaggctggatggtattagaaccactttggttgtgcctcagattctacatgtaggccttcttttggttatttgggctgctcagtggccaatttagtatatttttgttggacttgtgcttagaagggggtgtcagaggactagttacatagggtgtaagaaaaggaccctgttggtacattaaaatcctattagtgggccatgctatctctaactgtttaaattcactatagaaaatcctaactattgaagatctctcttgcatgtccattttctttagtctttccccttcacagtttcaggaccagtgatatgattaaataaggttgtgcacaaggtgattcttctgatcatcatgattctcgaatgttgatgctttctcatgtcagaatgcctgctgaactttatcaggaaac

SEQ ID NO: 6850 - DNA, 1857 bp, Populus trichocarpa
  Intron number 5 from transcript POPTR_0013s07580.1 (locus POPTR_0013s07580) derived from phytozome v7.0 (chr-ID scaf fold_13; pos 6411462 to 6413318)
ggcttggtatcagtaatacatcaacgtaatcttctaacagctttctgtagtgagatttccttggaacagtgcttcatgttaaataatgtactggccttatgttagatggcatgttaatggagttctcatgtggtgttaaagtgtaattagaagggttgccaatatggtttagggtgaaatcactggaattggaattctggggaatttatgaagcactaatttatatattggctttagaaatattgtggagaaaatggaagtttgggtaatctacttatagtatagcaatgaaggagaccacaaatataggataaattgcttgtatcttctcttttggacctcgatttcaaaatgaagtctaggatctcctttttcatcaactttcacaattcaagttggcaatggtgtccaggttgtttgcatttgttaaccaggaaacaacctagattttcaatcaagtttgacagactgaattatgcaaagttgccaccaaagtttcattcagtgggcattgggcacttacatgacatattctttctgtcctgctaattaaagttttcagtgggtttgtgtgttttagtttgatgaaacatttcaggttggttggaatggtttgtggtctcaatgatgggatcaggaatagacagcgtaggaaatgatgatgcatctgattacgtactaaacttttttcaaaacctcaaagtatttgttgtaatttgaagagaatggtggttgagaacaaacaaagtgtaagggtttatggtggaaataaggatgtgattacttgtttggtggtgggtttttcttcaaaatacttttagctgtcacagggttgaacaaatccctcttaattggcgaggaatcctgtcataaagcaaggtggtgtaaaatctcaagagtaaagggggcttgacaggaacttgtacaagccagcacaataaacttgtgatggtccgaaggtcattcattgtctaagatcaagcaaaattcaagttcaatgaacctcctttttgttctttttttgatttcataaatgcaagattttttgacaatggaagagctgaatatatttattctactttttgatatgatgttactgtcaaagaaccatcgcaacccaaaagtttaagttgggtgaaactttagaaattgttttttattattttctaacatcccttttaagtgaaatccttttaggtttgaaacttgaatacactcatgctatcttgtgctattgtatgttaattagaagaaagagtgagggtgatgagattcgaacccgtgactgtttagttagcaagacattgataccatgtcaaaaaccatctcaacctaaaagcttaaagttgttcggtgaagctccaagagagcattatattttaatctctaatagttgctaaacttttataattcttccttataattgttcggttatgactttgttaagctgttgtggtattgtgtgattgttgtggtgattgcttcatgcttgaggccttgaaaattcacaagcaattttgaacttaggagatacaggcaataggatcaggatcataaagtgtcttttataaatatgaactaagaagtgtcatcaatctttacatgtagaaacccgtggactttcattttgtcagtggtttcccttgcaatatttgaaagctatgaactgaaattgcatcagtctccttgtgccatctcaaggattccattcaacaaagttatctatgcacccgtggctgtattttggttgatatgatccatcaattgaaccagttatattgtattgcttacatcattagttacaatcttggtgatagtgcaggacccagcaactgactgaaaccaaagacttggcag

SEQ ID NO: 6851 - DNA, 1349 bp, Populus trichocarpa
  Intron number 1 from transcript POPTR_0015s09860.1 (locus POPTR_0015s09860) derived from phytozome v7.0 (chr-ID scaf fold_15; pos 10955108 to 10956456)
gggtaatttctttttcactgttttctcatttacccttttgttcaagtttaaagattttgttcatttgtgtggtttttttatggtttatgagagtttgcatgtggagatagtgtgtgtttttggtgaaaatcaggtgaattagtgagacccagttgggatttctgagtgagttttagtttgctttgtgtagaaggaagggatttttttggggttattgggaaaaggttacaagcaggtgaaaggtgttgtttttttggtggggctatgaggtatttttcataaagcttgattgtttatttggttaaagtgggtggaagaatttgagatcaagtaattgatttgtgtctgattcacagattagctaaacagagttgttttatgcagatcccttcctctgatatcatgattgtgtgatgttattcttagattggttaagattcttggatttagccaggaattatgatagtttcagtgaaagaatggaatctcctatgagttttgatctaggcaattagcatagtggatcaattaggcgatttagggctaatagttgttaagggagaaaattgagactagctttgctgcttttaactttctgatgttctgtgtatactactcatgttttcatcttctttgtcttgcaaggtcttaacactagtctactgttttctattttctgcaattttatcaagaaagtccaagtctttgtatggggtgacttaaatgaataaaaaatttggcaagcaaaaatgggggcctgaaaattgaagaagaacaagcatttatgcatgagggttgtttcagaaatccagaagcatgcttttgcaagctagttttctgtctagattttgacagaactctatgtggctgcttatttgaaaaaaaatggtacggatctaccttactggcataaatctagacttgctagtgccaatttggatcttaggttgattggatccatcaaatagagttctttactgcatcaagttgttgttatgcaacttaatataggtggccaagcatgcatcaaacttgggaaaactctggtgtgaaatggaaaaaaaaatttcacgccagagaacattttatagaggagttggtttgggtatgttgtcacagcaatcatatagacactgacaccgcctcatactgggaggcgtcctgtgccttgcttaaatattaagtggtcaaaggcagcatttttttcttataggtggttgccttttacagagttcatagaggaccggtccaattctgtgtttgtttaagttttttatgtagtttatccagcactcaagcatcagatatagaaagggaatttaagcatctttttttcaatttgtctaggt

SEQ ID NO: 6852 - DNA, 2244 bp, Populus trichocarpa
  Intron number 4 from transcript POPTR_0001s38230.1 (locus POPTR_0001s38230) derived from phytozome v7.0 (chr-ID scaf fold_1; pos 37308548 to 37310791 reverse strand)
ctgtgccagccactacatctgcttcttcaggtagaatgaattccaaagtgttgaggactttttccttttttagcatttttgcttacctattaggtcatttctttggcacttttcaactttgaattcaagatgtcacctggtttgattaagtagtctcttaaattactaaaattttagcgttgctgtgtttggtttcactgttgatgggtattgtatacgattaagaatcacatccaagcgtatggtctggcacgcacacacaccccatgtgcttgtgtaaatgttttttagtctatttacaaacattttgattgtatctgcgggaaatggttttactcattgctgtttttaggttctttcccatgctccatgttgctcaagctgaaagcagggtcttcctatagcttgttcatcaatggaaatgattgcttattcatccatcctgttgtccctccaacatgtctttgtttactctttgtttggtataatgccttgatgtttgtttaatgctctcttgtatgaaaggaacgacaaccatcttctgcaaggtctcaagtagaagattccaaaatcataaaaatcatttaacagcagacttaccatctgacacacgtgaccacagttcacttgctatcttttcttagttgtaagctaaggacctctctaatctcaagcattattaactgatgatattttccaattcatgggcacacatgaccccaaatagtgcataaatctccacacaacatgaagacaatcaacaaactagcaacagaactccaagtccaacagccctgtatcatctattctgacatattcacaatctgatgtggaagtacctcatttctcaaaaatataggggagagggagggggaggggggtacctttaatcaaagctcaagacacaagtcatcggaactcttcaatgaaacccctttatttctgccaaaaccaaaacttggaaaaataaaattcaaactaatcaaatgccattttatattttccagatgaacttgaaatggtactgtgctgtatgtgtagagtcatgcttagattgcttataatctgatctgtgtagcgtaagccacattcaggcttcaaagtttacatccctttgaaattctcccgatttcaaaatcattgttgaattaaagtgatggagcttcagaagaattagctgtgtgaatgcatggctcttttcctgaaaattgggtaaatttgggtcatctccagtcatcaaaatgttttatagcattctcttggggataatttctcatgctcaagtttggaacttataattctctaatttcttccttgtctgtgctgttctgagatgtcccttttcacacatgatttttgttctcttctttcatgtctctcaatttcttctcgtatcttctgtcttcttcatttcccaattcctctttcagctgctagaagtgtctgtaggtatgaaaatgaagagaagaaaggactgctctttgaaaatgttcccaatctagattaaaaaagaaaaattagttaggtaatttccattttgtttttaataatgggcatttttctatagaattctatgatgcagtgtgaaatcatcatatacttctagtttaagatggcctttagtcatgaggggggatttaggtggttgaggatatgtttaggggaggaggttgtatcatatggtcacacttttggttagtttttggcattttgcattaccttatgaagtgtttgcttaaggtaccaaaaagaaacagaaaatggagtttatgcagtacagtttagtgaggaaaataattgcatagttgctactgaaaaactaagtaggataaactcctttctctttttcactggtggacataattgcatcttacctgttaaaagcttcatccttcttttcttgacctgttctagaaaaacaaaaatgttaaaaattaagtactgtgtcataatcatttctcatgtaatcaattttgtttccttgcatctcctgatacctgcttggttggcaaagtttcccaaactggtgatttaaatgttccttgactgtcctgattagtcattaagaaacatcattaaacatcatctccatattaaagctgaagaaactatgcaacttgttgttaacacctctagatattgcagaaatcattttttttaaatgcctacatccagtttgtagatttatttggccctcattttttaacagctgctggtgccagaagggcaacttcagaaaactct

SEQ ID NO: 6853 - DNA, 1839 bp, Populus trichocarpa
  Intron number 32 from transcript POPTR_0010s05400.1 (locus POPTR_0010s05400) derived from phytozome v7.0 (chr-ID sca ffold_10; pos 6860155 to 6861993)
atttaaacagtccacaggtaagcacctttatattattaacaaaatactaaagggcgtggctaaatcactttgccacaaccataaaatactatttattagaatagtgttttgtgatattttttttttttaatttcaccttttaataaccaatgttttttttttaattttatccttcaatataaagtttattttgagaataattctccgtaattgttttttttttttatgttaggttatatattgatttcatggatataattttttttcttgattttaacattccggtctcttagatttaggttttttttttctcttgatcttaaccttcaacattagattagttgaaagtgaggttttgtaattttattttcgatttattttttatgaatttatcttgatcttataatcttggttgcaagtttaaccgattaacctattctgactcggataattttttttcttactttttctaaatgatttttttttaattccatcttttaatattgagttggttgaaaattgagtttcaaaattttttcaatttgctttctatggagttatcccgatctcattatctgggtcgcgagtttgataggctgattcgggttgactatgagttattttttaattgattatttttttaattgggctttgtgaattgtttttatttgcttttcatagggttattctaatctcaggatctggattgcatgtttgataagttaaaccgtgttgactcggtttatttttatgcttgtttctaattgaattttttttcaatttcaccatccaacaacaaattttttttatttagttttttgtttcaatttagcttcatattttttctcaatttttttttgtagagttttcacggtctcatggatttaatttcctttcttgattttaatattggatatattgaaaatagagctttataattttgttatatgctttttatgaagttatcgcagtttaataacccaagtcacgagtttaataggttagttcatggtgacctgagattttttttttttgatatttattttctatcaccattcaatatttaatatttaattagttgaaaactagactttgtaatttttttttatttgctttctgtagggttatcccaatttcacgacccgagtttcgggtttgaaaggttaactcgagtagtttttttttgttcttttttaattttttttttaattttgttatttaacattgaattgattgaaaattaatcttcataatttatttgatttatttttatagggttatcatggtctcatgactcagattgtagatatgatatgttattccgagccaatctaatatatcattattttaatatttaaaaataaataacattcaatatgttactgcatcaaacatcttttaatatttttaaaagatgttaaatattaattatattttgagtttataattattatttttttattagaaaagttttagcaatgtttaaatattttttttatattaaaaaaataattgatctataccgtagtgcatcgtgtaacaatgatatagtattttcaatggtggttgaacttttataggttgtttgaactttacagtggacatggaggagtctcaagttcaagtaaaactaattgcttttattgttgcctcgaggactgaatctatatgatgtataattacttagtttcgaagcagtggaaaaaaatgaaaataaaagaagctgtgagcaaacccatgagagcaccccaatttttttgtaatgttacttacaattttcccttggaactttgacatgctgcaggtgttgggttatccgagcaaacccattgggctctt

SEQ ID NO: 6854 - DNA, 1509 bp, Populus trichocarpa
  Intron number 1 from transcript POPTR_0007s06490.2 (locus POPTR_0007s06490) derived from phytozome v7.0 (chr-ID scaf fold_7; pos 4859838 to 4861346)
tcttttgctgctgttgttgctcaggtttcttcaattttctgttttgcaagcaatgagattgaaattagtggttttggttcataaagtttggttctttttggtgtctgtttagtttcttaaggtgatatgcttgcgttgggaaattttagggtttcccttttttttggttatatgttattcaaatttgtatgctattggttcttgcttttctaggttaaatatgttgatttgttggaattgagatagatggttttggaatgctatggagattgttggtagattttcttatgttgtggagtgtttagctctctgaatgcactttgagtttatgtattgacttagatatgcagccacggaactccaacatgggttacaaacttttggaagttagcctttgattaactatatttttcacgaaattcagtgattgacttgaataatgttctgtaagctggtattacaatgattaagggtttggtctgtgaataaaaggtttctaagcaactgtatcaaaaatgtatggatttaatgtacaattgaaggtcattaagataaatgcaaatttcttagagacagatatccaccttttatccattgttttggtgctaggggaaagcagtaggggatagagacagacctttcatgctgttattaatgtggatgttctattgctatttgcgtaccgcatggcttgcagttagttacatgcttttacttgtatgtgcgcatattgttagttgcatgtttcttattttgcttacataaatctgttcaaatctattagtctcttatggcttactttgatttgtgcgttgatatgtatctaattagtgtatccaaagcagtgtccagtattttattcaacactatgcttgcagtctaatatcatttggtggttgaattaattttgatattaggtttacaatttacagttactcatgcaatgaaaagtttcatcctcgtgggatgtatgttcgtggcgtcagttgtattcttttaatttgtattacttggtgaatcaaaaggtgaactggactctgccttctcttaaatatacagaatagattggtgattggttatgaagttaacctttaacatcttcagagctgtttgtttgaacctgagatcttgacattttgtattgagtcctgactgctatttttatcaatagtctttcgtttttgtaaaatgaaaacattagaaaaaaattaattccatatgtcttcctttttaaggttttgttttcactttctaattgtcatatgtatactattagctttttatccctttggtttcattcaggaatgttctgtgagatttctgatctttctaatgaaatgacttgccttatgaaaaatctcattaaaaacatgccgatggctttttcacagtaatggtgcatggtctaaagcatctttatcatttacccctttttttaatgattagtatttgtcagttgatattgttcatttgttgctttttttttattgtaggttctggagaggaaag

SEQ ID NO: 6855 - DNA, 2651 bp, Populus trichocarpa
  Intron number 23 from transcript POPTR_0003s01280.1 (locus POPTR_0003s01280) derived from phytozome v7.0 (chr-ID sca ffold_3; pos 1140069 to 1142719 reverse strand)
agaatcgtgctaaaccctgtgagctaaaatttaccaaattgtacatttttcttttcttatttcttattttgttacactggtttggcaacctgcagttttgaaagccttgggccactacaaccatataacttgaataccttcttgtaacatatctggtggtttctgaaagccattaaaccaagatgatacaatttggaggccaatggatccatatggtggtttgctgctttaagcacagatcaacctgacatggccttttcccttcgaattggcaattttgatctcatttaaatgaaatgaagaattttcactgccactttagagtttgactttatgtaccccttgtctgaccagtcctctgcaccaatgcgtatggatctgttttggtgttgtgaatgaaaactgatgaatgttctctgttgttagaaaaagttgttgcatcaacttctgggggtgttgattagttctattgtatatgtaggaagggcctaatgtgaaacaatgacttggatgttggaaacgtgggctttgatttctatacctacaaagtatagttgaatagtttagattctgtttttatcctattaaagccaaaagttttatgattttgacaaaaattaaactcccgtcacaatagttcaactaagaaattgaaggaaacctgtagaagcttgagaattaggaatatcatatatctctttaaacctctattgcacccataataaaagcgcagaccaagttttttctaggcaatcgacttggaaaagtaattgaaagagcaagtttgcatcagtatctatgtaaacccagtaatagttcataataatttttttttttaagtcctagtggtttatgtatttagcagtaaaaattagagagtgctattactgggattggggcatttaggttttgctagttttctgacatgtagattcaaatccatgcaaacaatggttcagttggtctgattggcgaccagttggatgatatgtgatttactgcaattgcatgaagtgaacgaatttacaggataaaaaagcactgtattttttttttaattatatccatgatggatttcatgtatcaaaataaaattatgtatccaactctattccacacaacatgcattgcattctgcaaaattgaagctatttttgttgaatgtattatttatatggtggctgtagaattcgaataaaattctcttttatagtcatgctttgattaactttttataatcctctctagcacattatgaaagtccacatgaatgatcttgcatgcagtttgtgggtagacaacgagatataatttctgaaagaaccatgaaaagaaaaggaatagtatggcatgccataaatgttggcatgttaacatctgaagcatgacatgctctaaacggtggtatgttaacatctgaaggtagatgaagattactgtggctgattagagatttgtggaaaagtatttgaatattttgggatattagcttaatctatccttatagtttaagtctagtctccttatattccaagtcttgtctccaatctgttctcaaagtaaaattgctcctaatttgtccttatattctaggtcatttttcaatctatcgtttcagtggatgtcctcatgcaaattgatggaaatatccttatatgagaaacccaaacctaacctgatttatttataaaattaatttgaaaaataatgaattgttgcatggtgttaaaattcctcctcttttttctctgttcaatttcttttagtaaatcaggttggacttttgagtttttcatgtatgtgcatttctgttagtttggatagaatgtctaatagaaggatagattgatggaccctatatttagggacaaattggagatggagtctaaaataaaaaggacaagttgaattaattccctgaatatttttaatcttttgaaattagtagctgctaacttggaagctgggatttgatcacaatccattggtgtctgctttatagatgctatgacaacctgatctaagtaggccaaataggttttcttttctcaaacaatatagtaaggtttttgcctctctgacactcttttattagaaagatgctgccatataaacagtcaccttgagaagtttgtttggattgccatctggctgggagcagccacttctttacaggcattgacctctgtgtctttattttctggtgaaagattaggacttattttccatattatgcttagctgggccttgttctggcagaaacaatgccagcaaatgacctctctctctctctctctcgttttctttttggaatcatgttcctagattgcttctaattatttttttctcactttttcttagtttttattctgtatcatgaattgcaaaattgcctaaacatatgatggatttgtaaggcatgtatgctgtcttcttctatgtactttacatttttcttaggtgcttagtgccttagcttgcatctgcactgctagctgagacattgcctcacatgggatatgctttttagctgaacttcttcattatgagctttttatcaacattttgttgtctctttctacatgtcgaggaactaacatttttggtttcttgcagagttctcttgttgatcttccgctgaagaattacta

SEQ ID NO: 6856 - DNA, 553 bp, Populus trichocarpa
  Intron number 5 from transcript POPTR_0013s15030.1 (locus POPTR_0013s15030) derived from phytozome v7.0 (chr-ID scaf fold_13; pos 15091875 to 15092427 reverse strand)
catttgaggtgagtatcattatctttgatttcatttcttttttctcatgattcttttgattttgtacttctcattagttgatgaaatatttcttgctggatcatatttgagttgctttcttctaattgatcttttgtgagaatttcactctagacactattttattggctttgttagttattttcgtttctgtagttcacatgaaaatgctggcatggtagttgacatgggattcatatcttgtatggttcttccatctggtgttttacatttttggatggtgatagaaattatgatctactgtgtagagacaactgtgatcattgctatggttgatttagaagatttataccctcttctcagagctatgttgaaactttcttatctgtcattttattgcatgtgaatgccaagcagttcagaagagcctaagatcaatataacatggcccatataaattaagcccgagatcatattttcattgttatttgtagttgtgattcgaatgctctttgtagggagaccatccttttcataattatacagtacggtc

SEQ ID NO: 6857 - DNA, 1152 bp, Populus trichocarpa
  Intron number 8 from transcript POPTR_0011s11380.1 (locus POPTR_0011s11380) derived from phytozome v7.0 (chr-ID scaf fold_11; pos 14134430 to 14135581 reverse strand)
atttggcatcaatcacttctttcatttgtgcaaaggttgataatttttccttgttcccttctcttgcctctttgctttttagttgtgtgaaatctatctagagtgtataatctataaatgcttaatttttgaatgcgagttaaagggtggttctttttagatttagccacatctattctctcttttgcattgtttcagatgtactcttttatgttttatgtacaggcagttcccttttgctttgttttattatgtgtacatgtaacctgaggtaccaagagaggggttgcagtagctaattggagatggttctgttttactgtgttttcatgtgtttcacagatttccttctctatctgatacttcatgagagacaattaatgtagcaaagtaattaatgtggatctgttttgccaaatcaatcaaatgcaggtcgagaagggaaataacaaataattagtattttcaaattatttgtagttttttgtgtacttttggtatctatagcaagttctccattttaaaataattgcaatatttaggatgtcattgttgtgaggacattttattggtattttgctcaagaagggattttgtttccttcttaagtctaggactcttggtttttgtgtgcctatataagcactcgtatcatttgtaatcgaaaggccattttgatgaatgaaatccattattattgctatctcgcaatatctggtgttatacgcagtggatcaaggtcttgataattgatttcattgattaaaatggccattcaattacatagaatgtgcttatataggcacatgagaactcttgaagttacctaaactaacgaaggaaacaaaatccacctaaagcattctcagcaataatgagattttggttatttgcacctattgcaatcagagaacttcttagtaatgataaaactattcaatcaacaaaatcattaataacctgaaaataaccccccttgaaaatcacacaatttctcctttgagcagcacggtatgacatgggatgtttcttcctaaaatctctcttgcatcgttagtttttgtgctattaaaattaagtagctgcatcaaaacaattcacacttgccttttcactcatacaattgctgttgaaatcctcacaggtacaaga

SEQ ID NO: 6858 - DNA, 2641 bp, Populus trichocarpa
  Intron number 2 from transcript POPTR_0013s00840.1 (locus POPTR_0013s00840) derived from phytozome v7.0 (chr-ID scaf fold_13; pos 426376 to 429016)
aagtgacgaaagaggtgaaaaggagggttagcgaggtgggttttgtttttgacagagttctgtttatgtaaattttggttaattgtttaggtttctcatgataacaatttgggttaatgtgttatgttcgaatttcattttgatagttgatgtgtttggttgatgatttcttttgggttctctgaaaacaggatgctggaatgtaaaagatgaattgtgtgtctttggtttttgataatgttatttatatgctgatcttggttaccgtttttacttctctttgaatagatgtgtgtgggcattatgtttgttttggttactgtttttattgttcttctgatagatgtgtatggatataccttaatatatattggtttggttgttatcatgtgaatcttggttagtgtgtttggttttggtagtttattgtgggttttataacacttttcttgattctttgaatgttaaatgggaatttcttgattaggggttttgggtttgttttctttttagataatctgttttctttttagataaacttggtacgtcaatcttggttgatatatttgaattttgttgtctggttaatttgtttttctatttaggttttttagggctacaaaggaaagattcttaaaggaatttattgtgtggaaaattcaaggctttttctttcgttctttgttttttttttttttatgaattttgagcttggaatactccccccctccccccagtgtgtttggttagtgtgtttggttttggtagtttattgtgggttttataacacttttcttgattctttgaatgttaaatgggaatttcttgattaggggttttgggtttgttttctttttagataatctgttttctttttagataaacttggtacgtcaatcttggttgatatatttgaattttgttgtctggttaatttgtttttctatttaggttttttagggctacaaaggaaagattcttaaaggaatttattgtgtggaaaattcaaggcttttctttcgttctttgttttttttttttttatgaattttgagcttggaatactccccccctccccccagtgtgtttggttagtgtgtttggttttggtagtttattgtgggttttataacacttttcttgattctttgaatgttaaatgggaatttcttgattaggggttttgggtttgttttctttttagataatctgttttctttttagataaacttggtacgtcaatcttggttgatatatttgaattttgttgtctggttaatttgtttttctatttaggttttttagggctacaaaggaaagattcttaaaggaatttattgtgtggaaaattcaaaggtttttctttccgttcttttttttttttttttaaaaaatttgggcctgggaatccccccccccccccccccccccagtgtgtttggttagggtgtttggttttggtagtttattgggggttttataacccttttcttgattctttgaatgttaaatgggaatttcttgattaggggtttggggtttgttttctttttagaaaatcggttttctttttagataaactgggtacgtcaatcttggtggaaatatttgaattttgttgtcgggttaatttgtttttctatttaggttttttagggctacaaaggaaagatttttaaaggaattttttgtggggaaaattcaaggctttttctttcgttctttttttttttttttttatgaattttgagcttggaatactttgccccccccccccctcctcagtgattatgggtgtacttgcatgtcttaggagtcctggtccttgataagttttagaggaaggaatggaaactaatgaaaatgaagttattctttgagcaaatcaggatgttccatagcatttttacccttggcttcttattgtgtatatttggttatttttgtttccattgaaatggtttgagtaatttttgggttttattgataaattaagggtaaagggaaatagcttgtgggtcttgcgaaaattgaccctagacgatgatatggaagcttggactttcatttttagtgtcccatcatctctatattatctgtttattttagtatgtgatgtgaaatctaagccaatgcctcaactttttctgattaaaagtatttcctggatgaaaagataatttctgtttgtatggcaactatcttaggactgggagagggattttcttttactttttgaagaacatggactattgtgggcagtaactcacacacagcccgaaggaaatggaaatacaaaagaagaaatgtgcatttgggtacactttctggtgtgtgtgtgtgtacctaaaaaaagtggaaaaactttctaggatgagctgtccttggacatgctaactcaatcaatgttttattcacttttggtttcaccaacttagttactttttggtcaaaatgagaaacatttccagcttttcacatctttacaatgagagtcacctgcaatgctgtattcaccaacacttttatttcattctgtgtgttttgtctttctcgggtatgttttgctatagacctttatcggcttcttgaatctggaattgcagaaagtgcccaatacaacaccagtgaagcctattga

SEQ ID NO: 6859 - DNA, 1366 bp, Populus trichocarpa
  Intron number 1 from transcript POPTR_0013s02330.1 (locus POPTR_0013s02330) derived from phytozome v7.0 (chr-ID scaf fold_13; pos 1392200 to 1393565)
cttaattttggcaaagaccggtttgatatcttcaggtttgtggaatttctgttcttgttttaaagttggttacttgattgcggaaattgaatgaaaatcgttgtttactttacttctttctcagtctgttgaaatgcatgcgagtttttcttggaagtttttttgtgagggttataggatatttgattgtaaatgcaatttggtggtacagtacagattgactataatttgtttgaagctttgaggtcagtatggtctctgcttctctttgttaaattccttgccacaattattttatcaaagaacgaatgagagaaaatggttggaattggttttgtggactgtaaaatacaacctgtaggatcttctaatatatgcactgtaccatatttactaaactaagctttttggcttgctgtttcaatctctctgttttctcaaagtgaaatagtactgagtgtaacattgtattcctgaatctgagaggtgtagcaacgaatttattttattttttaatatatttagcatgcttattacggaaataaaatgattagaggattgattatgaggatttcaagacttcactgactacttgtcttaattttgctaaagatcagtttcatatcatgagtttggtgggtagagttcatattcttgttctaaaagtttctaacttggttgcttgaatggaagagcattttttggtttagttttttctgtgtctggtaatgtatacaatttttttggttgaagtgtaatgggatatgaaatacatctaaatgcaatttggtgggattacacaaatatgagtgagtagatgtttttgtggtttgatgtggtttcagattttcatgtttagttttccaatgctgttttcaaaatgcataagcttttttagcttgaggctgtgttgaattctgccagaatttttgctcattcaaccatggaatcaggctttgtaggtttgggttctgtggtgaattcaattgtattaacgttcatcaaattatgaatggaagaagtggctgtggctgcattgagctctgtgaattatacaatctaatatagtcacagttcaatctttgctgaactaagcttttggctatatgtttaattctgtgttttccaagtgtaaacagtttcctacatcctagatgtatgaaacaacagaagttttaaatttgtattttattttgttatgcctatcattaaaatacatgttttaagtgcaagatttttaatctaggcttatattcttgatgttttacaagtaattctattctagttatggtcactttgcttgacttgtgacgagaaagaattgatttcaggtcattgtcgagacaggatattcaaattttggtag

SEQ ID NO: 6860 - DNA, 1982 bp, Populus trichocarpa
  Intron number 3 from transcript POPTR_0019s12860.1 (locus POPTR_0019s12860) derived from phytozome v7.0 (chr-ID scaf fold_19; pos 13870713 to 13872694)
attcaccgacaaaccaaacagacggtatgttttctatttcaattctgttgaatgctataggcttgggtgccagaatgctataataatcgtcattaatgaattgctagactactggattgaaggatttttacgttttgatccctctgatccctcgagctagggtctgattaatggcaaattacttggtgattaattgtcttgctggcacaacgagggctggccttgtcttttcctttctttgtttttttttaaagaggtttcctccattgtgatttggtgttgtagatgtttttactattatagtttgaaaaagtaggtttaagaaaagttataatatgtagttttttcttaacttaattatgcatatggaagttgaaaacaacaactaaacaaagaacataaaatttatttatgggtgaaaggagctacaaatataaaccttaaattcacaagtttattctttgaaaataataataataaagtttgtctttttaggaggtttataagccttaaatagattagaaaacttactctatttaggaaacaaaaataaaaatccaaaattacaaaggaaagaaacatcaatttcaaaaatagcatgaaattcaaaaataaaaagaaaaatcataaaaacttgtaaaaccagggtcatggggcgagatttgcgaaatctaaaaatctgacgatccacatagcaacacatagataacttcaaaggaaaacaaccttcgaaatctcttgtaaaattttaaccgtgattcaatggtcagattaaaaattatagccttttgagctgttattctggtctgacagtatcagatctcttattggacctaaacatgtctcaatagtctataaatgcattttctaggctatccacataatctatctagagcagatccttatctaattatgacagacccacacctgactgctcaactcacccgttattgtaggttcgataacatcatttagtttttaagagagtttttagtggggtctatataaaactatgatatatgttgattaactaaacactttcaaatctatgattgaaacaaaacatagaacgcactacaccataccacaaaaatagaaggagcctaaaactcctaatattactaaagaatacaaaccacgaatgttaattgactaccatattaaagttcatatgatttgatacctttttgtatccaaatgttacgaagtttgatatccaacctaaattctctatcttccaaaaaaacaaatcttggacattttatgcttattttttattaagattatatagtgatttattgaatattatcaaataatttaaatatctaaagtggtttttgatatggcatgaaagtttcaatgatcaatggttgattttcaatatcattattttgattattctaattaaattaaaaataaattagcacataataactttgcaaattttaagaaagactttttatgttatagaacaattttttatatatataaaaatcggcaaatttattaaaacacattctagccatttagatgatggctatcatgaaaagttaaagttttacatcaagaatacctaaaaatgaaagatctaggattaacaaaataatgtccgactacaacaaaaacattcggcaacctcttttgaagtttgtccaataagatcctggctaacatgtttcagtctgttgaaaataatatttacatgaactttatagataccatgaatcaaaccaattggcctataatatgaaacttaaattggaatattataaaatcatacaaatgataattgtttgatagcctaatggctaattgagatagtttttttttttattcatcataaaaaattactcttttgtcacaaaaaggcgggctcgagatttttttggatatataagcctttacctagtatataacgattctctcttataaatctaaagctatgcactgctcaccctttttaatataaattatcatagttg

SEQ ID NO: 6861 - DNA, 2751 bp, Populus trichocarpa
  Intron number 3 from transcript POPTR_0009s03260.1 (locus POPTR_0009s03260) derived from phytozome v7.0 (chr-ID scaf fold_9; pos 3944755 to 3947505)
aatttgaagaggtccagttcctgcagtgcagctaggtaacttcattttcactactttgattctctgattcgatgccccttgtggcagggcagttgtgaaataagagtgaagtgggtgcctcctcttagggagggattcacgtgtctaactttggtggctgctagctagagcatgagttgaattattatacattggatttattactgaaataaagcataaaattgaaggttcaattcaatttgttaggcttctaattgagaacctaaatttagttcctaattcatattaaataaactaaaagggtagggattttgttgtagtgttatttattgttcatccactcagattggcaattagtttttctaaactttttaatttattcctcaaatttttattttacataatttgttttaaaagtttattttacttctctattatttttagctattaggttactgtttctttaatttttaaaaatttaattttgatatcaaattttattttttttgactttttagtttttcttttgtggagagaatagctggccagtttctgctataaaaagtaaaagttattgttagtaataattttgaccattaaaataattaatttttgtattaaatgatttcatataataaaaaaagtttaaattatgtgttttttaccttacaagtacaaaaaaataaatattttgagctcgagaatattttttattttaggttgattttaaattttgatgtggtttttgtttttttaaaggttataaattggtttagcatggttctataatgattttaatgtgttttggatattaaatatagattaaaaataaatttttatattaaaaagtaaaaactttattttttcagctacaacaataaccaagaatttaaagaattctaaatgatatgttatctattcttttttcaaaaacaattggtcattaacttaaaaaagaaaaaaacaaaaactaaaggccatgtgcgagccatgagccaggcatttggccaggcttaatagacttaacaaaatttagttttatttctttttatataattttgatttttttaaaaaataccttttttatgttttttaaaatttatttttaagtttgtattttaattgataccccttctccataaaatttttcattcatatgtaaatttttaaaattttataaatattaaatttatttttttataatatttttaatatatgcacccttgtataatatttttttccttttatttattcaataaattttactattataattttattttaataaataaattcattaaacacaaccgggtaaataacttatattgtgattttatatattttttttatctatatttgtctttcagtttttttatttttatttttatttatctttattaacttttttttatttatctatataatggtttttaatttatttaattagatgcattcattagtttttttatttatattttaattttttaatgtaaaaaaatacattgaaaatttttacattttaattttttatcatattttgatgttttcaatcagattaatcaaatattgaccggcccaattttttaaaagattttttttattgttgtttattttttttttatattatcaaattaataatcttgagtttcttttattttttttaaaagtgctcccggcccacggcatggtgagagacaccaatctagtgcttgctctcaattgagactatatatatatattagataagtccgaaaacattcaagaacttctgattaggtccttcaatgaatgtttgttaacactttcatttatttttcgcggggttatgatgcttagagagtgattcagtgactgtggattaaaggccactggatatgaacctaggagtctttttctgctatttattcgaattcaataacccaagtaggcagctcagcatctctagactctcccaaattgtatctcattagtgtttttggacagcaagaaggttcctatatcggattggaatcccagtttagattaccattatttttattttcaatgtgcactatgattattacgtagtactgtactagtaacgaagtgaaggttgatttgaagtttcacttgcaaaagtgcttccacatatttcaactcataggagtaggtaaatcttttggttttttttcttgccttgcctctctttccctggggattctcctgtcaggtccctgattctctgttagcgtttttggattgatttgaatgcaagactcgtaagttttttggtttttatcaacaaagccagctagcttggctatctagtttcacttccctgcccaagaatagtaaactggctttgtacttatcagtcacctttctttccagtgactgcatagttttattgaagggctgacaccatccaaattagcagtggtcctccatcatcatgtgggggatcctgaattgaattcttgcagttgagaatttatttcaacaaatccaggggaagctaccctgctgtagctttactagcaggcaagttcgttccgcactgcacctatggggaccatagtaataaactactaataattctcttagtttgaagctgataagttttcatgctcatgtgaagagtaaaaaatattagaactccgtactagaggagttgacttctattttcagcatttttgcccttttcttctcgttttgattaatctgatgctaatctcaggagctcgcatctgcaattagcagaaaaggagattg

SEQ ID NO: 6862 - DNA, 1664 bp, Populus trichocarpa
  Intron number 7 from transcript POPTR_0006s15470.4 (locus POPTR_0006s15470) derived from phytozome v7.0 (chr-ID scaf fold_6; pos 12857399 to 12859062)
gattcacagccacagaggttggaattaattgaactttaattttgatggatttaattaagtttacagataacctacttttaatgtaaaaaatagttttaaattttttggtgtgatttacaaattccaatgcattcttggatgtggtttacttagctgcaaatccaactccaaacacagcaatatgcacttgtgcgtgcatgcacacacactctgacacactcatattttgcatagatggatgctgtgacaaatgtctgatttgaattatggtagttgtatggtatacttatagcgtaacatatgaagttctcttttgtgtgattgttatcgtggttgatgcacttctctgtaacaattttggtgatcatctaattgcctccatccttctccactcttctgccaataattattgatggcatggttgagtctaaaaccatcaaaacatgcaccttcatcctggtgggtaacacataaaacttgcgtctcaacaactttgtcagccatttttgggtgaacaacaaaatttcagttccaaagctgttgcatctattttcatcttttgtttcccatcacctcacttcactcccatttttataccaatcaccatttgcatccagcatccacgctcttcttgtccaatttcattaatgatcacttaatttttcagctaccaacttacactgaatgcttttgatagcaggactgattctgcgtccatctaaacaaggtgcaatcatgtgactacgaatatgtaaaacatttttttggttgcttttagttattcattcattcattcattattattattattattattattattattattattattattttttgggggggggggttgttctagataccattgctttcttttacaaatttgtctgtctctaataaaacttgaccctctctctctctctctctctctctcttttttcattcttcagtatataatttctggctccttttcattcttgaaactccctgtgaacctttctaacatacatagtgttgtcgataatttttatttattaatgttgtgatttgctgctacaaatttcaccccatttcctgcaaccttctccactctacttcacatagagaaagtaagaatatctacttggatattacagtggaagtgtgttgaatcaatagctgaatcaatagctgacatggtttaatggaatcgacaaagcaatgacgtaaattgtttaataattgggcaaagtattaatcttctcatccttcaatctttcatgccatatttatgctattatataaaaaagttgatcaaattggcttatatacacttcatgggtgcattggcatccaagaactataaattgtggtactaaggagagctctcatctcttattaaacttatgcatgcctcttgttgtttgaggatgtgtcaggctgtcatttgaaatcttttcacatttattcttaaccatttaagatatagatttggtgaattctgcttttctgaataatgaaccttatatttccaataattttcaccgacatctttacctgcttaatattttgaattaatctctacgccccctttcctttttctgtcacataaatgattaaattgtatatttttggtcaatgatctagattaagagtttgagaacagcttacagaaacatatt

SEQ ID NO: 6863 - DNA, 1626 bp, Populus trichocarpa
  Intron number 9 from transcript POPTR_0004s11320.1 (locus POPTR_0004s11320) derived from phytozome v7.0 (chr-ID scaf fold_4; pos 9917422 to 9919047 reverse strand)
agtgcttggaagattgcaagtacgtgagaggtttggtgagtacatactgtaactgaaaatgtattaattttgtgttgcaattcctgcatgttgtttcatgaagagagagaaagatcattgagattttgggttgggttggaatgaagatacttatgtcttgactatccatttaatctcttggttcttgattttaaattggagggacattgactagattactgatgctgtttaagcaaaatttgaagatgtctgcaaaagcagatttgctttgtattgtgttgatgtctgttgcactagctggtgaggttgctaggctcttttatttggtagtgggttagtgggacttctgggtatttagttagaaagatatatgattctcaaaacaagttaatttctggaatttgtagatcaaacttgaccattgaccttgttgggaccacttaaaaaacatgcttagattgtctttttgtagtaggtttgggatgggatggagtgtggttaattctttggatgatatctcatgtctttttttcatggttgtttttcttagtttatatggttataggaggaaaccttttttgttttgttttgttttgtttttgagagtctgagtcttgtgtcattgcattatgaaaagcactcgttcatggccatttcttttggcaaatcaaatgtggaaggctaaggcaccttctaagtccaagaaatctgttaggttgctgtttttaataagataagatgttggaggtgcagtggccatagaaaaaattgtcttcatatgcatgtgttacatgccttgggtgctgtcaccttttcattgtattcttttgtcgtgttaaatacacagaataggttttttgcttgttttggtggatataggataggaatgtccttgaatgttaaggattcattattcattcatatctgtagtgtggggggaggacatgtaaggactggctacagaacaatatgatgaagtttccaccaacagatactatggtgttatataagaatcaaatgtgagaaacaggcagatgaaacaatgttaaagtcaagatagagaagattagatggatcagtttgggtgtctatctactggcacaagttgttttttagatttcatgagttgtatgggctggagcagcattctgtttcgaagagctaatcagctgcacccttgagaagcaaattttaggacaggttaaaaactcaagaaataactgcctaacaaaatgctgatgcaaacagaattaatatttgttgccatatcttaagcaaaaggacaaaattctttatttggttctaaaaaaaggatcatgcccatcaatgatcactcacaaggctgtttatacaattcccgacttcgcttaaaattgcttgctatgtttggacttaattgttgttttgtgtcatagtatggcatgtctaggtttgtggtttatatgtttttctgcccgctctcgtctgacctatttttcaccattttcttatgattctcgtttcagaagtgatggaaagaattgagtatgaattgttaatctagtaatctgtaactgtaattctggttgttttttttgttctgttctatatctagctataaatccttgacattgtttctgcagcttg

SEQ ID NO: 6864 - DNA, 1615 bp, Populus trichocarpa
  Intron number 2 from transcript POPTR_0019s01800.1 (locus POPTR_0019s01800) derived from phytozome v7.0 (chr-ID scaf fold_19; pos 1554489 to 1556103 reverse strand)
aagggatccctccttatctcacaatcaaggaccaggtttatgaattttacttgctttattgttctttttctacggttctggtgatagttgctaggcagctactttacttcttttgttatccagtggttcaatttctttcttttgaaatttatttcttcaccaaagtgaggaggttagaatataaaactaaaaaacgggatactgaatataaaagagttattgtacccatacagtgagaacctgagaggcatcaggaattgcatcacattcattttattatgatttttctattcgaccaacaaaacttcccagctcattaggactcagaaaactggctaggttatgtcttaaaatctttctttgttttcctcagttcctgatactttttatatgtaatgaaatccttaaacgggcaagtcttttctttcaatgttctagaaggattaatttttagagggtaatgaagatattttaatcttaatgtgtacataacctttaaggttaaattacaataactcacggtcctgagaccacccaaaattttgaagatattgcatagaccctcttttttatccaaatttcccttggtgtttttaaaatttccttgctattaaaggggatggtttttaaaataccagggacattctgggtacaaaaagggaatcattcattgtaatatttgtttaatgtggaaaggtttttttgtcgaatcatcaaacttttgtgtggtccgtgtaatttcgcaacacttgaggggttattataatttaccataaacttgaaaggaaaaaatgcaaaaattgcaacttttggtttggtgcttttgttccgagcaagaaggttattttgcaagaattccagtatcatgcacttcctttatcttgcaaatgttagtgggtttctaaggtggcatctatgtggctaatatgccatgtcatagccacataagagacacaccaacaccactttagcttcttcagtatcacgtgtttaaaaccttctgcattgagttgaaaagcattgaaagacatggcgcaaattattatttttttgctcatttttttttttttttatatcagttatcggcaagttcaaacagttgtatctaacctaaataatgaacaatggcaaataatattttctgtgttcactattcacttttgtagttattattggaaatatatttattccatttgtaattgttaccataagttttaatagtaagcttcaatgatgaagaattgagttagctctttttcatatgttgcatattttatttgagaaaagttaatcatactttgattgtagactaaactctaaggaaattggagcgacaagttccaaaatggtcaccaaatgagaaaattccaaacaacaagatgccattctgcattttccctgtaatttatcattttggcctattatttggcaacttcgattttgattctttcaactctagtgaacttggtatagttgatattaacatcaattttgatgtctagaacatgagaaaagaagaagaaaaacagaggttgcagtcagtatcatatgttaatgctcgtctatctgtgatttgtcagggaacagatagcacgaaatctgctgaaggaaggac

SEQ ID NO: 6865 - DNA, 1142 bp, Populus trichocarpa
  Intron number 5 from transcript POPTR_0018s14770.1 (locus POPTR_0018s14770) derived from phytozome v7.0 (chr-ID scaf fold_18; pos 14857538 to 14858679)
actttgttatcttagcgagcgacggattgtggaaggtcagtgattaaaataccttaataacttgtagttttttaattttttcattgtcatgcatcccactccataattttttcttcaagtgtgtgtgaaatgataatacttatagtcacttattgtaacacttgctgtaatgttgaacaaaactcatgttggttttgctctaagaaaaacacagcagctaacactttcactttattattttcatatgttttcttattcataattctgaatgtttaagatggctatatatatagccttacagacttttactcttatctaactaagatgaaaactaatcaattagctaactcctaacaatgataaaattctaatagataataatcttaatattgtagagttctaacaatattagaactcttacaaactcgaaatcctatgaaactaaatcctagctgacattgaactctaatattgaggtatgcatccttgtgatagcaactggatacgctgtgcttatttaagaataaaattgccaattttaagaaacttatcgagaagcttttaccgtgtattctgaccattttagtgtatttttggaatttctttctgcatgtcgagggtgggattgatttcaatttgtagttgggctgcttttattattgaatttatacattaagcatgaacttgagtcctcaaaaccagtgtgcccttctactgaaattcttctgtccctgatcttttcccagttgtgaatgacgtaagagccgagtgtttattactgtaaactaatgaaaattcacttatggtggtaagaaatgcagcaacttgactccgacaacatataccgcttgcttcctctctgttattgaattgtttggctgaaaattatgagctagttagctggtggtacgctagcatatatatatggatatagatatttgtcgttggattgcagaagcatgtgctgaatcactcgtgtttactttggtttctgttacgagagtcctggattgcaatggaactgcaatactttatgttcctgaatctactccacataacgtccatgatactgagtcatgccacatttaagagtaactattactactgtatacccactggtttgctgtgatattctgcaggtc

SEQ ID NO: 6866 - DNA, 2139 bp, Populus trichocarpa
  Intron number 3 from transcript POPTR_0012s04410.1 (locus POPTR_0012s04410) derived from phytozome v7.0 (chr-ID scaf fold_12; pos 3627379 to 3629517)
aagagataaagtggcggaggtatggccgctcttttgctctgtggcttagttttctttttcgctcattttggtttctggggtttcaatggagacagttgcattagtggtgtcataaatagggaatattatttttatttattattatcatataaaatgggaatgtttaaattgagtgcaaattaattttcctgacaatgccttaacctcggtaagccttttcttttcttttggtgaaaaaaaataaaaattctttatgttttggattggtgttcttggaatagcacgtaaaaagtagttttgaaccttagcttttaaggagctcaatgtgctaagatggatattcttaagagttttgaatgaattggtaatgcttggacttaggctcttgtcacatgggaagaaatggattgctaatatgagttttggttggctttgtacttaattaggctacctatctaccatgggaaagttaataatctaagtgtctagtaatactaaagtgtcaaaaaaagtttcttattcttgtcaccatccatggaatttaactgtacatgtagctacatgagcgataacctacttatccatggatgtgaaaaataagaaactgtatgctgtataaaataaacaaaaaaggatatatgatgcagggagtagtgccttaactcttaaaattcccttggaatcctatttcttttgttttttttttcaatcaactatctgaacaattgaaaactttaacattaaatgtatttgttaggggaatgatattgtggtcgtttcatggcagccaatttgtaaatgcgtacatggtcgaaagaaaagatctatatgcgtatggttttctgaccaattagtaatgaagattagttttccatgattttcatgaacccagcttaggaaatcttctctttttcaatgtgagtctatatatctttctcaaatttcttttttaatccaatttatctcttagatttatatgggtgccctgtatcagttcctctgtccttgagtcaaaacctacacatttacatttcagccttggatctccctttcaaagtttcataatcggtaatctatcagttttcgaatggttcttcattattgtatcttattgtgaaatctaatcatgcagaagctatggagtgagaacttgctcaatcttgatgatttagttatgtctgccttgttggatgaaaacttagccatgtgttaatttgattgcagttgggtaggttgttcactgaattctctgtgtttggtttgaaccaccaacactctctcacttaaccatgagttcattaatctctcttgagtcagtgacatcttaaaataggtgttagaaaattgtgtagctcaaacattctcatcccatatgcagaccataagccaattgcaagcattgaattcctaagactagggagagattctctcactgattatggcatcaattcattgggtcaaaggtccgcattgtttctttctttttgttccttttcctttcaaaatctttcagtcattttatgtgtttttaaattcaaatagaaaagcaatatttttcgtattctccctaattcatggttgtcctacttaactggtgcatctcacctactgtaactctgtacaccttgacatctatgccaccgtttactagctaaatcaggtttttttcctaacaaacttctcattctggacttaaatcgaagattttaaatgtgcaaataaacttgctggattgacaaaaaaaaaaaaagagcactgaaaaattctaaaaaagctgcctaactatttcagttatttccttaaattttgcttatgcatatagatgaagttatgtatcatttgtagaattgtgtttggcgacatgcatgcttgtgatctgatgcatgcatgattgcctatgtctgaaaatcaacactctcatactcttgcacttgcgatgcttagataatttggtctgacatttttatgccatttttttgttgatgatcataaaacagctatcaacttgtcatgtttttgtttcttttctttctttttaagcacaatactaattaacttctagttgattctggcatgccaatgctcaaatttaacatactattttttgcttatttaggtgggttgacaatcacttggtac

SEQ ID NO: 6867 - DNA, 2132 bp, Populus trichocarpa
  Intron number 1 from transcript POPTR_0018s08030.1 (locus POPTR_0018s08030) derived from phytozome v7.0 (chr-ID scaf fold_18; pos 8810253 to 8812384)
ttagaagggctttgttgaggattgctgccggtcaggttagattttattcaatttgttttttttttctgttttagtttaattttgaatttccagtttccccccctgttttgttggttttttttttaagaaagttttggtctttttttgggtttttttctcctgtattctgttgaatttttttgatctggtaaaactcgatgttttgtttgataatcagagtgtgtttggtattgtggttaaggtttgaaaaaagttgttttataattgttttataaaaagtacttttagttgaggttggtttgaaaaaataagtgtttggttaaaactgtggttgaaattgaggttgaagaaagtgtttggttaaaaaatgcttttcaaattgaggttataaaataattaaaaaagacatatattaatattgatgatttttaattgaaatattaacgatttaattactgctattacatcatgaaataaacaatattttatataaagtatttttattgtcagattaaactatgtttaatttcatcatgtatgaaatctattcaataaggactacagttttcatggtttcctgagcgtgcaacaacataaggtaaaatatcatcaggaataaaattgggattgcgatcaaattctgcaaatgctacgccatcatacgatctccttcaaatgtaattatgtagtgccattgaatcatgtgaaacattagtttttcaaataaaacacaatattgagaaaattttttagattttttttattttactgggtcacatccggttcaatgcatttaggtttgggtcggactagttcgatgcatttaggttcgggttcggcccattaacaatggagctgatctccactgttcacgtgaacagtggagacatggagaagtgcagaacaagaagaagaagaaagggaaggggaaggggaaggggcggcggccctgggcggtggtgagggagccgcgctccactgttctgcaacgtgaacagtggagactccactgttcacgttgcagaacagtggagacatggtgcagaagaaggaggaggaggaggaggaggaggggcggcggccctgggcggtggtgagggagctgcgctccactgttcttcaacgtgaacagtggagtctccattgttcacgttgcagaacagttgagacatggtgcagaagaagaaggagaaggagaaggagaaggagaagaaggggaaggagaaggggaagggctggatgtttctctgctgcaaggcacgccattgttactgtgttgtaacacagttgcaacaaaagtagccccaagctgctttggagaaggagaaggggaaggggaaggggaaggggaagggctgattatccctctgctgcaaggcgtgccattgtttactgtgttgtaacacagttgcaacaaagcagctccaagctgcttcgatcgttgctgcgttgcaaacgcaagaaaaggcggggcccatgaacaataaatcccgtttttttggtaaccaaacatgcaagagctgcgtttcaagcgaaatgcagcagcagcagcgtaaataaacgatgtcttagtgtcgatcatgattgctggtgtcgtaaaggaaaactttaagctctaaattatggttaatcaaatgaaaattagtaatgtagttttatggcgattctttttttttttttctacagaaagataagtttctgaaaatttgtagctctaggattttttaattgtcaatgtgccataatggggttttcagtttagaatttcataactttgtgttgtttgtctgaatttaatagtttgattgatatgaattattgagcagtcttggaagtttatccaagtgtggtttcctttgcttatggtgtttatatatatatatatatatatatatatatatatatatatatatattattgttaaaatgagctatcattttactaattaccatgtactcgtggattgtaatgcatttgatgaccgctttgtatcatactggtatgttgagcctttttgtagttagtttagctgagatagcatttgactacacgcatgttcatggctattatggagccctattaatgtgcttgttacaggttggaaggcgaattgagtcgattgttcttccact

SEQ ID NO: 6868 - DNA, 856 bp, Populus trichocarpa
  Intron number 3 from transcript POPTR_0017s11020.1 (locus POPTR_0017s11020) derived from phytozome v7.0 (chr-ID scaf fold_17; pos 10676660 to 10677515)
aggctaattctcatttttttgccataatcgagcaggtatatactcttaaacattcatttccttaaatgcatttattcggttatggtaatgaattttgtgctcagaatttgttaaactactatgattggacattggattcatatctttgtattcatatgctgtttaattatgtctttctttttctgttgaagttgacaagttgaaagcaatgtttacagtttccaatcgtctttcttcagtgaaagtggggaatgtaaaccaccttggtcgtattccaggagaaaaagaaatcatttttctatccccagaatgggaaaataatacaccgtttgggccttttacttgttagtatcgcttggtagtacaatctgaggaaattaaatttggcatgtattttccaagtaccgtgtgcacacacacaaattgaagatcaatgctaaactgatgagtattttaaagcctagcatttgtaggagttccttttatgcagttaaatttggcttgtatttttcaagtcactcacacacacacatgcaaatgggagatcaatgctgggctgatgagtggattcaagcatgccatttttaggagttcatggtatgctgttaatcttccacgatgacatctcttattttatttttttattagtttttgcacactataagatagaatattaggtattgtattacttattttcttagttagtggtttgatgcatttggttttactcacaatctggttttggaatacagaagcattgttgtgtgatgaaaaatatgccttggattttatttttcctgtcttaatgatctagattaagcttttggaatttatgtttcagattacagaggggaat

SEQ ID NO: 6869 - DNA, 1101 bp, Populus trichocarpa
  Intron number 4 from transcript POPTR_0003s19330.1 (locus POPTR_0003s19330) derived from phytozome v7.0 (chr-ID scaf fold_3; pos 18093041 to 18094141)
ggataaagaaggtgagtggcaggatttattggtgatagtgttgtgaatttctcttaattagctacttttgattttggttctagtaaaagatagaactcattcagcaattttgctttctttgttctggaaggtcatcacttatagctcattctattgtttgaaattataagtgatctttgcttctgatatggaccctgaaagactatggttgtctattgtatatataaattatcgtaccaaagcctgaaacaaatatatattctctgttgctttatattccaagggcaagctggggtatatattatggtagcgggagacatttctttatagcaactcttctgagatttttcttcttatgctggggatatgttacaaatcactggcaatcttatttctcaatccactgatagatttttttattttttgttgaaaatgcatatgactgatgtcaatatgtataggaggcatatataccttttattttctgtgaggcaccaaaatgcatgcaggtgatgtcaaaaggatatgaggcatgtttaggttgtgctccgactacaagtatgagaggttatatatacatgatatatctcttgtttttttcccatttcggtcttttgtgtagaacttaaaccgtaatactgtgaagaatgagatgcgattatgaaaccaccagtcgcaaaatgattgggcttcttaaatcctgttgatatttttaagtaacatttacgatattgagaagcaaatgttgaaagagatgatgttaaaatctgtattcaacatggctaatggagataattattgaaaactttcttgaattctcagttcaatgtgttagcaagcatcttagaattgctgatcctagagacaagggaaaatgtctgatggtgttttttcaagcatagttgctctcactatgaagcaattctagttaccacttcaaattccatgtgatagatgcaaacattatgtattcatttatatggtgtagttgttattctgaaattgatttcttcatttaacatgatgacagcattacagtttagttctccagaatcgagtgtgctggctctaacttcttttttgagtctttaacagtttcca

SEQ ID NO: 6870 - DNA, 523 bp, Populus trichocarpa
  Intron number 9 from transcript POPTR_0007s01200.1 (locus POPTR_0007s01200) derived from phytozome v7.0 (chr-ID scaf fold_7; pos 644762 to 645284 reverse strand)
aagaggacttgtctctacctcaccagtgcagcaaagtgagtgtattacagtcatgatttactaggactttttgaccaatagatttcaaagaataaatctttccacatttacgttgttataaaatcttacaacataacatgtcttatagttgcttatcattacttaattgcgcaaatcttcaaaataaatgcccatgtatatgcaccatttaactaccaaaaaagcttgtaagcacacccaactttggactagttatcatattgagcgatgaagaattaagtaagagaatgcttcttgtggaacaaaatttttaagaagtcttcacttccaattcttcttcttgaatgaaagagaaagaaagatattatatatatatatatatatatatatatatatatatatatatatatatagcattcaaaggacaatgtcttcaaccctgctctatgttcaatagtagatcatgtgtgtatggtgttgacatttcaatttgcaatattttgcagataccttcctggaccag

SEQ ID NO: 6871 - DNA, 2637 bp, Populus trichocarpa
  Intron number 7 from transcript POPTR_0005s18780.1 (locus POPTR_0005s18780) derived from phytozome v7.0 (chr-ID scaf fold_5; pos 17071981 to 17074617)
ggcaggcaagaatttggagcacaggtaagctattatagcaagatctgttttgtagccttctatttaagcttgaaacagagcagcgtctcaaatttgttaatataaacaataaatttgggtagctctgacatctattccttttcttttctgtttttgtggtgggcttttctcacttttaagtgttgggttcacacatgtaaacctgatggagaatgaaggacaacaacggaaatcagcttatttgtttagaaatttgaatattgtatgattgttctagattttatcatttaggaatatgagtacttattatttagtagttaaattaggatgttagtttctttattgatttaagacttattaggttttttttatttggttggtgcatataaataaatccctagacattcaatactttgatcattaaattattaattgaaattgaaaccgagtttctgcaagattgagtgtctttcttgttggtgatttgttactttatcttacatcaaattccttgttttggtgattttgctttcttgtcctacatcaatttggtgcccaccgtgaaattcatctagggttcttgttctctaaaaaaaaaaagaattccacaaagagaagaagttaaacatgagagaacaacttgaagtaccaagagttggtggcaaaaggggtgaaattttttaccacaaagctacattattatacttgcattagagtatcagatttgttcaagcaattggctgccaattttcaagctaataatgtgatcttgttttttaccacagaatatttggttgccaaaatgtgacatataatagatttggtttcccaattgagttgggtcttgcattaaagtccaattcatgccactcttcttgccttttgctagtgggggacatcaaattagtcaaatttaattgcaatggattggatttctctgctttggatttaaggtcatacatccaattgaaaacaaaaacaattgcaatttagtgtgtggcttaaacagaaatggctttcaaggatattggggggggattatgtgactggcaatgtacctctttggtctccatcttttaacttgagaatgggttggtatgagtggaacaatccatctagttccatgagaagagcactaagtccagctatgaaggcattagtatctaaggaacttttaacttttctaagtatggatgttaaactttttgttgttgtttgcttgattgaaatttttagaataaatgcacttgatgctccttattgtgatgaccagactagagatatttttcagcttattgtagcagtattagaagatacctttgacactttgttttggttggtttataagcacacttggatctttgaaattatttctcaggtcaaactttatcttttgatgctcgatctcaaatgtgattctttggttgaggataatgctaaaatgtttttgcaaagttacacaaactacttttccaaagatatgttcttgaacatggattatatgatgattgagattttaaaggaaatttatgaaattccattggaattagtctttcttcttttggataatgagaggttggataatcaagctgtctcatttagtacacttaagctagttgatagtgttcctatcaattgcattttagagcttcctccttccctacatgtataaaccagtgcaccaattaggctttcctcttgaccactgtaataaagttgtcgtcgatatctatgaacaatccaaacctttagagtctagtgacaacctacaaattggagaatcaagaagttcctatcaaagttgatgcaagcattgaagagattaaagaagagattgatcacattgactttgttcctttgaattcaatattgcatctgagaagattatctttttgccaacattcttctcatcattgaagaaggatgaaaggtatcaagtgcaaaagttttatgaaaggtatcatgtgcaaaagtttttcttagggctatggtgtgcatgcaagtttgttgagtttttgctatttgacactttcaaactcgtggtcgagttttttttccaacctaggagaatgatggagaatgaaggaaaacaatggaaatcggtttatattcatttagaaattttaatattgtatgattattctagattttattatttagtagttaaattagtattttagtttccatattgaattaagatttattattattattgttgttgttgttgttgttgttgttttgttcggtgcagaaaaaagaataagcattattttgataattgaattattaattgaaattaaaacttgagtttctacaagattgagtgtctctcttggtttggttccttcaagattgagcatctctcttgttggtgattttgttctatcctaaatcaattctcttgttttggtggttttgctctcttgttttacatgagaaccattatcaacttgttgcatagacaaactgatacaacattgttttaatatatgtgcacaaacacgtatgcccataagttattaattgccattgtgcttttacttcagtttttcagtgcaatttggaactctggcttatgctctggatcttttccctggtctaggtgaactaaagacaacattgagcaagcataaagga

SEQ ID NO: 6872 - DNA, 921 bp, Populus trichocarpa
  Intron number 6 from transcript POPTR_0015s04580.1 (locus POPTR_0015s04580) derived from phytozome v7.0 (chr-ID scaf fold_15; pos 4790054 to 4790974 reverse strand)
cagcttcttcataggtaagtctttcagataatcaagtatgaatatatgactgatttttttgtggaaaagctgagaatgggatatacagttgtagtcaaaatttcctttgaaggcacgatgacagtttatccactgcttgtaattgtaccaccatagaactttgttcttttttccactttttgtgatatgattggaaaaccaatatctaaattagtttttgattagctttcatctgtttttttggtcgcttgggatggaggtatcattatcgatcatatttaggcatatggaggtggttcgatatagatcatttatgtgtacagtccatgcgagaaatttatagtgttcaaacatcaatgtcagttttgaaactttaacctttttctgacagtcatctccaaagacataaatcaatatgttcatattggggtttgtagttaatgagaaattttatcaataaaaaaagaaaatctgagagagagagattatcagatgattgggctagatctctcaacttcttgtgtaggaaaaaaatgggatttcaaccagcagttgcttatggcttataaaatatatttatagtttctaatcaggtgtagtagttagaaactgtttcttaccttcaaattatgaccaatacactgaatatactgttattagaagtctcatgatctgttaaagttacaacggacaaaccaaataattatttcctttgcattttggactagacctgggtgctctttgacttaattatatgtgttatttaacttgtggaggaggatagaattctgtgatgttcactctcttgatgagcatgagtatggtgtatgacgtgaaatttggatgcttcttcactttgttgtaccttttattttgatattctctagacaatatgaatcttgtctctatcttgtaatagat

SEQ ID NO: 6873 - DNA, 775 bp, Populus trichocarpa
  Intron number 2 from transcript POPTR_0008s09030.1 (locus POPTR_0008s09030) derived from phytozome v7.0 (chr-ID scaf fold_8; pos 5603729 to 5604503 reverse strand)
ttgaacttttaaaatcatacggtggcttgtcatatgtgagtacagtccttctccaatcctttattgacacatgtttctttgtctcattgatgataaaataaagaattttgtttcttggggatatatgtttattctacaatcagtgatgaattaaccgaggaacgtgctagccatgtttccctgttttcaccataactagtgttagcatttgtagctttggaggtttcttgctggatatttttaacgtattgtttcagttcatagcatccaaaattcgggatttgggcgttttagatagccactgctaatatgatctatcatattcggcagcatactattgtataaacctattggtacaatgaaattatgtagctcttgattgttgggcatttattggtggattaattgcaagctaattactttacaccatgtaatagaaggggaaagcttttaccctttgctttatcactcaagtaacgaccagcctagcaattttccagcaagactggcgtgtaatgagtgctactctgtgttggcattggttattgactgttttttggttttctggttcttttcatcagctgtaactaatgtgtagtgacccactgtggcaatttgtttgataactcaatgttccttctcaatactccaatgccgtatgctttgtgctttgctgtcatatactttatacaaatataatcgcacatcactcattctgtgtcttttaattgcctgtattagagctaacttcgtttattcaaattgcagggacaaa

SEQ ID NO: 6874 - DNA, 1643 bp, Populus trichocarpa
  Intron number 1 from transcript POPTR_0001s28180.1 (locus POPTR_0001s28180) derived from phytozome v7.0 (chr-ID scaf fold_1; pos 26950935 to 26952577 reverse strand)
aaggtttggccctgttaattgtttgcttatttacttagttcttagagattgattaataatcagcaagcaaagcccatgtgattgaatttgaaatcttttttgattatgttcttaaattattgctttaaattatcaattcatttaaatttgatttgtcttttgcttttgattttggtcctattcaagaccgtagaactttggagctataaatgtttttaacttataagaaactgaaagatgcttatttgcaaagctacatttggattggtgatggtgaagtggtgtcaagagattgtttttgttttatctatgggtgagacgaaagggaaggtgctttcatgttggttcatctcgaagaggaaagtggtttttgaatggtttgtcaaaaacaatatgttttattcttttggttttatgaatgggtgccgcgaaagcatttttttcgttgttgggaatttgaggctgggttgagttctaagagacaacatggacgaagcttgttcatttgctgtaagtatattggtgttgtagtccggcggtgctcgctgatgtggctatttaatgaagtttttagacgaatcttgtagtatgtataggtggtagttgtatgatcatagtaaaaatcatggcccgtaatttatgctcaagctgcctaggatctggatgggttattgtgtactattttgttagtgtacaagccaagtgttcaaacttttttctttttgcctgtggacaaccagaggtggctagcttccacattctgttttgttggatggtctatctttccatcactttggtttgttcttcaggagcagtactggttttgagaaaaaaatgcttctgtcgaagtgtgtttggttaacatctagagcaggtttgaatatacagttttaggtatgtaatggataatttatttgcactgctaaagaagtttcccatttggagttttggtttaaattagtcgagtatccaccatatgaatagaatacaaaaaaatggatcaaaatgcaagccataggtatttgcagttattgtatacacaactgacaattggatggcagtggatgtgatctaagagttggggcatgagtatctttaagtgttaacttttttcatgaccattaactgcagtttcaaaatagaggatgttatatgcaatcatcctcaaaatggaggatttttttatacataattttcctgatgatttgaagataaattgatggattgagaaactcttcgctttagatgaggttaaaatcacgtggattgccaattctctggctgtgaaactagtaaatggagggaaaaagagtcatgcacattgcacatgcaggcatttgactctcacagtgtgttgctaatactatgaaccaccttttccttctgtatgttcacacaatcttaatggagaacttgatgcacttcattaaatgttctattttatgtacgagcgagttatgagtggatggtcagaagccaaaattttgtttggagtagtgtttgctctttctgttgaccatatgatagctcaactatgtcaaggggacaaatattcacgctgctgtcttaattttcactgatacctatctttcatgcgtgtgtgatttttattcattcagcttcagtgtgtattcttcagttat

SEQ ID NO: 6875 - DNA, 4016 bp, Populus trichocarpa
  Intron number 2 from transcript POPTR_0013s11960.1 (locus POPTR_0013s11960) derived from phytozome v7.0 (chr-ID scaf fold_13; pos 12614482 to 12618497 reverse strand)
gatcaaccaagtccaagcaggcagctgttgcaaaggttagcctaatttgtatgttgtttactttttgtcaaattattatcaattccttctcttcagtctggagtttcctatgtgatgttttcagttgaatctgtgatatagcttgtaacataagtcgtagtataaagtgtttacttgacatgcattcctggtagttatgcttgttaactatgaaatttgaagcatagattataccactgaaatgaggccatcaccatgtcactgaagattaggactcattagaatgaagattgttaaaagctgcaaccaaatcacgaaatatgtaaaactaatttttattttatgaaatgcaaaaaaattttctgtcaattctcataactactaacttctggacagaaactttgaatgcattggccagacagcaagttgaattgaatgagcatgccactctttttctatgcccatttatctcctttatcatgagttgtttagaaattcaaatcccattggatttggatccttgtgttatttgaaaaaagaagttgtaatgagcgattcctggctgtggggaacaaagattaaattgtctgtcatttctctctgtattattttgtgtctcctgtcataccttagaagagttaaaagttctagttgatttatgtatggcctctttattatttgagaggtttgattcaagggcatccatcacctcctattttcattttctttttgccgtatgatgaaagcctcaagtagaatgtttcagatatacgtgggaaactgtcggggggttaagtccgatgatttgctgatttcaaatttattatttgcgaacaatcctttattgttttgcaatgctaagttgattacatgtgataatatttcctcggtttgggttatctaatatgatatggggctaatttgagaaagagtgcattctttcactggatgagatttaagtttcaaaatgggggatgttatctgctatttctgatatcaagtgagaatcaaatttggcatctttatctgaagacctgcggtcctcccttgaggagctcgcatgagattccttcatgcaaagaaaaggaagagctgggaagtttcaaactttcaatgtttgttggggagggggtaaagggtggaagggcattgttatttgattaagagtactctctgtttaccaactttgtctattttacccaccctttttggtccatgaaaaggatttgagaaattgtggagagattttgtgcacagtggaatgtcatggatgatcaggcataaattggggaaaaaggcacatctctccattcaagctgattggttgtgtgtgagaaggctgtacatgtttaatagagctttatcaaaacttgatgtggagaggcttactgcacagggaaagcttttaaaagttggtgatggctaagcaatgttgagcctggagagaggcagggttgtgtctcctggtttggaaactttgctgggtttcacttttgtggaagcatcagaagtgggtaataagttttcaaaacttatcatttttaaggtaaatgacaataggttctactttatgatggggcatcatgctggtggagcctttaaaggtaggatcttttgttgggagtattctatgttggagcatgtgggagaaactctcatatattgcctgggatacatgaatgctaacccttggtctcaaattagtagcattggctatttggatcctttgtctctattattgtgttctgttgagggccaaacttttaattagttgttgtaacctaaaatcccttttctctgatgccttgagagttacatatttcttgacatgcaaaattggagttggtgaaggtgcttttaattgcctgtatgtgttgaaggtggatatggtgtgcaccatatatactaggaagaatcatcataatgaaaaagttttccaaggtttgaggtgatggctgaatagaacgttcttgtggaatagtgcatagtgagcaggcttcctacgtactttctatccatggaggcagttatgtctcgtattctttcatgagagactgtcaaagaggaagaaatttattcttagctggttttatttgtgctatagagatggcaaataatgaactatcttcattgattttacctaggacttccatgtattctccttcttttatagctgcttaagttcctaatatgttgctagatttggggagcagttggagaggaattttcggctcaaaagtagtattattctaaggatgttaatattgcttctgttggagcttgaaggaggagaagaattgtaagaatatttgtagtggtgcacatgcttattgggatcatgtctacatatatccaattctggctgcttaagcattcatgttttccttccccttgcttttttatgcaattacctcataaagtctcttttctttgctgcgttcataaagtctattccatcaagaattaaaacacaaaggaggatggcattgtcattaattttagttttgttaaatgttttaagtttcattaagttgtccttgagttggggcttatttcttaattgactgcctcaatatcacattattgtcgaatcaggagcctgaaatatatttgagaaatgaaggcattttataaatcaattacttgggaaagttgatttcaggaacaaaaaggtaacgaacaattaagttacataattatttaaacatttaggttttgctcggaattggagtgctctgtttacatgcagctaagcttgacatgtctagataactcgagtaggaggacgataaagaatataagagaagaaagaaaacgtgttttgtttgtgtcatctgaaagacttgttagtgctctaaactagatatttttctgttaggcaattgcacgtttcatgtagttgtttgcagtttattatgcactagttacccatgtgttcacacagtaaatttacagattctggtgaaaattattaaaaacgatgctttacatagagttcatagttttgattgaatggagaaaaatgcgacttctctgaatgcctcataacattgacataggtcttttcagttatttgctactgaaccgtgtagacattagttctaccatattatgatgtgtatattttctaaagcacaaatgtgaatacttttaaatttattaaaaaaaagtcacttccttgataaataacatctatataatcatgggaattaacaattattaaagttctacttatttgattacatgaataacataacatccttctgtgtatcgccacattagtaaataaaataacaatatagtgaaagtgtccataatgttatggtttaaacatttcactcttatataagcatataggagttgaaaagaaaaataattgaatgttgataaataaatgaagcatgtgtgtggtttagtacgtctgaaagaaggtgaaaggttcaagaagcattgaagccattttggagtacaaagcaatagaaaggaaaaaaaaacagaaatcatggtcctatatgtgcatggctcatcaaccaaatggagcatgacagctaaaatctttaagtaatcaatcattgaaaaacaaaatcatctaatgtgcatctaataaaaaactagatgattcttttttttttttggtaagagtcagtgtgtgttatttgtaagtagaatttggatgcattttcttgttctaggagatgattttttcatcatatgttattaaatgctcctaatcctctatctccaaatacattgcatcttataatataattatcaaattcatgcatggtatgatcatgtacttggcaatgctcatggagctaattcatgtttccacactgcaatacttcagtataggatcttctttcacacgtgcacgcacacacacgcacactgataatagatagatgttgtaagttgctctgtggaattgtgtatcagaaatttgctcaattaaaaaagctggttattttggtgttgcaggtctcagaagtgagttcactgttaggcagagctgg

SEQ ID NO: 6876 - DNA, 934 bp, Populus trichocarpa
  Intron number 6 from transcript POPTR_0004s16530.1 (locus POPTR_0004s16530) derived from phytozome v7.0 (chr-ID scaf fold_4; pos 16976647 to 16977580)
atcaactccctgaaaaattagaatcctacaaactggtacggtatcactattgtattgccagcctgtgcttggtaactgtggtttatggcttaattttgaactttttatagctgttgattcaccctcagtttgatcaaagtttcaattgggaatatgaaaagatacattaaacagattttgatatgattttactttgtacaacttgcttaatacaataatgttatcttggtgcagatttgcacttttcctattatactagttaatttagatgttatttctccatgatgtagggagtccatttttggcagggtaaagggtagaagttctgagtattgattttccagaatgttcttagaattgcaatgggaagaactttgaaaatttagagattttgtgtcaatctatgcagtttagatgtggtgaaacataacttcagttccttactttcatgctctctgtcctaaaatgagtattatgtgcgaaaaaatgagaatttattttcaaattggagaaaaatgaaagattatgttcaatttgtagaaaaataaattaggtgaagtaaattttgaatttaaagaaaaaaattaaaattttattgttttttgaacatgatgttcattttgggactgatctagtatgatatttttatatgatatattgggggccaatgttttctttttgaagttctccatatagggtttaaatttacatttatattgctattgactcaaaagtcaaaatgttttgaatttggattctgctcattaaactaattatggtaacttgatctccaatcatatagttacattttcttgaagcatgacaatgacaaagggagcttagctctccattaatcgtgttttctctactaaaatgagctttctacatgttttgaatagatctgcgtgtccaagctgaaaccactttacttggt

SEQ ID NO: 6877 - DNA, 459 bp, Populus trichocarpa
  Intron number 2 from transcript POPTR_0009s05210.1 (locus POPTR_0009s05210) derived from phytozome v7.0 (chr-ID scaf fold_9; pos 5355971 to 5356429 reverse strand)
atcacgagtaagttgtcctttttctatgtcaatgattcttcttttggttttgggaaaatttgatatatttcttgtgtcagaatttccatttgctctattctatgtaaatgaatggatgttttacttttgttatttataagttggttgtatcttgtgattcttttgatttaattgtgaaatttaatgattcatattgtctttgaattaaggttcttacattggtcagcttaatgttaataagattttttctttcagttgatatcttttttcgtttggtaacttaaggaattgattaagttttcttgttctagtcaaattgaggagtggtagttggttagagtacgcgaattatgattagtaatgaccatctgattattcactgattgtttgtagaatatctcttgttgtctggtttctcatatagtgattattggagaggttgcaaactttgttgcgtac

SEQ ID NO: 6878 - DNA, 445 bp, Populus trichocarpa
  Intron number 1 from transcript POPTR_0018s03950.3 (locus POPTR_0018s03950) derived from phytozome v7.0 (chr-ID scaf fold_18; pos 3384218 to 3384662)
gctctctgttcaaacttctcttcctgtaacttcaggtaggttctctctcttttttaaattctcaaattttgaacctagattttgtgtttttaatcactattatcttactgatacttaaagactactgttgtaatcaggtatcttttgattttttttgttcaatttgattgtaatttgcctctaattttacaatttctagcaattagagtgtaaaattacaatttgatataaaaaatttgatttttttagtaataattcgaacaattattaattagtttgtgaagaaataaggctatgtctatgtggtattggtaggctggaagatttttatattttactgtaatcatgcattctcaaaaaataaaaaataaaaaagaatattaggatttgattctgtgatgttttttcaggtacgctgcagggagttggttggactaagtagtga

SEQ ID NO: 6879 - DNA, 1753 bp, Populus trichocarpa
  Intron number 5 from transcript POPTR_0006s16050.1 (locus POPTR_0006s16050) derived from phytozome v7.0 (chr-ID scaf fold_6; pos 13874309 to 13876061)
tatagcagcaaaaagtccaggagaaggatcagttggtatgtgtttttttttttaattatcaaactattatctgtttcttgaactggcatttagaatctttttttgactccatgatcccatgatgagatggcaacaactagggaatgaaagacatgtttatctatcatgcatctttggaaataacttattcctccaagatatgtttataatctctccaagtcagtttttttcttccatgagtagaaaactcaaaaaagaatctggttaaaagaatctctccttatgattggagattgagtcagtgctcttttggggtaagatagtgatatattttctgaaaacttttacagggtaagaacatttcatacattggatgttttttacaaatctattatacaaggattgcacattacacaacataatgtgttagttaaatcatttgggtgcctgactcttttgatttcagagatcaaaagctgggatattgctttaacattcaaaaatcttggtagcaaacctgcatcacctaggatcacagttcatataatagtttatcaaaataggattttgtaaatagattaaggccctgtttgtttgctagaaagtagttttcttttggaaagtggtttccatgaaaagtggattcttggaaagtgaattattttccgatgtttggtagtgtcatgaaaaatgagttggaaaacactttccagtgtttgcttgtcatggaaaataagttggaaaataacttattaatgttttaattttttttcatgtttattaaaagaatgaggattagttcttacaaataaaaaggatggaggatgattttaaaaaaaaattattttataaattattttaaataaactaaataataatcaaaatattacaaactaaatctgacagataaaaaagttgaaagatgatgaaattaaaataaaaattacaatttcataaattatttcaaaaaaataaataaatagcaataaaaaaatagagaccaaatctgaaagataaaagattttaattaagaaaaggataagagaaaagcaaataacaatcaaaagaatgagaatcaaagttgatataaaagtcaaattaaatgaaattctaagggatgatattgaagaaaaaaaaaggattcaaaacaaaatatatagcaattaaaagattgaggatcaaatttgatataataaacaaataacaaaacatttctgaatttttcacaacttctagaaagcattttccgtccaaaataaaaggaaagcaccttactgaaaactaagccaattttttctttgattggaaagtgttttttgttggccaacttttcaaatggtaaacaaatacagtaaagtttagaaaatggcttcctgaaaaccactttccatgaaacaaatagggcttaaatattcatgaagagaaaaatgttctcttctctgtaattcatattgttcacatggagatttgaatttagcttttggtgatttctgatattacgagttaagatatggttagtaagatgatcttgtgcttaaatcttgatgccaaccgtttataatgttggctcctcacagtttttaaatggttaacaaagtaggtttattctcttaaattaataactgcttttttgagatctagttagtcatgtttgtcattacctcatctgctgtttcttttatgtttttcagtgtgatgactaatcttacattttgcaggcaattatcttgcattgactggaaagaggatttct

SEQ ID NO: 6880 - DNA, 810 bp, Populus trichocarpa; identical to SEQ ID NO: 6825
  Intron number 1 from transcript POPTR_0006s03390.2 (locus POPTR_0006s03390) derived from phytozome v7.0 (chr-ID scaf fold_6; pos 2160489 to 2161298)

SEQ ID NO: 6881 - DNA, 3023 bp, Populus trichocarpa
  Intron number 2 from transcript POPTR_0019s04640.1 (locus POPTR_0019s04640) derived from phytozome v7.0 (chr-ID scaf fold_19; pos 4810635 to 4813657)
aatcctgccaatgtgagtatcccatttgtctttgcttctcaatttcatagtcatctttcctttgagaagatatgtggagtgcttatgaatctctcaaataatgcagcaagctgtttttttcgtacttatagtttagattataaaagcataagctcctaaacatagcgtgcatgatgcaaatcacctttatttttcttccgcttgttgttatactgttttttttttccttgcagccatttctgtattttggttaagatcgtttcaaatgtatgactgacattgccttgctacaatgtctcataatgtctgagttcatctcttctctctctgtttgacagcgtgtaaacctgtgtaattcaggaaatgtagtggacatgagatagggaaggtcagagccatccatctcctctttgaaaatacttctgccaagtcttgggatattctgctcaatttcatggaaaaaaactcctatctgattgacaaatctcactgatccaacacatccccttctctaaacaagcaaactacaaagagcagactataaacactattaaacaagcgaactcccaccaactccaacaaactaaaccataaaaaaacattaaaatttccacctaaaaaccgtctcataattcaagaaattcaagaaaaacttcgcaactcataaaatccctttcaccaatctgtttttattcttggtttcttttatgtatctcattgttaagtgatattcttttggtatcgaatagctaaggactttgctctttctcattcttgactagatgggatacacaagcgctttgctcatctttctcctcggtatatagacaaataatagggaggaacataaatgacctcttcgtccttctcccttacgctcacttctaactgattatatgcagggcaaagttaacataatttaatgtcatgattagcagctttttctccgggcatctaggtcgttctaccattaacattgtctggattcttaaatctgcaaagagcaagggggatggggaataaaatgttgatcgggactattctttctttaaggaaaattagcttttcataaatgtgcaatgtattagtgttgttttattgctggtgatggtggtggttctgggcaatattgcagaggtggaggttgtgatagcaggtggagatggatgtgactgacagtagttacagaagagatctacaatgtggatattattacccagattaaacttttattgctaccaatgaagacaggtggaaacaggggaggaaccccttgttgtgttgcatttcgttttgggatatggagcatgaatttttaatgttggtttgatacattgaaacgcgttctttgttccatccagcctatatagaagccgatggttttctttggaatttatagtaaggatatatgatagataatcaaagtagttcaagagaaatctggcaacaaagttacatttgcagatatgcagattagtctattaaggaaattggatcggaaagtttaccttccaggattccttggaaacttctaaagtatagccatcctcctgatatggaagtatggaacaataattaagaaaggttataaattgccgagaaattattcaaaactgttgggaaacatactccctctcttactttcataaagactttgtggggttcgtgaataaatgtgagcaagggagtacaagttcttggagtttatgaaaggaattcagctttagaagtttttcagcctgttctttaatggtttcattttgaagtttgattacctgcaattagagctttgacagttctgcacatctatgggatagaaaggatctcttacatatgtcaaattcaagttttggagactgaccttgctcgcaccattttgatagaactcttgcctttcatttttcgtgagtatcatgcatgctctcatttgcttactaaactttcattcaaattttacatcttttacttaggtaatagaaggtctgcatatgcatccacttatccaaaggtaagttagtatggttgtcaattatgagtgcaaattctagatgctggaactgcgatagattcatgtctaaattgctattaaacagcgaagtaggcaaaagttcaccaaatccttcttaagttccttaatgtaggtgtgtgttatctcagtttttttgtaatgccgaacaaaaattgatgagaatactccgtcttgatgttcctgtgagggatggatcaaattttgaccacttgagagggcccaaactaagattagttttttgtttcatcttttttctttctcaggagaggggtagggggtatatgagctgccattgttatttcctcttccttctttgcatctgttgtgtcttcatatagaactctgagtttgtcttgtcataatgtttgtaacatggaaactgtgagaaactaactcctaagcatgttaatcccttgcacgttctgctgttgcttttttatcttcagaatacaatttggctatggcgtgaggattgatctttgactcagtagagtctttatcttcatggatcaaattttaagatctgagaagtttgtcatggcacttgtttttgctaaagggagaatgtaatgttttgagatataatcagattgtagagcccacctgttacatacaaatttctgttctttctggggtatatcttcgatctaaagcctggttcttacatgatcatctgcatgttagattgttattagagggcttcacatgattgcaacaacgctattctattaccatttatatactctagagatcatagattcatggaagtcttaatatgaaatgcttgtcttttgattggacatttaagatttttatccgcaatagatcctgatgatggtgttctagtttttcatttgatgtttctagttttcttgaacattttgatgcaatcaagtacattttgatgcaaatctagttttcttaaactgtttggaaatccaacaaattctgtagcttatcctctgctgttctccacaggcctttgggtgggcat

SEQ ID NO: 6882 - DNA, 3679 bp, Populus trichocarpa
  Intron number 3 from transcript POPTR_0002s11400.1 (locus POPTR_0002s11400) derived from phytozome v7.0 (chr-ID scaf fold_2; pos 8435242 to 8438920)
gtcccttgagaatcttcaattctggtacttcctctctctactatgcacgcctgtaatgatctcaagtgagaagtatccctttcaaacaaaatattatatcctatcatggaaaggaacggacgaatccactaggtttcattgttgcagagatgggtttgatttggttttgcttgctacactacagaaaccgatagtcttactgctcattacttgataggggaaaataaagtaaaattcctagaccaacctatatgtcaggatctcctccattcatgaggcaacatttcctatccctaatgaagcgtaccctgaccaggattgcgccttccaataatgatattatggtcactgtgtacgagtaacctaacagccactagtactagattagcaaaccctaatcacgagtctatagtaattggatttggattttctttgtatcttacatataatagtactagtatcttcctaaatctccaagaaagctactaaggcaaaacgcactacatggttctgaacaatgatatattacacgtttgcttctcttataggctggctttttaggggtctgtgatgtctgacaaagtcatcctttaaaatttagggttttcttaccaaaatctagacctgattacttctaataagtctgtttctacaggagtcaatttttgttttgggatatactataacaagacctcgagatagatttgcagaattgtttctgtcatttccaagttgttctttgcttttctgtaaaagaatagtatttgattttgtattgtaaattgaagaacctaggatgctgttccaatcagtgctaccccatgtagcctgtacggccatgtcggaataagtttttacttattttattcaatttttcatatataatacttctacatgtctcgtcttttcttgtttttttttttctttttaattatttttctaacgcctttctttagttttttaaacagatgatttaattaataatcgttccaaatacatcttgaactcttactttctatcaaaagtatgatgtccttgtaaaaaagaagaagtataatattattggttttttcactaatgaatggatccaatgattttatcatttttcactaatgcttcagataactttcttgttcggaaagatgaatagagacgatgaaggaaagaaatagtcatttctatcatttctcacttgtggtttatggtctgtccattatgaacatatcaatcctttttcgtcttcttcctgatcactttttaaatgacccatcccttctaattatgaacagaccctaagcaccccccccccccccaatctcttctaattagttcaggaatggttcctgtgttgtcagggagtaaacatttttgtacacatttcttgatggtctaaaatcctatttatatattctctttttttggacttactgtacggtaggaaatagacaactataagtgttgctttgatgacttaatttaataccacattgtaattccttgtgctcctgttttaatctgatgggtattgtgagtctgattgctttgaactgatggatttattttgtagttttgcaatctactactccctggttgctcaaacatcttgtttttacaaatttcaagctggtgttattgaatgtggattgaacaatatcgaagctaatcaaattttaactcggtgccacaatatttctctcgactcttgactagaaaaggaggcaagatgtttggttctgtgtattcatgtttgccatgggaattgatagccatttgcttttggtttcaattcattacgagaagtcacagcgtacattgctggaactaaaagcgattaactgtttcttgttcttctacctcattttctgtataaaactcgtagtgactcgcgaattcttttcattggtatgatcagcttctcatggaaatgagcaaactaaccataattgagagaaatctaatcataattattgctagatacaaggtaaagcaacttcaaatggtactgcatttcattagcttagttcgtgagtaatgttatagaatttagcgttctttcgttgcatatttttctcttgatgacatttatattttctttttttgataacaatcgagatgatatattaaagagctagagattgacaaactagaaaaaattaagagaagatcctcttgttttttgggtggaagaagtaggcttccattaattgcttatataattgttttacactaaagcaaaggagagcgcgttattcatttttgtctatctcgagtttttctgcttaactatccttattggcagcctgagttctaacaggtgctgtttgtggaactttgtattctattcttttttgttccgggtggtgcgatcccttcatttcttcttttcttagcaggatttttagaatcctctcttacagcagggaaagaacattcccttgcaaaaacagcgtaggaagggtattgaactattgaatctgtccacctcatttgatctgatatatagctttcaactatatatacttcatgttgctttctgttatagcgaataattgtccaatgtacttgttagtttctccattttttatgctcttttacccttggctctttggttatctagctattcatatactggtggctcttctctactgtgagtctagttgcaattagataacatgtgtcatgatcatgttcgttgtctttgcatcgacttttaacgtatgtgaaccacgagatctattaaaaaagtgaagagctcagcactgctagtgattagaatcgacttcatcaaaagctcaactaattctgtttaattgtatggttcattgtgctcactatcttcaaatttccttcttgtgatttttgttgcaagtcaatactcagatctagatcttttttctgcttaatggcgtgttttccttgaaaaaacctgcgttcgttaattttgtattgctagtgttgtgtgtgggtgtgcgatgcttcagattactggcctagaacctctccataggcaactagcaaaatgcttgtctttttatttatcactactcccatcatgtgttaagtgtggattgctatttgaagcagatagatatttattattcggtgcatttgaatcattttggtattaattaaacatgattctagtgttcaagttcctctgatacaagattattgattccatttttacatcttcccccaagtcatcctagactggtgaattggaaatgaagcatgttgttgagaggaatgttgaatttcacatgattgcatccggaaaggatagtgtattctatttaaacaatagtcagtcaagaaagaaatgcatttccaattttcaaactacaagctgtgaaggatcaatgcaggttgtattatttgtggccaggcttctctctccttattttagtgggagacatttctaagtgttgaagaaaactcatttagaatctctcgcatatatgagaggaaaaaatcgaagtcaatatgggggtaattagtggtgtaaattatcaagaattcattgtgtcttttcataaatcccaggaacttcacagtaggattgtgcatgactttattatctgtctgcattttcattttatgcggatactttctgtcctatttttgttctagtccaacgaagtgtcattttatatgggctttttgtttatcaaatgcacag

SEQ ID NO: 6883 - DNA, 1474 bp, Populus trichocarpa
  Intron number 6 from transcript POPTR_0001s38700.1 (locus POPTR_0001s38700) derived from phytozome v7.0 (chr-ID scaf fold_1; pos 37876244 to 37877717)
ataagctcaaggtatgagaatcctgtaattctatttattccttttattggttactttctggatatatgagaaaaatatgaatgatacagaatatagttggtgtaatcatttaaggaaattatgagaaaacgaatcaaatgtggttgtaaactttcacatgcattctttaccctaggcaatttccccatcggtataatttcaaaatataaatggttatagaacacatgttttacttcttccagagaaaaggaatgattaatctcaaagctaaattcactgtctttgtacttttatttgcaaatatgactattgttcccctttaattattgttgctgcggaggctttgccctttgattgcgtttatcacttagaaaatataatgacggagctttggatgcattgaatttggaaagaaatatgtagatgctctttgtaggaatgagctagtgtgtatgctttagagtttacctatagaaaaactgaaatattcaattaattagctccaaacttcaagaatctatccctcctactgaaatcaacttttcttggatttagtttttaggtgtttggcagtgtggtagtggttgcttttcaaatagcttttcgtgccgaaatacatgccaatgatgtttttttattttttaaaaatcatttttgacatcagcacatcaaaatgatccaaaaagtacaaaccgcactcaattttagcaaaaaaaaaaaatttgaaattcggtcaaaagcaggttcaaccgcagagccaaacagggatgcgaaggtgtatgtattaaatcttgtgcttttggctcactggtcctgaattttgatcatatagccgtagctgaacctacaactgcaaagacacatagcaggagggaagcatatttatgacaggtgggtcaagagtattaacaaggggtgatatagagcatatatgaatatttcgcaaccatgcccatacttgtgaaaatattaatattcctacaattatcttccatccttgcactttttcactctaccaaaaaaacaaaataaaaaaaatagttttattccctcatttactgccccactttccaacctttctatctctacaattccagttcagagaaaatgttatggtaatgactttttggagcatactaattaagtgactccttattcatttaggcacgaggagcagtttacctgaatgcatatttatcagaaatacaggctgtctgtgtgaccttttacattctgcaagcattgtgtctggatgcatcgctgtcatgcatcaactttgtcaattttataaagtatttcatctactgcactcatcatgagcgtaattgaaccatttatatttgcccttctttctcttctttttcatttgcaatgtattaaacttccaatatagcaatttatggctttatgtggagattaaatggttccttaacttgaacttttgcctgcgcattgcagaagaggaaagttgctg

SEQ ID NO: 6884 - DNA, 1888 bp, Populus trichocarpa
  Intron number 1 from transcript POPTR_0007s09860.1 (locus POPTR_0007s09860) derived from phytozome v7.0 (chr-ID scaf fold_7; pos 9393989 to 9395876)
catgtatgtgatcttcctgatatcaatgacgaacaatcttccaacctttcatatttatttttgaaaaataccctgggtctcaattttttggtgtccacatgcaagttatagaagggaaagattgaaggtgcaacttgcataataggacattcactattatgtgtctttcgatggcaaaatacacactttatttgtctattgatgcattcatatttatgcaaatttgtcatgtgaaaccatgaggcttgtattagaagactattcacaagcattacttcttgttattttgttatctataattctacatggaaaatatgttgagttgtggcttaaattagtgagttggtttaggttagattggtaattacatggtgcggtgtcctaaacaagaatggaatgtgttgacatattctgtttaggtaaagactttccttgttggagttggacttgaagtatttttcttaatgaaagaagaattcttctcctaatgaaggaccttgttgctagtataaatagcttgtgaagtggctagtttacacgtgcctccaatattgatggcgtgtgaaaaccaaagaattagtacagcagccaaaaccttttaaccaaaagaattagagtggtattttgttgcaagtgatttattggagttcaggttttcggtagtgagctatttaagtgtgtgcttgattagtggttctaatccctaatatttgatagtgaagttttgtggagtagggtttgccgaaccaagtcaaatttttgtgtcccttttactttgtgttattatttggtttgcttggattttgcacaacaactagtacctagttcgagattgattgaagatttgtgcaaaacaattgaagatgacgagcgcaaaatttaaggtggggccgtttgatgtgaagaagatccaagtgtcgagaccactcataatttgtattgatatgaggaaggaattatatagattgaagatgaatgaaggcatgaatattctagatcacttgaataaatttaataaattgattgtataattgatgtgaagattgatggggaggatctagccgtgatattattagcatctcttccaaaatcttatgatgatttgatgacagcattgttggttgggaaagagacgactaatgtggaggatatcactgctatgctattaaatagtaagatatttaaaaagcttagtagtggcaacaaaggtagagcttgtgtgatgaactttgatcatggtgatgaaaatacattacaaagaactaattgtgatagaattaagtcaagatcaagatcaaaaccaagagtggattatagtaataaggagtattattactatcataggaaaggtcatatccaattttattgtaggaggttgaagagtgatctaaaagaatttaaggaaaagaagaagaagagttgtgaggagcatgtagatgtagcttctactgcggttggtgaagtacatgatgatgatctcctcaaggtaaggattcgttgaaggattcatggattttagactttgcttactcttttcatgtttcgtgctaataaggattgttttagtagttaagaaatttatggtggagaatccattgtgttggtggataatcatgaagtagaagttgttggaattggtaaagtgaaaaaaaaagatgcatgatggtatataatgaatacatttgatgacattaggcacatgccaaatctttaaaagaatttgatttcatttgaaatacttgtaaaaaaagatgcatgatggtctaatgaatacatttgatgacattaggcacatgccaaatctttaaaagaatttgatttcatttgaaatacttgactcacgtggttataagcattttgttgaaggtggagttacgagagttagtcg

SEQ ID NO: 6885 - DNA, 1121 bp, Populus trichocarpa
  Intron number 4 from transcript POPTR_0005s22840.1 (locus POPTR_0005s22840) derived from phytozome v7.0 (chr-ID scaf fold_5; pos 21725456 to 21726576)
tggaggaaacttgaaaaagtttcttgtggtaggtcttaactgtgttttttttgtgataatgtttccttcagcgcatattgcaaaccaaacaacagttcttgattcttcaaccatctaaacttttctagcacatattgttaaaatattcatacaaatccatgcgttacaaatacatagagatggattctgtttatgtttcaggctccactgtttcataacactgttagggatttgggatgtcaatcaataaccaggagatgtgttctaactgttatgaactctagaacatggcttaaaagcttttgtgcaattgccttttggattttaaattcaaagagaatcttcatccgattccttatatgctgtaaactgaatggctgtcaataattaatgtcactttattcatttgctaggtaaatcaaagaacattcctaggaaagtttgggaatgttctcactgtgaaccttcttgcaagaaacaaggaatttaaaatcttaatgtagatggtgatgtgaatctggaagtatgtggtataatttcagtggtttttcaaatccaaacaatctgttatgctgatcatcatttggaatattttgttaacattttccatcaagccagcattttccctccaaattattcatataaccatcccatcacatgtttgccagaaattccaaaacagaggattagttgaggttttgattgctttacacctttttttttcaatcacattctccattctttattttaggtgatactcctttatgtgatgatgcatttaacaaaatatatagtcttttttcaatttatattttgtagttgccagttcattagattagttctggagatccttatttgaagatattctttgtgattaaaatagtactctaccagcattatgacgtcaagtgggaaaaaaatcatttttttgcaaaaattctggtcaaatcatggaaaagacatggaactgtgtgatccgaaggatatggtttactaagttgcgatagatcaatgatgattgaataataattttattatgcatctgccattctaataagaggatttattcacgcaaaattcttgcaggttgtagcaagcttgttggttgctgcaattattgg

SEQ ID NO: 6886 - DNA, 2640 bp, Populus trichocarpa
  Intron number 10 from transcript POPTR_0016s10050.1 (locus POPTR_0016s10050) derived from phytozome v7.0 (chr-ID sca ffold_16; pos 8168469 to 8171108 reverse strand)
gaaaaggtgtggattcagagtttatttaaaaatgctattgatttgttggtgcatgcatccgtatttatgtgttgcttgattctattattttctctgctccaattttctgatatccttctggactgtataaaaaatacatggatgctgtgagagaatcatgtaattggattctatatctgagaaatcatttcggaaacttctaaaccacttttttcagggtataattgtatagttcctcattttattaaaatatgtaaaggggaacactttaaagctgttttcaatttttgtttactatacagggtctgtattaatgtgctctcccttgatgtgcatgcatgccttttactagtattctggtgcatcttgtcggtgttctaaaatctttctcaataattccattatgagtgcaatttacattctatcctgcagaataaaagtgtcaaaatttgcaccaacagttactggacagtgtcggggttctgctcagtctctctctctcttgttgttttttcggttctcttttagggtttggttaattacatttgactcctctactgtagagtttgattaattaagttcttctattaatatgattaatggagtccctctactatacattccattaaaatttacgaccctcaatcccttgcaccattaagaataatgtgctgtcatgctagtcgtgttgcatccattctcattatgctaaaatagaaagaagttggttcctggacgaggtcctatcctaggcttagagctgagctagacccctaactgacttcataatgatttagagagctccgaatcatgcttttgaggcaagcatgggccaaaagagagagtccaatctgaccctaagcagatgcttttgatgtgtcatgctgtaggagaaaaagcttaaaaaatgaaatctatatttcttaattttctttatatttaaaatgtttttaaaaaatgaaaattaataaaaccttaaaacctcgtcacccctattgagacaaaattctgtagaacttaaactaaataattcttgaccaaaattaaaaagagagattttctgcatataattgaaggtcttgattttgtgcatgtaaaaaggcttgttggattcgttcattcttggattgtgaaatgttggctgtttatggtgatgaatattacaaagagggagatcaatggtggaggagaccaccaccttctttttctcgagagatttattttgggaactacaatgataaatagaaacacatttttaggttacaaaaatctcaatggtacaaatattccagcctcactgaatctaacttctaatgaaagccagcttttcctcacttgcgtacactcaactcagtggcattgagatcataatcttctacttaaaatgattatgaaaaaattatgtgtaccactcaattttaaatccgtattgattttatcgcttatttgacccaagtactcctctccacaactagattgggataagtatataaaaatagctgtgtttttgataatgagacgagaagaaagtgttggtggctaaatgtagatctgatagtctttgttttcccaacagttttgcttgtgaaaaggaaaactgaagaaattaaaaatactcaaatcctcaagcgtttgtagtgattaggagaaagaaataaagttgtaatggttatacaagagaagcctactgcatgttcggtgaattgtccctaaaatggccttgcttttcatgaggactatcatctcttgtttttgtttctttagggggttttgtattatctcatgtttcttggtagattgataaataagaaagaaaaaggaaaaatgcaaatgagaagggatagagaaaggaagggtgcagttttttctagcttgtgtgattgctagaaaagtggcagagtattttttttttaatttttaaatgtagtcatgtttgccttttttttttgaaaaagaagatgtcaaaatttagtaaatctggacaggtttcaaatatctaaaggctcaggcagtacttgctaacggcgtcttggatggaggattctaatttaaatggaaaacattgtagagggacttaattcatcagattaatagtagagggactcaatttatcaaatcaccataatatagggatgacgcaagtaattaacccttttaagggtcaaggagagctctcatgcaagctctacctggatttccatggacaaagcgttggatttttgttgcaataagttcagattgattgaaactatgttatgtttgaaaaacttaattgtaaagtccaaccctttaagctttgggttatttggaaagcataaaggatagtatgcaattttcctttttgtttatttaatcaggaaacatcaaagattatacttgaaattaagatgatgattcttgttatttgcttgaaaagcgcaatgaaatccagaaatgcagaatgtctccacttgtgttttaagctctatataattagggcacgttcacctctttcattccaactccctttttcttatttagtcctagcttcttttgcaagtgtctatccatttatttaactgcttttggttttgcaattatgaaatcatgcatgctaaaatatagatttctaatagctctgaaaatttaggtgagtttcct

SEQ ID NO: 6887 - DNA, 545 bp, Populus trichocarpa
  Intron number 1 from transcript POPTR_0014s17500.1 (locus POPTR_0014s17500) derived from phytozome v7.0 (chr-ID scaf fold_14; pos 13723238 to 13723782 reverse strand)
tctcaatcacaaagtgagttttctttcccaattcttgaattaatttattatttacacgttcccattcttcttcttcttcttgtttttacccttcgtttgttattgttgattctgtatatttggtgtgttcaatatggtgatgttgaagcttcaatcattaacacaaaaaaggtttttttaggttgggtgccattttatgcttacatctcctatttgatgtatgtaaagtacaaaacctagaaaccttctgtttcttttgatttgtatgttttgggaattaatatatttgaaaaaaccagttcttttagtagctgtacaacaaaatgggcttcataaaattacttaaactatataatttcgagcatttggactgaaataacatgatgggacacaagtgggtttcttggatcaaattctgcaatgagcagtacactgttatcaagaaaaagcctcgataaaacggttttcttcttgcatagtcaatgtttttgttttgcattgttgcaactgaactaatcaagtatgtatggtgttgtctacagtgg

SEQ ID NO: 6888 - DNA, 765 bp, Populus trichocarpa
  Intron number 3 from transcript POPTR_0008s19680.1 (locus POPTR_0008s19680) derived from phytozome v7.0 (chr-ID scaf fold_8; pos 13571464 to 13572228)
ccttaaagagtggacctattgtgagttttaatcttgtccagctattgtgcattttgtttttaaggtcccttgcctatgagaatttaatcttcattttttattcttttattaactctttatgaagccatgctattttgctttcagctatagcgctttgttctttcctatcacgtctgatttagatcttggcatttaaacaactatctaatgtcattttacattatcatgatgctttgagtaacgatattatatagcttgttccaaagggattcctgttatatttcaatataatttatgctgtattctagcttacatatctaagaagaaagcttattcaagtgttctcattctattttcttaggctaggttacactatcctttttgcatttctttggacaagctatgctttggtagtttaagattaaaagaatagtgagagaacttacggatatgtaaaatgtcttgacaagcaaatgtttttgttacaatccttggagagagattagaccatgttttgacatttgctcatagctgaacttatgtggggtgcgaggttacatgctaggacatgtgaaatgaaaatcttcagaattctctaaaatatcgtttgtgttagttttcatgcaattattttaatattttgttatcatcttttcagctggcaatggaagtggttgatgaagtgttctaattattgtttctcactgtatcaaaattgatttgtttatttattttattttttgacgctcgtgtcagatacttgaa

SEQ ID NO: 6889 - DNA, 1735 bp, Populus trichocarpa
  Intron number 6 from transcript POPTR_0001s22090.6 (locus POPTR_0001s22090) derived from phytozome v7.0 (chr-ID scaf fold_1; pos 20709647 to 20711381)
gcaggtaaaataattactcttttagtaaattaatccgcatgacaattatttcttcactttatttccattcttccttccataattgcttgaggttttttatataatttaagataacgtaatatttgatttctattatatgtagtttgctaaattcttcattaaaattatgaaccactattcttcacgctggtagtatagcaaccactatttttgcatcagcaccaccatctatttgcgccgtccatccttattgctaataattaatcattataaccactcttctgccaccaccaccacacctttgaacaccattgcaattactatcttgccactattatcacctatcattatcattatcgtaacaatcttcatcacccaacacagcattattatcactataaatattatcatttatatattcatatataccaatcacaatcataattattattacttttcagctattgttattatcatgagtaacatcacttctctcaccttattattataattccaacaactataaatgaaaataaatattttgtttttctaaaaaaatatttttttattattttcaaaaggtgtaaaaataacttttttattaagaaaatgtcttacaaaatagtttctagaaaaatattttttttataaaacaaacacagctctagatagtaaaaaatataatttcaattaatatggttcatttttaattaatatcaattactgttaggacattaatattttttttgttattttatttatcatttttaatcatcctgtcttcaatttattcttcttattttattgataattttctcttaaaaaaaactattttcacacacacacacacacatatatatataatcaacagtttaaacaagtgactgatatttcaatcagatatgaatatcatttcatggtaattagtggttccactagttttataacatgcacttaagaaaattgatgccacatgtcacgctttgaatagcaacaacatttaaaagagttgagtgacaattaatagtagtggtagtgtagactttgttaatattatattagtccatggttttacattcacgagagagatctacaaaaaaaaaaaaaacaagaagaaagaaaattagaattcaaaagttatttgaacatttttttctagactcaggaatagattattgggtaattagctctacttatctttatattctagatttaatctttctttattatattcttatatttattcttatattttaaatctttctttattatatttttctagtagatattttcataaaaaataatggaaatacaaatactcgagacgctcaaactcacctggtttattacaaaaataaatttgaaaaagaaattgaattgtcatatagtgttaaaattcatttgttcatagttatttatgctaatacattatgttaactttgagttcataacaaaaagaatatattaaaaattacatataaaatataaggaaaaatttaacttatttcctagtttttttaattctctctctctctctctctcttctctatatatctatttttattccatgattaattaataattagtgttgaagtaatatatatatatatatatatatatatatatatatatatatatatatatatataatgaatcgatgagaccctcttaatttatatactcttacaagtttaatcttaaaaattgaatgttgtgtgtttagaaatgcagtgag

SEQ ID NO: 6890 - DNA, 473 bp, Populus trichocarpa
  Intron number 8 from transcript POPTR_0011s05510.1 (locus POPTR_0011s05510) derived from phytozome v7.0 (chr-ID scaf fold_11; pos 5472243 to 5472715 reverse strand)
ttcggcatcctctcacctgtccacttctttaacaggtattattctttgttttaccatcttttttaatgtctacacttggtttggattcttagatctcatttctgatgatttgtttttgtcaaaagcacaatacagcacataaatctggtatttgcaacgtccattcttaaatggccatataggtggcacttctagtttgtttgatatagagcattaataccaaaggagatcatttatttattatatgttttagtgtagaacagataatgaaatatctatattctgtggtcatctagcctcctgaaactaaactggattcaatgtgtctgtgtgcatacaaggtgtgtagttagaaaaaattccctttgcactcaattgcagtattgctacctcatgcagaccctgagtttcattgtcaaattcttttgatatttgcagcttgtcagtgggatccattgccaactgctatcctc

SEQ ID NO: 6891 - DNA, 1232 bp, Populus trichocarpa
  Intron number 1 from transcript POPTR_0007s04570.1 (locus POPTR_0007s04570) derived from phytozome v7.0 (chr-ID scaf fold_7; pos 2836448 to 2837679)
aattggctcctttgttgattaaagaattggtcactgtaaggatttccttcttctacttcttttttccctcactttggccgattggctttgaattctttttgcagtttgtttagtttagttcgtgtgattacaaaagggattggcttgtgtagttgtgtgtgatttcctcctttgctttctttttatgcaaagacaagaacacatagcgtaaatgtcaattcatgcataaagaaggagattaaaatacagtgaattggactactagaaattatcggaacagtagcgatgagatcaagtgctcgtattttcatgtaggtatcgagtttgttttttgaattgcctcccctttttgtgtttatattgactgctttcacttgttattattattattattatattattaatattaacattaccaatttactaaaccagatatgccttttgctgtgaaaacactattcacatactcacatttcaatcttcacatacctttttattactattaactatttaccaaaccatgtgatttgctgtagaagaactattcacatactcacatttcactgtttcacatacctttccatccaaaacaacaagatggaaaccaggcatgtgttatcaattttgtgaaaacagttttccgtcttgatgtttttggtggaaaggtattttgtgagttatccaaatcgtaaaaataaatgttgcccttgctttattaactatttacaaaaccaaatatgcgatttgctgtagaaaactattcacatactcacatttcactgtttcacgtacctttccacccaaaacaacaagatggcaggtatctgttatccattttgtgaaaacagttttccatcttcttgttcttggtggaaaggtatttttgtgagtaatccaaactgtaaatataaacgtttcccttgctttcttttctttattttttctgcctttaacaaccattctctcctttaaaaagaaaaaaggagagaaatgagacaaattatttagaacggcagtttcctgaacctctagtttgcttgtcagaagcatagatgtgcgtgcagcaagtagaatctcattatgtgcaagtactatggaagatgtggtgatgtctttagattcgccaagatgtgaaattgactcataattgggtagtttaactgagttctgaagatttattgacaacttagaattctgttgggtttgcatgcaggtcattacacgaattaatt

SEQ ID NO: 6892 - DNA, 1091 bp, Populus trichocarpa
  Intron number 2 from transcript POPTR_0001s07330.2 (locus POPTR_0001s07330) derived from phytozome v7.0 (chr-ID scaf fold_1; pos 5512558 to 5513648 reverse strand)
ctaagctttgtgctcggcatcttggtccgattcaggtatttaatgctcttgttagattcttttgtttcctttctttttttgcttgatatgtgttgatcaaggaaaaagtttcaatttttatgtttctattgatagtctgggagagtagtatattctgttaaatgtagcatggcgtgattcaatttttagctaattttatttttgtagaattgatgttgagtattattgcaacaaatgacaatagggtttccttttatggacttttatagttggtgaacagaaatgaactgtatgcagtaagtatattttgtttctgcgttttaaaagcgcttttgacaaaatttaaattttttttatttttttattaacttgaaattaatatgtttttagtgttttcaaatcatttttgatgtgctgatgtcaaaaataattttttaaaaataaaaaaatattattggcaatagggtttccttttatggacttttatagttggtgaacagaaatgaactgtatgcagtaagtatatttactttttcatgattttataaatgggtttggttgtagtatttaattcaagtgtggggctagccatttttagtttgttgggcttccagattttgttaaaacatgtaattaaatagagggaagattttaagcccccccggccttttctttttggtttctaccatttttttttaaaaaagttcatcatgactagacactcacatgtttgctaagcttttgttccgtgcacgagtgcttagtgttactgtctgacctttctgtgcattgtcccaatttgttttgcttctacaatagcttaaataatttttttccaccacatgtgttgactggattttgattttagtgtgaagcatattattttctccccactagtttttgtagtgaacaaataatgaatttttgggaggtggagttcaagcacaaaaaatcggagaacaaaaggcactgcctttttcatttacttgtttaattttgtttctgcatcttccttttggttcaggttctcatcctgctgattgaatggttctgagctgtttgatagggattgtctgcgtgattagaaggag

SEQ ID NO: 6893 - DNA, 1571 bp, Populus trichocarpa
  Intron number 1 from transcript POPTR_0004s02100.1 (locus POPTR_0004s02100) derived from phytozome v7.0 (chr-ID scaf fold_4; pos 1312321 to 1313891 reverse strand)
acatttttgctggaagtactgtagtatgtctttgaaggttagcagagatatgctgtctttgacggtttgtcataattaagattattgtagaaatagaaggcagcatggatgcttgtgcaaggtctttccctttctttttcacaaaatgggcctgagagttttaaatgatcaataaaataaaaacaattgtggtttttacagtaatttgagctactataattgtaatttcttcaagtatatttaattgttggattgaagaaaaaataacaattcttaaattaatatatttataagaaaaagaacataaaaaatgaataaccagttagttcataaacttaagaaattataaaaaacaatttctacatcgtgaagcatgcatctaataagattttagactcttggtgttatacatttaaaatcaatattacaaaattaaattaaattatatatatcaatacatatttttttgtatctcaatagcatttgtagtgtcttataagtttctatacttataaattacaaagaataataatatataagtttgatgaatatatatttattaaatcaatagatatttacaatgtctttttttcaaatacacaataattatataaatttcttaagaaaataacacacaataattatataagttcttttaagaaaataacattatataaatatttattcatttaaaagagtttataatctacattttgaattatgaagttttttctcacttttactattaattaattaacaatttacttgaaatggataacattgtttagttcggataacctcgttgcacaaaattgttttcagaataaagataaaaagttcaagtcaatactacaatctgatctaattcactccatttgcatcctaacaagtgctcaatctgtgcaacatcgatcgtttggactatatactaaggggaaacaaagaagaaaagcttagttgacaatattaaaatggtaaaaaattaattagaagaagacaatcctagtttgaattaatctactacttgcatttcttaatttacatataaatatatgattgactaggaatctcgaattagcgggctttttctctatcagaaatatgaccatgatatcaagaaaaaaaaattcttaatgagaatcaacggagagaaattaatcacaagagaaatcaagttaccacaaattccccttgcaagaaattattgattgttacacataaaatatatctcatactcagaaatttaaatttagtacatttaacaaattaatttgcatgtaagttatttaacaatcacaatttgcatattttctaccagatcagcaaagcattcaaatcaaatcggaaccaccccaacatcctcatggcatgataattacagttcataagaaaataacttattgtaattctctcgtcgtacgtattatctcagaattaagtactggcacacatacataaacctaaaaacttggggcagccaaaaattatctaaggtgacaacgattcaatttcttattgtttcaagcacttaattttcttgcttaattagccaatattttttgcagatcacc

SEQ ID NO: 6894 - DNA, 1268 bp, Populus trichocarpa
  Intron number 13 from transcript POPTR_0015s09070.1 (locus POPTR_0015s09070) derived from phytozome v7.0 (chr-ID sca ffold_15; pos 10394847 to 10396114)
gttttaacatctaccacaagaaccgtcttatactagtgagtatccacaaattaatttaattagtcttacctctgcattattagataattgaaaggacccttgacctactgattcttttttgaattagtcttacctctgcattattagataattgaaaggaccattgacctactgattcttttttgatccagtcctccagtcctctgtgtgcagtttttatgaatgctgtaattgctaaccgtgttagatttggttgatgtcagatttgggagtgtatatacattatatgctgttagtcactgttgatagatctgctagatctgctagatatggcatttttatgtctaacagtgaaatttgcctttttatggagtacaaggtgtgtacgatgtgcttcggaagagaaggatgtgcaagtatatatgctcatgtgcacgtgtactatttatgatttgagctgttagggagcaaaaccttaacagattggtttgaattgcctgcctctcattgagattagcctttcatttatatagggaaaattgtcttgtacacagtaattacaaagagtaattctagggagctatatatgttaagctagatctagggagctatctatggtaagagaaatttcctatctagtatttacagcctgcttgaattcagcctttctattaacctgtatactgcttgattttagctttctattgacaaacctgccaccagtaggtattgcacgtgcaaatttatatggtagaaacatcattgttctggggtttgaataatttgaggtgatgaaatcagttgaattatgtcatgcattttagtagagtaactagttttacaaaagcagaatgttgcaacaccggaacaccagaagatgatgagaagtggatgctccatggaacccagttccaaaaaagaagatcattccatggaattgatgtatgactcgtcccaagagaaatggcaaggataacaggcaaagccataccactggtcatacttagtattacatacaagaacaattagattgtttgcctttacatgaaaattttgaatgaagcaatagacaatttctttaatttggtatcttagtaaaataaaaagtttgcagcagccattctatctgtaccccaccccctcccctcaccaccaaaaacaaaaaaaaaaaaacaaaatgatgccctttttattgttgaatccaaatgcaaacttctaaaatctgttttctttctcttcatcgcagccattttggcccattgtgaact

SEQ ID NO: 6895 - DNA, 1363 bp, Populus trichocarpa
  Intron number 25 from transcript POPTR_0001s07340.1 (locus POPTR_0001s07340) derived from phytozome v7.0 (chr-ID sca ffold_1; pos 5536903 to 5538265)
gtcatattgcagactgccccaatttgtttccagaggttagtcaggctattctttattacagtacccctctctaacattattttcaagtcttgtgtggctaaacaagtctggcataagttttttttctgtagtgtacttgatggtgtggtgccctgcctgcctgccaaagatttttcacttatctgtatatggtgatttttttattttgatttttgagtttttcttttcccagcaagaaatattttagatgtcgattgtgcaagaccttagaagctataattttcctttccttctgttatgagagtttgctgtgacgaggtataatgacagaaagaggatggatggttaactaaggaacagtggaaataaaggataagtcagagaaaatgtggatctgaattattactgtgttactattttttctttaatgtaacaggggataactcactctgagatcattatattgtatgttgatttttgagtttttcttttctcagcgagaaatattttagatgttgatcgtgcaagaccttagaagctataattttcttttccttcttttatgagagtttgttgtgacgaggtacaaggacagaaagaggatggatggttaactactaacccttgtttggaagcaaggaagggtggaaataaaggataagtcagagaaaatgccgatctgaattattaccttgtgttaatatttttttctttaatttaacagtggataactcattctgagatcttgatattgtatgttttttaaaaaaaaaagtttcagaaagccactttctttcgattgttcttcattacttatacagaataaacagttcctttcttttcctattgcttttttacgtaactccctggtaattgttactcatgcaccaggattaaatgactctcaggctgttgaatctcttactgctcttgcttggttgttactgtgttggtgttttgaccttagcaaatgatgtgtgcatcagttaattaatttttattatttgctaacggagttcttatcagttgcttatcgaagtgataaacatcctatatttgacatctcttgtaagctgaatcatctgttatatttcaatggctgttcagtgcgagctcctttttgcatgttttgatgtgaatcaaatcacatttttttaattgttgaccatgtcttctggcaccaaatatagaattcgtataacatgctttgtcttttggagctttcttcttatttgcttaattttgtgcagttttagattttattttcatgctgttgtttttgcatgttgaacacttgggtaacttgaatagtttccttgtatttgcagatactgaagactctgtttgagattgttttatttga

SEQ ID NO: 6896 - DNA, 475 bp, Populus trichocarpa
  Intron number 1 from transcript POPTR_0003s03280.1 (locus POPTR_0003s03280) derived from phytozome v7.0 (chr-ID scaf fold_3; pos 3674744 to 3675218 reverse strand)
tcacaacccagagatccttcaaggcgaccaccgtactctgcctctctcgatctgcatgtgtagttttcttatgcattacgttgtttccatggaaacggtttctaaaataaaacaggttttttcttttgtctttgtaaagattgttttatggttgggatttgaggactgtaattaattttcttgatttagtaagtttaaacattcagaaatttttggtatgattgaattttatgattttttttatgtgcttgtgattgtagtttttctgatcttacaagtgatttttaattaccatatatttttgggatcttggttggtgcttagaagtttctgattctacgattttgaatcacttgtaaagattaatgcattttgcatttgatacttcgattttcagagataaatgtttcaaattgtgcttctttttattttggttgcagactaagagaactaagaaggccgggattgttggaaa

SEQ ID NO: 6897 - DNA, 571 bp, Populus trichocarpa
  Intron number 5 from transcript POPTR_0010s05750.2 (locus POPTR_0010s05750) derived from phytozome v7.0 (chr-ID scaf fold_10; pos 7235011 to 7235581)
gatcaggtagcttccattgtttttctgactccactgttattttaaatcagcttgcaaatattggcttttcaatatgcatggaaatccatttgtaaatctcttcattttcagatactaaaagatgcacgccctaatgctaagcttgtaatttgcctttgatggactgtcttagatgcttattctttttcatggatgtattctagcctacctttaaactgcggtatttgaattttatgtgttataattaatccacgtacaagtgcaggactgacagcattagcatgataaaatttatttttagtttttcagaatcctctagatatttttaagctcaattctagtagtttgttaatggttccttcaattgctttcactcagatttggttatccttgtttattggccctccgcattttcttgtgtttttggttgttctttgtggacaaaggtggtttttctaattggcgtgttaggtatatgatgctcttgtttgttatttcatctgaatttatcagtagtttggcttattcacttattgattccacagaaagcattgttacttcagcaatcttc

SEQ ID NO: 6898 - DNA, 1554 bp, Populus trichocarpa
  Intron number 1 from transcript POPTR_0001s29320.2 (locus POPTR_0001s29320) derived from phytozome v7.0 (chr-ID scaf fold_1; pos 28037379 to 28038932)
gagcagtttcggattctgagacagaaagacacagagtaagattcttatttgtaactaaatcttgtatctttttttctacgttgttttctggctttatgttctcgttaacatttcgggaattattggtttgtgtttttcttttttattgttttgtcctgcttttggttctgattcacttatcaacaagtaaaactcaagtaattcacttgaaatgatctcaattagagaccttgattgttatccttatcgaaatgcatgtaaaaaaatcctgtttgcaaggagaattctgaggatgtatcgcaagaggtgcatctggttttcaccttatttggtggcttaatggtttattgaatatcgttggatctggtgtttcgttctgttgcttcgtgctgtacggttttaagaaactttcaatgatgttgcaacttctgggcatacagtctttaatataacctgggattcaggagtttgtaggaaaataactgtgaaaattgaacctcgaggaacaaacgataagtatgcaattttgttttgcaggtgagagattgtggatgaaatagattttaagaagctcagggaaaaaattttaatctaaaaatttaacctgtatggaattccactgcagcaaaaaaataaaataaaatcctggagcaataacagtatagcctactggttagaggaatcttttttgcagctctttctttacacaataaggtacagtgtagtagcaaattgaattcctttacagcaacaaaaccctggagcaatagaagtatagcctattggttaggactggttagaagaatctcttcacagttctttctttagtcaataaggtgtggtttgtagtggcaaattgaatgtaaagcttgagtatagctatgctctgttctgtgatttgccaatgtaagtgatccctagctttggttgagagtaaaaaaggtaattgatttacgccttggcaactagcattttgcttttatggctgtctttaagttggacaagtggctttttagcgttcagatcacatgctgttgtcaggatgatcatagatttggtgaagtggcaatgctaaaaatatagactcgggtgttgctaacttagctggatgtcatgctgatgccatgacttacagaggcaagagggaaggagtagggtacctacatgaaggggatgagcggcagaagatgggtgtttgtcaggataatattagtgtattacaattttattgctggatggggttgaattggctgttagaaagatctcaaattttccttttttctgccttgattcttcaaaattgaaacaaaggactagagacgaacattggaatccccaaatatggattcttttgcaccatgttgagagatcatatacaatctgcctgatctggtaatatgagatttctattactagatgagatgcataatggtcaagtgctcttgaatgaatcctgtggatgtttctcaagaaaactcagtgaagtttttattttattcatagtgatttttcacattgtttgggtgtcatgcaggtatcctggcacaggagaat

SEQ ID NO: 6899 - DNA, 2801 bp, Populus trichocarpa
  Intron number 8 from transcript POPTR_0001s38730.1 (locus POPTR_0001s38730) derived from phytozome v7.0 (chr-ID scaf fold_1; pos 37897274 to 37900074 reverse strand)
gaagcaatctggctttccattcaggtaaacagtctttgattgattacctccaacttacatgaatattgaccaagaaatttcaggtgtttaaactaacattttaattttattttcttacctctagtatctgattggatttttcacatgtattagtctggcattatccatgcaccattcataactgtttgcatcttacctgtctagggattggatgcgattatgatttcttgtactccaactttatgatcacccatttataattataaccatgagagtgtcccttcaaatcaattccagtaaggtagtagagcttcgttagaaacctctgtagttttggcatttgatgggatgcacttccaaaattttcttgtttgacattgctgctcgaaatggatgctcttgactcttctagaacttgaacaatgtccctcagctattgttgttgtgatttaagtccagaagtgaatggtcacatttttgtcttgtcaatctaatctttatgctaatttggtcaggaaactctattttccagattatgactcagagtgagcgcatgaaatttatgatgaacaacaataaattgattatttgtttgaaaaatgagcactttagaggatttggacctttgtctcttcaggttttacagaaatttttaactccccattttacttactgtcatttctttgccctttccttttccattgcctatgtctagcttaatcttgctcatacaggtgtgctagaaggatcctggcatttatccctaataattatcatagcataggcatcacacatggattactcatgctatatgaaaattttgtcaaggcttaatgtaggattgaaaactaatgtaatttattgaatcaaaaagctattggaaagataatttgaataaatgtataaaagacacttttaatataatgaaatagaggtatgaaactttatgtattgagttgcctacccagtagaattgtgaacaaatctttacctaaataatttagctctgaagtcatgaaggttttgttttcaactatttctgttgaaagaaataaaattctaattatgcacgataattaagtagctaacatcatccccttaagaatatagagatatcatatccaatagaagttttcagtagaatgaattttagattaaattgtgtgtaattttgtgagtcatttatgtttggggtaattgtgcctaataagcagaatctctgttattattagaactaattttatatcattgttgcagtttatggggcttcatattaaatacaaatacaatggtactgttaagaatgaatcaaatgagatgggtaatattagggatgtgcagattttaaataataataataattagaagaagagatgtgcagattgaatttttctttacactttagagaatatcatcttaatcttaaattttaaaagatgcagaatttaatgtacagcatttcaaaggcatcttactgcgttagaaacacatctctatggtttaaggtttctatttatcaatatttttgtgtctattcaagtctattatttgtgtagcttatatctagtacgcccaatgaatcaaccatatttcatttcctgattacataaatgggttaacttttttttagcatttcatatagtgtttctttccttttttactttggatatgtaaaactcttatgatataaagtctaaagccagtcacttcgtatgattgtaaaaaaaacataacccagcaccttaatagaaatcataataataattacacgtcacctaaatttgttagaatagagagatgattattaaaatgaaaattcaaagtggagagtaagttagatctatcaagtaaatagatgctcttgtctgacaattcaattatctgtcatcagttataactagtttcaaactgatttaagttaatctctctctccccatccaccatggcattatgtttcatcagatacaatcacctcgagcttttctttgtgactaacatttcttctcatctgtaaacaccttaagagggcggtatccatagtcgtctgtcttttatatgatagcagggttcttatgcatatgtgcatctagatgtcagcccagtgaacaaaggaaaattagagatacaatgaaattggaagcatttaaaaaagatttacaaaaaagagagagaaacatgacagtactgatagtgtataaatctagtgttccttacctcagcagaaaaaccagttctttttttagaagttgatatctgaaatggaagcaaattgaagctatcaaaagagttgttgcttacaaatatgtcttattggtgcctaaaacactgctttgatgatttttgactttcctcttcataaaaattaaaatttgtattgcattgtgtatttttccttgctgtgatattgaataccctttgcacattgttttttcatatttgtcctagagaaactcgggtttgggagtccagttctgttctctttttttcccctttatcacaagcacaagtatatttttgtcaaataaagctttcttgacagttcatgcttttatctatggatgaggttgataggccttttctgtctgtataatatacatgtgtatgctcctcctcaggcccagctatggcaactaaaatttttgggtatgcagacatgtgttcatacaatgcatgatctaaaaaatgttctgtttgctctttagtaactgaactgttgttgtctgatatggacctgggagatttgacagtgttttattcctggtcgtgacaaatgatttgagcttgtaccttgctccaggaaa

SEQ ID NO: 6900 - DNA, 887 bp, Populus trichocarpa
  Intron number 8 from transcript POPTR_0013s06690.1 (locus POPTR_0013s06690) derived from phytozome v7.0 (chr-ID scaf fold_13; pos 5406532 to 5407418)
aattgtagactctcactaccttttgttcttttaacatattgaagttctaagtgccctgtataaactctaaaaacccttgaagtttttccaaattgttccttaatgctcaaagaaagtcaagcatcaagtgctgcagcattagaactattcttaaaaatgctagctgtttttaatagcccacaatgctttactactagagataatccatcttgagaaagccagtatgatagttggttttttgaatctagtagatttcaacttctactaatagctggcttgagcactcctgtacctctattatatcactttcataacttcagctcctaaacatttcttcctttccttctcattccctggtttgtggttgtctcatagtttcatattggtttctgaggtctgttgtcttgtcaaagtgcttgtaacgtttgctagaatcacatttaaatgactaattttactagctatgacactttcctctcctaaaaattcttggctgcacctcaacttttacatgattatttttttcccctaaaatattgacatttctagtttactgttcagtgtttatcaaatcaatccatttaccattctatatctgctgaactgggacattctttttgctaatcttgggttcaatctcaataatgtttctcttataaattttgttatatttgacccttcttccatcaaaaactcttggaagtgctttggtgaaaaatacactacctcagagaactctcgctacaatattaccttttcagcttctaatatgttaattctgtcttgaatttcatttggccatagggcaaaactttcctgatgattgttctctctctatctctgatttttccttttctttgggtttatatgaaggtatccatctgatc

SEQ ID NO: 6901 - DNA, 2038 bp, Populus trichocarpa
  Intron number 1 from transcript POPTR_0017s01290.2 (locus POPTR_0017s01290) derived from phytozome v7.0 (chr-ID scaf fold_17; pos 895745 to 897782)
ctgcagttgagagttaattatgaggtgtcttgttttttatgtatatatatttatggaaaacctcagtgtaatttgttaatggtttctatgggattcttggtctcttttttccctgtaattttcaaggaatcactacgtcttgattatctggattttgatctgtagcaaaatatgattttttttttgctcggacagaaattagtgttgaaagttgatgtccatgatcagaaaactatgaccaagatcattaagacaacttctattctggaaggtattagaatcttctattctatgcttattttgatgtaaaaaaagaaaacttgtatgtgcaataagtggtttgataataaaaaaaattggataatccatcaatgaagaaagatttgacaaattaaatgggattttgattcttgcaactgaagggcaagaaatcagtagaaaaagggactcgatcagacacagatgacagatgtttgtcagaccctgaaatctttggtgaagatattttgccaaattcctcgagaagttgatcttgttgagtctgagattgaaggcaatttttagatttcaattttagagtgtttagcagaatcattcttgaagaataaacaaaagatgatgaagtggaagataatagaaagattaatcaagatgatggtgaatttaatttggagattagtaagaagcaacagacaattaggtgaaagaagggctcaacaaggtttcattgattgtgttgttgaacttgttgttccgtgtgctgtgaagttgttggaggacagtaatggcttgtttgagcaactattttgtctgttttcaatttgttagtaagtatattgcagaaattgaccccacacatgagccactttggagaagaattgtggtattttgtactgtggaagatggattatactgctatgttttgagaaccaattgatttgttttaaaaatgtgcaattgcatgaattgagtaaacggttccgagttatcttcataatgggctggtgttgcttgcatacgtggaggagttcaacaaagtagaggatatcttttttgacatctataataacagatggtttatcaatactggtctttgtgagagtttgttgggcaagaaagacagcaaatgacttcaagttcttgttttcaaatggcaagtaatgctcagaatattttatgatgatatctgggggcctgagctgttgtttgactttgacatgttcagatcaaatctgtatgtccacttgtggaactacataagaagtcttatcacagatctttggcagggctctatatgcctgtcaataagatggatgcaggctatactgataacagactggaaaagaagtatggggggtgttgtggtgcaagagagacagtatatgatctcagattttactgctggaatgcgggttgagggggatggagattgaagtggattttgagttgttgaattgcaaggtgatagagtggatccttacggagtattcttggtgtctgagcaaatttgtgctagcccaactcattgattaatcctacaagagctaagggattggtgtgatttgttgttatatgttctgatattaaagaaagctgcacaggaactaggaaagttatggcagctttatgtcacaagttaaacagcaccagtcatcaccttattttgaggaagggtgactttgggtttatggagtgtgcatattgtttagggtatgtggtggtggtggtggtttgttctgtttgggtggttgatgctctcgtggtgtggatctagagggttttggaatttgtgtttgtagttggttttggggtgttccttgaggattgtatgctgtccaggtggtgtttagtgatgctctcttcaccctggtgcatctctagtttatggtgggattctgcaaatagtggcttcggctcattatatttttcttttttccctttccgaaaacaagattgtagttcaaattttgacagaactgggtgttgtatttgcaaatttgcaggggtggattcagtatccgttgacaggaaggcaaat

SEQ ID NO: 6902 - DNA, 1734 bp, Populus trichocarpa
  Intron number 2 from transcript POPTR_0010s07840.1 (locus POPTR_0010s07840) derived from phytozome v7.0 (chr-ID scaf fold_10; pos 8822008 to 8823741 reverse strand)
tttcttggacgtcatatctccactcaccgtttaatgtaagttcactttttttttttttttgttttttcgtttacaagtgtttcgaaaatgaataaatataattggcaagaaattagaaatacaacgataccaattaaactaagggggtgtttaatttatatattttctaatcacttaatgtatattgaaatcatttatatggagaagaaatataatgaaataatcatcattacttttagtttttttttagatgatagtatgtactgattaaattgagaaaaatacgagctaattataagaattcgaaggcaataaaaaactttacttgcagctcctgcacaaataaagctcttgtttctaatataataatactgaaaaaacaaaagaagtcgagaagagaatggaatcatatatcaaaatctttttttttaaaaaaatatcaaagcaatttttttatgaaaaaacatattaataagagagaacgttgaaacttacttgttgttatctatttttgaaagtactcacacaaaaaaaaaagaaaaagaaaaaatacaaaacaattgtagaaagaaaaaaaatatcgaagagaataccagggcgctaagaaaatggttaaagattggttgaggaggttcaaaaatacaaatattaaaatttgatagtatattttcaactaatgagaattttgttggcagagaaaatttaatttagaaaagagaaatttaaaattggatgttttaaaacccaatcggattttgttgaaagtttaattgaattttttaagggtttaattgtaagaaaattaaaattttaagtcaatttgggctttaactgaaagaaattaaagtttaggggtcgaactataatttttaagagttaatttagtcaaatcaggggattaattgtataagtattaaaatttgatgagtaattagagatttgattgaagaaatccatgtgattccttggtcttcaatcaaaatttggcttttgtcaacatatattaaaaagattttagacaatgacagttacagttcattgtatgcaagtaaagctagtttcagttacagttcattgcttgtaagaaaatttattgtatataaaagaaatatacaaattgggaccacggcttaaaatatactctatggtaccagagcaacaattggctgctgctataaggcatggatatgaaataatcaactatatatctccaacaatgccctcccaaagtttaaatatatattttttataacaaacatgattaattaatttagagtttgcaattggattcaattgtgccatgtgaattttaatggactttagaaaaaagctactaaaataaggataaggaagaagtctaagttttcagaataattttatattatttttaatatatcttcttgattataagttttttaagcttggaatttttataaatcttataatttaatcagataaaatcaaatggtatcgtataaaaaaaaactagttcaatccataaatttaaattattaaataatattttaagaataattttatattatcttttttaacaccaatatctcctttatatatactggggataaatatctcctttatgtcaaaatttatttgcaatctagtccaactggggataaatttaccttcgagggaactaactcgaatttaatgtcatttgatttggactgtgctgtcacagcttggaggaggaagggggtgcaactttcaccttcg

SEQ ID NO: 6903 - DNA, 3210 bp, Populus trichocarpa
  Intron number 4 from transcript POPTR_0006s06390.1 (locus POPTR_0006s06390) derived from phytozome v7.0 (chr-ID scaf fold_6; pos 4554886 to 4558095)
ttgcgcggcgtttatcgaggacacataactgggcggtatgtgcatcagcatcatatgaatcttatgtgattagatagctatgaatagagaggtctgaagtaaattaagtgctattctgcctgtttaagtatccaaatcttcatgccttggttggaaataaattttttgttttggcttccaggagccctcaaatctacactaacttcctctttatttcaaggtattcacactactagaaaattggaaaacaccacacaatattccatcggtattttaattgctaacaaaatttttgatggaaacctgtcattgctaagttacttgtcgggaattgttgttttgtcggtatttttgttggcaacaaaagttgccatttgcaccaaaaaatcagatttattgcccatttttcatcgaaaattaatttccaacggaattttcaatcactgattctgttgaaaatgcccaaactttatgtgactttccaatgaaatggatgtgaaattgccgacataaatgaagctatccgtaggtgattccgtcagtgttttcactaattttttggtatgttgttatgatcccctagctaatctaaacatacaacaactccaagcatcttcaagtcaataattactcacattaaactcataaccacaacaaaaaaacactcatggaattattgaaacaataaacacatatcgaaaaaacataaaacattatccaaaaaatatgaatgtaatgcattataaaacactaacaaatgtcttacacaatttcaattttattacacaatgaaacattgtatctaaatcaattcaacactactttttaatcaaaatccttctcttcatggtaatcaagcagctcgagttaaagttcagttggatccaaagagaagatgtattatatatgcatagaaagattaaagtagatgaatgtcaaataataagatttgttctgaagggataaattttgtcagcgtttcaagggtggttttgcttaatgttgtgtggaacacattagttgaaaggcaagctattaaccatgcctacatgctaggacaagagaaagttgtctatgtttaccatctcattacattagggacaatggaaaaggaaaaatatttcaccaagttgagaaaaggtgattgtcagagctggtgtttgattgcataaacaaaagtggtagtcattggaagttgtatttgataaggcggacaacagaaaggataatattatggaaaagatgattcaatatgacaagctcaaactcatgtttaagaatattgtacatcaaccaaaagatagcaatctagtaaaatcttttggcttagatttgtagtaaatcctaccgattttttgctacattatcctcattctttgaagttgaaaggtgcaaatgtttcatactactataattctgagtgtatatcattttagaacatatcaatgattcaatataatgttatgtttagagaattttgtttttattgaagggaaaccgtagggatctctatgttagttgatagtcttcacatcttctgcatttgaatgacaagcctttaatcatttgaaaaaaaaaatgatagatttattttgacgtttctttcatttaatttgagcatcaattctttcagattttttttcgtttcttgagtagcaaggatatcccaagaataactaatttattcaattcaaacttattgacgagtcgtgtgggttggctcggaataactaatttattcaattcaagcttattcatcataaattaatacattttaattattatcaattccacaaaatcaattttcttcaaatttccaacttaacaataaaattaacaaaatataattagtacccattaaattatccattatttcttcaattataacacacttaggttacaaaatcaaattcaattttttcaaaatctcaaacaaaccctaatataaaatcaagcattaatacaacgaaattatctagaaaaaattgtaaaacactaaaatatataagcatacaacaaatactacaaacagtttcaataaattaactaaaaacataaatgaattaaaaaaaaaaggtgggtttacaaacctggtggtgtgagacttgacaaaaaatagaaccaagagacggaagttgatgctattgacaaatgttggtcgacatcggtgggttgaggggctggatttgcaagagggctgccggaattaaaagatggggctgctgctgttcttttagcaatcgaagatgaagaaatgggaggaaagagagaattatcgggttttaattcatttaaaatggctgatataaattctatcggcattactaacgtgtaaaatttctgatggaattgctgatgaaattttaattgatttttttttattttttttatttcatcgctatttccattgaaaattattgatggaaatgttctattggtatttctatcggaaattattgacgggatattattcatcgggtttccaatgctatttgttaattttttggtagtgtcaaatatttgccacagttcctgttttcattggaattcagttaggcgatggtaaatgcataaactgctgatcataagcaacactagccctctggatgagtcacctattttgagtactagactgaaggcatttgatgcatcatgtagcatgatagttcatatcttggaaaagttaacgaccacctgaacttccacctgacagaataatatatatccctgtggtctttgttgttgcagcaccatgtttttgcggtcttctgttttaccaatttcaaaatgaagtagcaagaaatcctttttacatgaacaaataagtgaaagtttcttcttgagcaactcaaatttatagatgggattggttgacatttcccctatctgcctctatatccatctcgttctgaaacagaaagatattaatgaagtttattcttgataaagttaaagcgcttcatgtcagtggtatccgtagttcaatttccaatattcatgaatcctgtggttcattttatggaaagcatttgttgtaattcattaataaattgcttactttccaaagtcattgctttgagtgatttgatgttcacattatgtcatatgcataggtgtatttctgatctatccatgtgttttcctacaatgtgtttgacttgctgctaatttttaggttgctttgaaaactttaatcgttattcatcgtgc

SEQ ID NO: 6904 - DNA, 1917 bp, Populus trichocarpa
  Intron number 1 from transcript POPTR_0019s04780.1 (locus POPTR_0019s04780) derived from phytozome v7.0 (chr-ID scaf fold_19; pos 4990399 to 4992315)
gacatcacctgtgcggaaatttaatcttggtgagcctgctgcctctattgctggaggtaatcttaatacaatcattctctaatattagattcatggtgatctgattttttgtctattaatatacctgtcatgacaagggcaaatcctgtttagaggttctgtatattgatggaactgtgtgatatgaggtttttctcttgttccttttcatatatttgtgtatgtggtcaagctgtttctcaccttttccatcatttaagggattcttaaaatcacagttgaaagattttctgacattagtcagctaagaataggtaattgtaattttaattattatatttggtcaatcaagtataaactaacagaatatcctaattacataaaagatctgcattgattaggtcatttctcatttgaatgccatttgttctcgcgtgctgaaaatgtgctgaatgttctgtttgttttctggaaaatttatcagaggctgtgtcctgtccaattctgtttttaggttacctatcttttcctgcagggtttccattctcttgtttgtcttattactgcgaggtctggacagttatacttgtaatgatggagaaaaatcaacaatgtctatgaatgtcaagaagattgctgatatctagaatgaatattgggttggaaactacgttgagtaagatgttagcatcctgggcatgttgctgaaaataatgcaagactatacagaaaacgcaccttagagtggaaaccaggaaaatattgcagtcagcataatgagaaattgtcaatatctataaatccaccagctttgcagttttgtactccttgcagctccttttcaagctagtcattggttaatgattattaaatatgcttttgagcttcatatgaactctcttgcaatctctatggttcccatcttctttttcttttgagtatattttacttttttctcttctgatcatgatgtacagtcaagtaaattatcaattttactcaactgaaagaatgaagtgaaaaaagaggaactcgaaatttgtagacaagttaattagctcatgtactaattattgcatggaatttggataagttttaggtttgtctctcatcatatcattttcaaaattggtacttcgctctgtagtgtgggtaatatactttacatagaatgaaacaaggccttcctatcgccctccattctttatgctcaatatggcaatcacagttggtcgataactatctctagtgcttcatatatattaaatatgtgcctttgcataagccaaaaatgatggactggaaatatgtgcctttgcttatgatggactggaaattgagaatattatgtagtattttcatgaaaacaaaaacttaaaagaagcaaaatccaagattatattttgctggtggatttagatcacacaagagaattttcataaggcttcttttgtatgtagtatcaggtgattgaaaataattaggggaaattgtgtattaaccttcattgatggtggatttagatcacacaagagaattttcatataagacttattttgtctgtaaaattaggaatttgaaaagtcttcttttgtatgtgaaatcagtaattcatctcttcttggtggatttaagattgcacaagataaatgtttcatttaaggcttctttggtatgtaaatctagagtccatctatgcgtgcatgtctgcaagtgcatgtttaggaaaacttgtagctttttggtagttgttttttagtcctatgtcactccaattcttaataaatccagcagtattgcttaacctactggttctgtgctagatatctggatgagtttattatttactgttttacgtggttgttgttttaacatatttcaattgccaggatcaagatcccagcccacttggtttcc

SEQ ID NO: 6905 - DNA, 2038 bp, Populus trichocarpa
  Intron number 4 from transcript POPTR_0006s10970.1 (locus POPTR_0006s10970) derived from phytozome v7.0 (chr-ID scaf fold_6; pos 8326352 to 8328389 reverse strand)
acattggctattggtggtgagttatttccaagaatttatattttgtaagaaaattgtttgggcttgcttggaaagttgagcatggtgtcctttgtcacggaaggaacgatatttagtagtttctgtccttctcctagtatagggcaagctctatttggttttgtcaactagattatttgttagcttttagttttgaaatataatttttttcttgtaatgatttggttcagtttagtttatgcatttctattttcatctacaaatatctattgtttgaaataaaataaaaaatacatacacctagaagctctgcatgttttgtgcagcccaaattgttagaataacagatgggggaaatgccccatcatttaagatctggatcagtttttttttttaagctctttttttccccaattatgtaactacaaacacttgtcatataaagtaaaataaaaacacctacatctagtgagtgtccattttatttgcagcccaaaactttaaaataacaaccaagggtaatgctccatcatttagcatctggctttggcttggtttgtctcccctattcagtgtgtggtgcttaaattaaatgttatatacttatatacatcctgtcaccttgcactgcaaccaagctcactccttagtcagtttttgtgccatattgtgaaatatcatatgtatatggtttgtctcatttttttcacttgatatagtacatgattaatagtatatacacgtgttatagtaagtattgttgtatagatttttatatccctttgatagacagtagtagattcttctattgacaaacataaagagtagtgctttagtcaactttcttcttaattttcagttagtctaatgcctgatgagggaataaggaaatataaagggtaattggatgcgtgactggaaagtcacaaaagctactatgcttggttgctagtttcctatactaagactcatttaatcactttttaggtatttgatgttaaacaacagaaaattcatcagctctgaaggacataaatgtaattatactaagactataaagttcatagcctttgtaaggttttttttttaaaaaaaaaaacaaaactgccttcccttattcatcataactattttaatgttttgatcaccaaatggtcgttcgaggtactcaagagattctgaggtattaaatgtacttgtgatggttctaattagctgtgatcttttgggccaaaaacccctagactacgaggctaaggaagtagacatgcaaatatttgatgtcaaatccacttgcctgaatgctatgactacacttaatatctcgtatagtaacaatagactacctgcacatgttggtcatttcttaatcccatcctttattttcttgagttagatcttaggccctctcttggtcgctacattgcctgcatctacaatattcatcattaatttttgtaggaaaatattgtgactttaggttataatgtttgcgtcatcttagttaggtttccatgttagggcaaactacctctttgtgatgcaactccagttttgatggcaattaatatatgcatgagacaattgtttgtctcatacagaaaatgtacaattgagagagatgaaaggagtctattaagggcaccactcttccccattctcatctcaggtatggttggaggccatatttaggttaaaatgccttctcctaaaaaacatttagtgtattttataggataacaaggtatgtaaaacagaaataactgactatcaactgagatagtttaatattttcgttgtcaatgcagttagtgattgtccccgttcagttttgtttggtattttagaaaattctgttttttgaaaaaaaaattacgatgaaattattcagagctaaataaaaaaactcactcctacttcagctggtatcaatggttgagtttttatgtcactgagctatttgtgctctttaatgtggatgcacaagcaaatcaatatcctaataccctttctgaatattggcatttcgtaggagcta

SEQ ID NO: 6906 - DNA, 1693 bp, Populus trichocarpa
  Intron number 11 from transcript POPTR_0012s09820.1 (locus POPTR_0012s09820) derived from phytozome v7.0 (chr-ID sca ffold_12; pos 10741038 to 10742730 reverse strand)
tctagtgtcttatatcaaacagcatcagcatcaaggtacaatcagtgtggaccagtttcttcacctttttcttccccctttttactatggccattttttttttggtatcttgaatgtgaactttcctgatgttgaaacaggttcagtacttctcttgatcagtgtataattcttcctgaaccaaatatttctctaataccaaatttgcaataaatggtctgcgctaaactgctcatcttcttctcattcaagtgccattgaaatgaacctatttggtcagatgatagaaaatgtagataaaaaaggaggggttgcggatgaacattttgttaaatgtggtgtcatagatatcttcgtgttggagaagaaaaatgtggtgtcatgtacttgatgtggttagggatggagagaaattctagagttatgcagaaactttttgtatttaagcagctaatatggcattgagtagttttattggtgttttggcttttgggactttctgatttcttagctgaaattcttcagggttggaaaactctttgttttaacgttctccatttgttgtaggcattattccttttcttttcttttccttcttttttttatgtcttctgtcttgcattaggcatttttctttttttttgtggcttgtattctttcatgataaaaattttagtcttcctagaaaaaaagattatttacttttgcttaattatttacttttgcttaactgaataaacaacaaatcccacatacttggataattgaagtagcacctgtggtgggcttaattaggagctgtatttgatataatttggatgtgctaaggaattgttgagcagggttcgcttctgctgtttgaagtaaataattcacttcgcatgttattcttactttatggatggatgcccaaaaaatagcgccttgtcaaaattgatgagaaaattgatcttgaattgattttacttttgatcgagattagggataatgtttgatttgattgcagcattaatgcaaatcaaactaggagttgaagtgttaggaaataaaagagtgcagatttgaaagaacaacagaagcacttatttgagagagctttaatgctatttctggagctgtagcctgttaaggtctggattgttgtaaatattcacgatcaagaatgactatatcaacctgttataaatgctaatgtaaatacaaacatggttaagttgatacaattttggtaaaattgaagcttaatgtatccagtgtttcagatctgcattccctttggcaatacagaagaaccagcatgtaccaaaaaaaagacaaaaaaaagaatgaaagaaaaaataaagaaaaagaaaactcgaagagaagaaaagaaaagaaaaggaaaaggaaaagggaaagggagaagcaacactatggtttatgagggaggaagggaaataaaaaaataaaaggcataacctgattctaacatgttggcagcttaattctctctccctctctgtgtgttgtctccttgattgatttcacttaatttttactcagacaagcaacccatcatattcttctatagttattctctttccaatttgtagttttttgctgccttctttatgttcttaattttgctgtttttgatgcagcttgatgtttaacctttgatcccctcttaactcttaatgcaggggcccacctt

SEQ ID NO: 6907 - DNA, 930 bp, Populus trichocarpa
  Intron number 1 from transcript POPTR_0018s13640.1 (locus POPTR_0018s13640) derived from phytozome v7.0 (chr-ID scaf fold_18; pos 13902530 to 13903459 reverse strand)
tttgcaagcttaatctctccaacaacgatcttcaggtatatatattttctcatcctacttgagtgaatatggatatatcccaacaagttttttgttgaagagcaaaaggaaacctttcttaaggtcaaatcaaacaaatttttgattgatattaacacaacatttttgtattattctttgtttttgataaaaacacagcttttttgttgttgatttgattttcttttttatggaaaaaacgtagcttttgtttttttttttaatagcaatcatttcatttcgagctggtgaatcagcacgataccatcttgagtttaaaacaagtgattaaaaatactattaattttcgaaaaagaaaaggagaattttctggggaaaaaaaagaaaagggaaaaagaatcttattatcaattataatcattctattttttttttaattccaataaaaacaaaagggagagaaagcttatattattttttatgtccccccactttgttaaatttggaagatatttcttggaccatatatcactctctctattcagtcgtacgtagctcttaagatttctactaaatattggtctttatatatatatatatatataagaaaaagtatttattcaaatatttctttaggttttaatttctcacctattactctctcttggatctcaaacaattagtgagtttttaattaattaatactatggttaagcattcaacgcctagcacaagcaaatagaggaatatgcagtagcatattactatatgtttatttcataattattagttttaatcaactaggaacatgatgatcatacattaaatatttctttgacttttataacgtgtacacttgaatacctccactggccagcttacaacggaaccaagctaacaaatcgagaaatttatttatatattcgacag

SEQ ID NO: 6908 - DNA, 2668 bp, Populus trichocarpa
  Intron number 9 from transcript POPTR_0017s10890.1 (locus POPTR_0017s10890) derived from phytozome v7.0 (chr-ID scaf fold_17; pos 10453011 to 10455678 reverse strand)
aggtttgtctcactgcttttgttattctttggttgctaatttcattaccctattagaatgcattttgcatgcctatcaaacctttggtgctgctacatatgttttgatgtgcttatgaatttgtttttggttggacgtatttttgtgctgtttctgttatcatttcatgttctgcgagctagggggtggaggagcaattgcatttctagttcaatgacttcataaacttgtgcgacacacttttaggatatgtttatgaactcagtaaagatcatgattgatatactgaagaatttaatgataattattttactttttttggcttctttagcaagtaataagtttcaatcctatccaatggccacatgatgaccgcttatgttcttagcataataaaaacagggggaatatgaaaaccacatgcatgtgctcatgcctgtttgtttttctaatccataagccattgcagttggctggcattttgctaacccataagccacacacttttaggatatatgttcatgaacttagtaaagatcatgattcatatattgaagagtttaatgataattatttaacttgttttggcttctttagcaagtaataagtttcaatcctatccaatggccacatgatgactgcttatgttcttagcaccataagaagacatgaaaacaagatagatcaattgttattacactagattgcaattttggtcagtgcttttccatcattaaaaattccgtggaatgttcaatagaaacctatttgtgtaaaagttcacttactattgcttcaccgcttaaccaaggtgtaaatgttgtttctatgagagagccaaaatttgaagaggaaattagtgacagaagcctaaaacattaaagcttgtttaattgtggaaaacaaggctgttctacagaacaaattttcacaaggaatagataacacaactgtgtccataaaccatttttccatctaaagaactggaaagtcttttacaattttctgaatttgtactggatttggaaaacacattaaagttgttttctatattcctcctttatattttgcacactagttaacaaagggaaacaatttccaaactgaaaaaaaaaacaagcaaccattctctcctgcatgaacatttttaccaaacaaagattagccttttcttttccatattaatttatattggttcttgctctcaccatgttatcgctaaaaagaacaactgaactatttgttgttgatgcatccacacttccatcccttgatttttcttttataaatctgacaatcatcttagtttttttgtgttaataaatagtagaagttttcgaaagttctttatctaaacaggataaagcaatatgcaagatgaaatttacatgatcatcattacaaaaattttagattattatggtatattatctcacttttctaccaatagaaactttatttctttctaaaaaatgaatgcgacttctaattttggttggaaaaagaaaaatggagatggagatggaaagctgtagtctgtaactgtttatttagactcaataatttagacacgggagaaaagatctttgtgggactgttttttaactgaaccaactttttttttttttttgttgaaatagaagcgggtacattttttatctggcaaaatagcagccaggttaggattacctgacatgcattaacaaatcatttatgtatatatgtttacttttgtgcacatattgtatgatagtggtggcatgtatgcttctgcttatgttggtggcactaagagcacatttgctatgtactagttgcagtgatgcaattctaatgttggtcatcgggaatttgttagttgatgatttatgttcttttttttcctcctgtatttattggaattgagttgttgacttcattttcagtatataggaccatatttaattgaaccttcattcaatttttcgttggtgttatcttcatatctggttggatgcatcccatccggtcttttattttgtttggtagataattagatagaatccaagtgtgtttggtattgttgtggcttacccggtatgaaaaaaaaaggccaggttacaaaaaaagcatttatggagaaaaggttgaattgaaagtgtttggttacacgtggttgaataaaagattatttaaaaaatgttctgaaaatgactcagaggtacatgtattgaaaatattttttatatcttagcttttccaaacaatatctaaaggttatttttctaactttaaacaaaacaataataatcaattccctttgataaaagcaccaaaatcatgtttttgttgcttttgcaaaatcaatggtctgaccataattttgaatgggtctcacacaagcttttccattgccaaacacttctgtaagttcagttggagtgaaagcaactccaattgcaaaagcaaacgtagtattattgtatttatttcaactccatagtttttggttattttttctcctagatatggcaaggctgcaaatagaattttcttttatgtttcagataaattctactgtaaataattagatataatctgagtattattgtactcatttcaacatggttttagttatctttgctcctagatatgataaccctgcaaataaattctctttttgtttcag

SEQ ID NO: 6909 - DNA, 1865 bp, Populus trichocarpa
  Intron number 1 from transcript POPTR_0006s22050.2 (locus POPTR_0006s22050) derived from phytozome v7.0 (chr-ID scaf fold_6; pos 21059351 to 21061215)
ttgggacctgttttcggagggtggatcacagaaatgtgagttttcttacgacacattgattttcttttcttcttttttttttcttttagctgtagaagaaatgaggttttttgttttacatcttttttcaaactgtcgatcatattgttcatattctagttaaaatgcacagttttgctacttcttagtgtcgatagttgagatgggaagcattgcatttacttggctgtaaggattttttggtttctttctcgatttttccgtagatttttaaatatatgtatgtgatttttatattaccaagtcgagtgtttcaatcaggccacggatttcttaggacagtttttgcttgataaatattctttaagatgccttctagttttctgatcagagtgttttgttgagttgaggtttggaggaaaggccatattcttgtttatgaacacctcaagtgttctttgaccttttgaaaagacatgtctgctttctttaatgtcttcgaatctgcctgtgtcttggtttggaggaaaggcctaatttagagtgaaactaatttatctgattgatcatttgtgtatgatataccccatcaaacatcatggtaaagttagcatataaactgcatcttttaaaatcatataaatttcttagtttttaatttgactagcattttgtatctcctgtttattcttatgtaggatttttgaattgtgtctaaggctctaagcttgctaatgcttgacattggagtctgtacaagttatattatttctgtttcattgatctcgatctcttctgagccctgtgctctgctaccgtatggtggattcaatgcagttgcttctgtaacagctggtagattatctcattagataaaaaagttaggagcttgtttgattcatgaaagaacctgtgccccactttctgaaatgtgtgttggaacactttaaatagctcctaaatagttcctaagatttttgttcttctttactctaatgatctggtttctacaaaacacaaaacatgcatattaatcaacatgtaaacaaaaaatcaacttgcagtacttgttgatagaaaatagacttgaagaagtagattgaggcaatgatcaatcatctggtcttcaatttattgtttgctctttagtgctagtaatgtgattgcaatattgtttcttgggcttacttgatcgcatattcttggtagctaaccaagaataaacggcgaatcaaaatttatatattactttctgtaagaattttgatagaaggaatacaaaagagaaagttttagaaagacttgaagttttctcattattaaaaccatgtcataattgtctctttttataggcaattctgacagctaattttaacgtaacttttaaaacaaaaggatacaactttctagtttaaaaggatacaaatctatttaaagtagagtttaacaatgtgatctttgaataagtagaatcggtcttgctctacactttatattatcgccttttgtttcttgtgaaaccaaaatttgtctgcgagttatagctttttccgccacattttttcttgttgctgattttagttttgttttaatattaaatacctaggtatcttataatgatgattttttgacaaggatgatactgtgatggattcaaggttgatttgtttgttgcttgttgttgaatgattgtcaatcattttaacattctaaaatggttttgatagtatggaatgtgttggaacaatgccaaactcacctcgattgttatgtatagtcttactccaagatgcatgtttttctgatttcgttctgatttcttgaatatggatgaagataagtccatatagaagcccacagctgat

SEQ ID NO: 6910 - DNA, 953 bp, Populus trichocarpa
  Intron number 1 from transcript POPTR_0009s13810.1 (locus POPTR_0009s13810) derived from phytozome v7.0 (chr-ID scaf fold_9; pos 10935165 to 10936117)
aagttgacaaaaacaccctctttgacctcatcttggtaagactttctgtttccttttttcaagattttttttcttaaccttttgtttgtgaatatttatgattttgccattgtttgggtttctatttgttttttattggttaaagatcgtatctttttgctttttagggtttcattgtttagttttgtcaggggagctggtttgcaatattactagagactggtctttaggtttgttgtagttatatgatgttgtcatttgtggtatctgtttttttattggatccttgtggtatctgttagtgctaaatacgagtttgtaagttggggattatggttttttgacgggggggttgttttgttttggggttagggttttttttctgtattgtttttctggggattgtgctacgttgtgagagatttgttttaactcactgatttgtacccacactttggatttcttctcttgtctatttgcttcaactattatcttatgatgctcttacgcagggaaacatggaaagattatacggatcaagaaaatgatttgtagttttttttagttcttttagatgaacagtggaaacaaagtgaactgatgcattgatcgatagataactggcgcgttgtttgcaactgtaatgtggcaattttgcctgcttttggtagattgatttgtttgtgaaatatgatggatagtgagcttcttgtttgcttcctgttttatgttcatgcttcaacactttagtttgtgaaattctctgtatttgattaacgaacccagtagtgatcctattcagtgcttctcatattggattattatttgttaagctactttattttttgttttttgttcgtgactttgttatttagacactttatctgaattaacatggcaaagttatgttgatttcaggcagcgaactatctgaacatcaaggatttgctaga

SEQ ID NO: 6911 - DNA, 1839 bp, Populus trichocarpa
  Intron number 1 from transcript POPTR_0004s15400.1 (locus POPTR_0004s15400) derived from phytozome v7.0 (chr-ID scaf fold_4; pos 16038699 to 16040537)
taattctccctggcactatcagagaaaagagactggtatataaaaacctttccttctcttattttacatgcttgtattattgcttctcaggtgaggttttgataaaggtttaaactttatgaattaaattgtgaaatgattgcggtggatgagattgaatggagtgatagttaagtaaaagggttttgtttagattttgcttgtgtcttgcttcgttgatgtgttttcttggtttacataaagtttgaaacttggtgatataatttgtgaaatgataaaaacccagaacttctttcgatgataagatattcagagtgataccagagagaaaagggtttgtcaaagttgtttagattttgtttctttcatgtttctttgttgtgttctttttcttcgttttgtcaaagctgtctagattttgtttctttcgttcttctttgttgtgttctttttcttggttttgacaagaaccctattttttctttgattaggagtggactatgtgaaggaaggccaactggaattgggtttttattctcttgctttcgtagctttctgtttagctcagttttttgtacagcgggatttttctctggaaaatatcttttgaaaaaaatatattttgagatactaagaattgataattcaatcgagagtccatgaatggaattatgtcagagaaaatacatgtttgcttagttattgttggatgaaatcctttgttcagcttgtagagttttgtttaggtttgtttctgattcaatcaaacaaggtggttactggtttgttgaaaattatttacaaaaaaagtttaggatactatgatacagctaatttaaattggttatagttttgcagagagaaaaaagaaaacaaagcgttagcttacaactacagtatgtatgacaattcactgcaagggaatggaattagaatagcatttccttcttgcattacagaacattccaccacaacatggaagttttagtttatcttcataaggtttcttggaaattaaagaagcatgataatagatgacgtctcgatttgttttggtgtactggattgtcactttattctaagattgcttagtaaaattggacaaaatgaagcatggaattgtttttaatgaatctactttgctttcaatcattctagagatttgaaaagctttctttagctcactgattatgtcctctagaaaaagcataaacttctagatttcatttcctatttattttgatgatatctagaaaaggagcttgcaggttctgttgtatactgtgcattaaatttgtctgatggtttatctttccaaacctgatgtgtaggatcattagaagatgtcatgtatggaaacaagtggtggcattgagaaaacattcattttcaattaaaacaaaaacaattagtttcaccaggatcaactgtagcctgcagttgctactgtgctttgtggtttgagtggctcatgaaattagcaatcataaaacaccatcatgcttgggtctttggagatgaatgtgcttttggacctcttggtattcttctttattgtttgctcacaaaacaaagcttatgttcgtgtgttctaaaattttgagcctacttggagacaatttcttacatttcattgtagagttgctgtcaactataaggaaatgggacgttccaaccttatgcaaatcttttattgagttgagcttatacacattatcgtcatctgcaacactacattatgggaacaaaatatttgattctcctttggggaaaatggagcctaacttggtttggttttctgcagaggatcccagataattttgtcaagaaatttggaca

SEQ ID NO: 6912 - DNA, 1922 bp, Populus trichocarpa
  Intron number 1 from transcript POPTR_0015s07820.1 (locus POPTR_0015s07820) derived from phytozome v7.0 (chr-ID scaf fold_15; pos 9110477 to 9112398)
aaggtatgtctcttgttaccatttttttgcttcttctcctgccttttcgttttgactactttttgggttttgttttttattttcttgtttgcttccggctatcataattcaattaataacacaagacttatgtttttatttttagttagttaaatagatgtgttagtattttttttattggtataaatggtttttgatgtttttaattaaatgtttttaatttataattagatttaaaaaaatacatttaaaaaacttatatatttattttttgatataaaaaaattattaaccgacagtaaaatgcggttcacaattttgtttttgtgcacgtcgctttcacttggtgtacttagattgattcatggccgcattcattacgcgccaacattagccgatagactaaattaattttaatttaaagctaattttttttacatattattttataaaaagtaacaatttgaatgaagatataaataaagatttttaaaatagttaaaaaatttataattataatagttggattttataaaaaaaatttaaaagtaataaaatagttggattttgaatttgtattttaaaaatcaagttgaatgttataaatctcagaattactaataattatataattattaactttaaattctcaggaattagttgcatataaatgcataaactgcgctggatacctaccgttaaaaaaaaagagaatcattcttgcttgctttctttctttctttcacgtcacatcatttaaaggtgctaacttgcactgcatttattctttacgctaagaaatatctggactcgttttcatgacacctactgtaccagacgtgtccatatggcaacacgatcaaggaatacgtctgctctgctgatctttcgttaagatttggtccgtggctcatcagagcttgagctcatatctaatacttatttccttttgaatttacctctaaaagaggtaaacactcacatacttcgtatattattagatcaaactggccatttaacccgtgatttgctgcgggttgtagttttttttttaaatgttataggatatatatattttttcaatgtgtttttatataaatttatacaaaatcaatatagaatgatataatcgcatgaattagaatttttaataaattaaatattaaaagataaaattttaaaaaaattaattacataaaagaatctaaaaaaaattaagggtgaaatttttatttaaatatacaagttttttttttttaaatgactaacatcattttattctctatagtgatctatttaaatcttgatatgattatttaacttattagattaattcataattagataattatcaatcaaattaactagctgtattcaatttaaaattcaataggattccttaataggttagttgtattgcatttaaattttaataggattcttaacttggtaggttaattaataattatgaataagattttgtgaataaaatgacagtaaatcaggtgttttgacaactaaaaactttaatgtattattgtaatatatttttaatttaattaaaaatatttttgtaaaatcaccaagtgtgcataagaacaaaattgactcacatcctttagcagtctgaaagtgaatatttccttgcgattagcattgtttttgcatgtaatggctcctacttgctgtcctctaaacttataggactacgacattgtatgtaagattcaagtgtgcggttttcaatgctccccgaatttgttgtcctcttcgatgtaatattcctgaatctgcatttgcagagattactctctttttcaatgttgtgctcgaagcatgccatgctctactgtttcatgtaatttaccatttcaacttcctgtccagggctttcttggtttgagtggagcaatactaatcca

SEQ ID NO: 6913 - DNA, 1237 bp, Populus trichocarpa
  Intron number 3 from transcript POPTR_0008s03520.2 (locus POPTR_0008s03520) derived from phytozome v7.0 (chr-ID scaf fold_8; pos 1874199 to 1875435)
gtggcttcaataaagcaattcaaaattattctcaggttccttaaatatttttctatatgctgatctaaacatgcctatttctaatttttatcaattttcttgcttctgtgtatccaagatagcgaaagatagattgttttcctttcttttttcttcctttttttttttttcaaattccttagatcagtgtcatataaaatatcaatgtttcccactcataattcaaagtcagggatcatactaaagaaattgcaacaattttttaatggtattattctaaaaacaccacatatttaagtatacactattttacagattggagccatgtcaatgaccaaggattattttttgcaaccctgatgtaaactaaaagaatacaatagaagtctgctaaaaagcaacttcctttcacttattttcagattggatgtagatgtaaaatctatagagtgtgtagtttgtgttaccttctgactacatatgatacaatttgaatgcattgatttgccagaatctcgagttcattcccaaacaattttatttcactttgggttctagtataaacctcctaagctccctcccgaccatggttcaattattcaactgtatgttttaggtaaatttgtgcattatttagtaaatttttgttgatttcagtagatgtttaaataaaatttatatcagtagctttctcactgttgaagctgttgattttcaaagtttatcatccaaaaataacaattctctagccaaacatgtttccagacttgtttcccacagatgaagattgtgatccagctgccccttgttataatggctactcagttgctttagattacatatttttaaatgtttttacctatttctatatcaagaaattcctaacttcattcacttttttcttctaaattgttgcttgtattattcctaaagtttcccttttatgatgtaaaagcctgatcaaatgcttcttcataaaaaaaagtgataaatgattggttgataaagaattgagggtgatcgtccataggaggagtgagtgaaattgtatgctagattgtgaggatttcatcacaagttctgtggggctagatttactcataacctcataaaggattatcatatatctcacttctctggaatttgacaaaaaagagctggtgcctattcttgattatcattttttttaatttttcttccagatcttgcggttattcagtgaatctgctgaaagtat

SEQ ID NO: 6914 - DNA, 4556 bp, Populus trichocarpa
  Intron number 1 from transcript POPTR_0001s34510.1 (locus POPTR_0001s34510) derived from phytozome v7.0 (chr-ID scaf fold_1; pos 32624284 to 32628839)
ggtttgtgaggtatgctttgttactgtctttttcacatttgcagcatacatgtttccacttgtttgctttgaaggtcatgggttaataaaattgctctcttaaagtcttataatgatccggactatcttatttaccctttcataatcatattgggtattcccttttgttttgttagtatatgtattgaccttgaattacatagaattacaaatttttgacatgcaattgagctttaatttgctgaaagaaacagaaaaccatgtacaaactgctattagtacttgaaggcttaaattgcgatgttttctgtgaaaagttgagcttctgagatttgtgttcacattgtaagaataacttggtaaagaatgagattttgtttgtaggttgttattaaagctctgtgtttatgtacctagtgcttgcaaaatttggatattgataatgaggtattaaccttttcaaacactttgtataaagagccattgagaaccacaacttacagtaaactgcttacaacttaacttggttacatttacttttgctattcattttaggctacttgctcaactgctgcataatttgttataataaagcttttttaattgaaaagtgcatgtggccttcaggtttcctaaaagttcagtaggttataggtgaactagaagaaagttgaagtattagttgatagggtttagacatatttaagctcactcttagtagttcatttataaagaaaaagaaaaaatcaataaaatactatgtaggaataaaatttgaataaaactatctatatataacgcaaatacataaataagatacaaatgtgaataaaaatttattcaatgcttcactaaattataacatgattatattagcagtatagattttacaaatccttttatttcgaaatataagcgagacaaatattaaagatatagacatgaataaaaaatcaaggatttaatttaataatttgataagttttgatagttttgatagtatttttcaaattttaattgttgagttttgctgacctattttaaagtatttagagttttaataggcaaaataaagtgccaataaggtactatataggttatgaattattcaaaaagcttgttttatgatatttaaggttttatgtgatgtataaatagaaatataatgaaaaatgggattaacatatttttttagaaatcatattaatattttaatctatttcttaattggatatagagtttaatttacatattcagtaatgccatgtattttgtattgtcctataaaaaaagagaaaatccttttatataaacaggacaaaggtctttttagttttagcaagtagaatttaaggcaagacaatatatatatttgttttaaaaagacagtatatctggtagttactagtaaaatttcttaatatatgtgataattcataaaatttaagggtatttttgttgaatcaaatattttgacaccgagtaatagttatggagttttttgaaaatatacacctctttgttcccttgagttgaagcaacctccaatttggccaggtacttcattaccttgccatgtataagcccctgtcctataaaattcacagtttgttaaacgtgaatacatgctcttagggtcatctgtaaagcaattgtaaaggtctttttagttttagcaagtagaatttaaggtaagacaatatatatatttgttttaaaaagacagtatatttggtatttactagtaaaatttcttaatatatgtgataattcataaaatttaagggtatttttgttgaatcaaatattttgatgctgagtaatagttatggatttgtttgaaaatttacacctctttgttcccttgagttgaagcaacctccaatttggccaggtacttcattactttgccagactccatattgaaccttattcattccttgaatcccaagaaaatttctcaatgttatgtacctataaaatccacagtttgttaaatgtgaatacatgctcttagggtcacctgtaaagcaattgtaccttttctctttgagggtgaagcaagtgtaaaacttgttgtgcagagaatgaatgttagccctcattttaagtgaatgatcatagttgattcatgtcctgggtctacacaagtcgaaatcatgaattgcaattggttgactggacaagttgccaccctgttatgcataagccttgctttcctcgtacttcctctataatagtcccaaatattctctgcctggtgaaaaggctttttggtggaaaagttgattaatggtgtcaagaaacctgccaaatatagcattgtgaatacggaatagaggctagtgtttaacttttgtgctaaattagagcaataaactcgtgtcataatggtgtctgaactgctgaagacctgaagtaatttgactctaagaccccagttatcatgttagtttctttgtcttcatggtggttcttcttctgtgactgcttgtccatgctcccaatagaaccctctgcctcgtataagataacatgagatttatacatggggcctcgtcatcccatctgtctatgtctgttctttaagaactactaactttctgatgtctttcctcatattttaatttctgaaacttattttaaattgatattttatagtacatagtttcattcaagcaaaagatacctatagttccacatgaactattatatttgacttcaataagcacctggtgtatgtattattttgttttctaaatgttttactatttttttaatctatctgccacgtatctcctagttactgtactggagaggtgggcttaagtctcagtgcacagaagctggtcccaggatactacatggcttgcaaaatttttaaaaaaggaaaacagttcacaaacatgaagggattctgatgatgttttgagaatcttggtacattagttgcaacattatagaatgtaaacttggcttgttttgtgaaaactaagctaatggatatgtagcgccaatttcccagtgcttatttagttcagtgttgtcaagaggcgctaaggcgctcacctaggcgctctaggtgaggggaggtgaggccccgatgcctttattagcctcaggtgttggatttcaatgatgcgccgcctaggcgagcaccttgtgagtgggtgcaaggcgttaaggctagcgcctgtttgaagttctttttttattggttggattttttttaagctgatttatgttttgacccatttgttcaattttttaaaatgatatttaattttgctttttaatctattcggctacttactactttaaattatcttattttgttttaagggtgaaaaatataacttactactatgttatggtattttatattttcttttgaatttttaatgatctaatcttaattggaaagatatatattttagatttatataatataaaataatataatattgcattttttttttaaaatttatagcatgttgtcttagttcattcgggcgagcgcctagcaccttgggcattttacaggcttggcaccttttaccgcctttcacctttgacaacattgatttagttatatgcatatgcagaaatgtggtaccacccagtaggtcttaagtaggcacacccacaataattgataacatggtgaatatgtttgcactagttgaagcacttggttcaaggttcggtggattttggcgcacaacatatatatacctgttaactgtcatgttggcaagttagtttttgcgttgttgatacagctccctagggaagcatcaaaaccttgcatctggacgattcctgctgtctcattatattgaagagaaaggctaatcacttctgacaatgttggttcagtaatctagatgaccttgcttccattggtttccctcttagtcaaaggattcattatgaaatcttgggggagaataatgcagtcaatgaaaagcgtattctggtattattgttcaattaatatgtacattcattgacttgggtctttgagttattgaagaaattttttgttgaggtttcttctttcggttttgagaagttgtttaggtttcatttgtatcattgggaaatttattattacaggtttcattttgatcatgactctatttccttactacttaggtcttcatggtgcctatagcatcttaatctatgtggcagacatcaattttcaaatatggctatggaaatttccttgttcgtgtggattttttagagggcttaaatttcttgctaattcaagaagcatccgttatgaatttcaaggattaggctcagttaatttctagctgtcttttttctcttaccacgggggttctctctctcactcttccaagaaataagtatcatgaattgtagcttccacgtagttctatctaataacagaaagtggatggcaatatggtgtcttttcttcgcaatctggcatggtgtgtatatcaaagtctagttggcctagactggatattctgtctttattgactacttacattagttccaaatttgcagtaaatcagagt

SEQ ID NO: 6915 - DNA, 2725 bp, Populus trichocarpa
  Intron number 2 from transcript POPTR_0003s08860.1 (locus POPTR_0003s08860) derived from phytozome v7.0 (chr-ID scaf fold_3; pos 10191259 to 10193983 reverse strand)
tgggcaaaattgagcaggctcagaaggaagctgaggtgcgttatacatctatctacctaaatccaggacacacacacatgcacaagcaccaacaagttttcctgcctacatgtgttgtcacagtttcatgttgtaattaaggtacagtgaattgtgagactggtgagtatctcttagcatgctttatttaaggataaatcattcaagtactcaacactgcttccacacacccgcccccaacagaaggaaaaacctggagtgtgagagacagaagatgagcctttggaattatatagttcactagttaaagcaaaatggtgtagtattgctgtagtgatcagataggaagataaaaatgcacatttgtctcggatgaaagcataagtttaacctcttactaagcaagaatcttatagggctagctgaaacagtgcaagtgaatttaaaaaaagaaaaatcacatgcatctgaaaaaaaaatgcattaattagctccagtcacttgtattcaaccacatgctttctaccatttaactggttgtgattctaattattgggagtagagtttcacagaccaaaaggttatagaatcaaaattcatgaagtccactagttaaaacaaaatagtgtcttatttggtattcctacagtagtcatataggaagacaaagatgtacatgtctcagaggaaaactgaaagtttaatctcctgctaagcaaggtttacatgtgactaagaacacagcaaggatgaaatgaatgtgaaataatgcatcacttagctctagatagtagatattatattctaccaccataccacgtgattcctacctcttaactggttgggactctaatactgggattagagttttatagaaccaaaggctacatggtcttgtatgacttattgatagaatgattttttgtctttgatgttgtgttcctctgtgtctgatcttggagctcaacttattcgaagaagaagcaatgagggtagttatagtttgtttaaagtccataaacatgccttttcaatatcattccatctgttatatttatctgcttcagttgattgagctaccccttcctctaggtggatgacattttaggctagctgcaagtgatttggcatggacttcatttagaattacaaacatgaggttctaataaatgagtatgatctgtttgtatccttaatggcatgcattaacttaagcaaaattaaaaaggcagatacactattagtggaaagatgatgctccattgttgtcacattacatccaatggctagattttggtcatgaaatcaaaccttttggttgatttaagtgcaagtctagtgagaaatgattgtatatttaatcaatgtataggtgaggccttgctctgtgaggaaatgttttgattgttggagacaggttttgagtaagtactggtaaatgtaaattaaggctctactgggactctctcaagaaacctttttcattcctctcttcatcttaaatgagaaaatattactcgggaaagattagttatacatcattgaaagtaggaagggaatggcaaaaactttcaagatttccaatgtctgcgacctgaaatacttgtttattattatttaataaaaaactggatctagcatcttaatctttagaattttccttgtcccatcttctttctttcttgtaagaactagttgatgtcccatgattatgtggacctgtaagcttacgtgttatcttattcttttttagagtgtgtggcccctcctactggtgcaaagttgcatgggtatgcaaggtaacaccagtgagaccagctaggtgccatgaccctcaaaatgcactccaaagtggtagtttgcctggatacagaacttccataacctttttaagctttatattgaatcattgtctactttcctttatcagtttactacataaaactgagtgagaatgcaatcaaagaaggttaccaaactatccttttgtttcgatggtgatgtgatttagagaagcctagtgatttttcattgtttacatgataaaatacatttatccatacattgttacttgttcgtgacatcatatacatttagccatacgcttatctattttacttatctttatttcatattttatgatgcatttgatgttccaaaactggtcaatatttcataattattatctgtggcttttgagaatatgcatgcattgctttgacaccattgttccatagttttgattgaaactctcaattatttctgtttgttttgtttgatatgtgatcaaattttgattatggttgaatgaatactgattccttgttgcactctctagtttagactatatgataaaacttgagattatttttgaaagctggaatctgcaagttaaacaccgtttaaaataaaatctatcctagtttattgtgcttgtgtctttgaattttgttgccaacattctgtttttcatggtctactaagccatttggtaggctgtattccttcaagacgccttttctggatcgcaccagttgtcttagaaccaactgtttgatatagttagcaacctagttgcctagttctcaattttgccgcaactgtttaagttatcagttctttgtttccagaattggttatggatgcattctacttatcttaaactatagtagggaagcagttattccatgaaatgttattattacaggtgaagtggaggcaggag

SEQ ID NO: 6916 - DNA, 608 bp, Populus trichocarpa
  Intron number 1 from transcript POPTR_0003s03680.1 (locus POPTR_0003s03680) derived from phytozome v7.0 (chr-ID scaf fold_3; pos 4335328 to 4335935 reverse strand)
gcaagaaatcccagcctgcctcttctcctaataaggttagttatttccctttgctctactctctatttcctgtccctttcaataacaactttgacagtctgttttttttggcccttcttataagtagttcctctatgccattgtacccccgccatatgcatgattctgtttctgtcatgttaacacctatttatcagctagctgcatcaatgtacatggctggagatgtgaaaacaataaggtttatttgtggtggtggggggggggggggtgcaataatagattttacatcaagaagtgtatggttcacctgagaattagctaaataattcttttaatatgaatatgatcccccaagttggattgaaattgaatatgatcagggaatacagatgtatcttatatcttatgttgaaccacaatggaaatctttgttcaaagaatcatatcatcagattgagctaatatattcagtgggttgaaacagttttgaagaggatttggtctaagaaacttattcaaggttgacgtctaacgatttttgtgtatttgtaaatttcatttcattaacagggttctgagtcagctcctccaagaatcacatcaaa

SEQ ID NO: 6917 - DNA, 1962 bp, Populus trichocarpa
  Intron number 1 from transcript POPTR_0009s08420.1 (locus POPTR_0009s08420) derived from phytozome v7.0 (chr-ID scaf fold_9; pos 7714171 to 7716132)
gagcagtttcgtattttgagacaaaaaggcacagagtaagattcttatatatgattaaattttgattttttctttcgttttcatgttgttttgtggcttgatgctctggttgactttttgaggaattcttggtttgttttattctgcgtctggtttttacatattttttggtagcttaaccttaacatcaagattcttatctgtaacaaaattttgattcattttctatgatgttttgtggcttgatactctggcgatgaattcttggtttgttttttcattttgttgttttatctacttctgagcttggttaacttcttaacaatcaaagttcaagtagttcttctgaattctgttctttgctaaagcgattcaattgaactctgttggatgggacatgctcgaaataatctcttttagtgtccctttgaatgttatccctattgaatgcatgtaaaatccagcgtgcatgaaaaacttctaagaatatgattgcaagaggagcatttggtttttacattattttgtggcttaatggtttattgaacgtgttcgagttttgttttgctgattcatggcccatgcttttcagttttaagaagttaaaatgatgttttctacttccggggctgattggcattgatgtaacacgggattcaggagtttgcagggaaaataattgtgataaaaataggaaaagcggacatgcatgtttgtttagcaggtaagagatcgagaacgtgctagatcttaagaagttcacaaaaaaagtttcatctcaaatgctaagctgatttagatttcctttgcaagttcacaacaacagaatccaggaggaatagaagtataacctacctgttaggacttggtgacctgggccaggtttcattttgaactagtttggaggttgacctgatccgggttgaccctatcaaatacggcagacctggatgatacctgactaagtcaactttgaggattaattttcttttttaatttttgtccaaagcgacatcatttaatttatttttttgtccgaaacaatgttgtttcattataaaaaaccaaaatgatattgctttgaggttgactcggcaaacctgcaacccaggccaggtatgataacttaggattggttagaggaatcgcttttgcagatctttctttagacaataaggtacattgtatagtagcaaatagaacattgagccagggtgtagctatgttctgttctgtgatttgccaaagctggcaatcccaacctgggtttagagtgaaaaaggttgattgatttatgccttggcaactagtatgtagcttttatggttgtctatcagctggacgtgtggctttttagcatgttcacatgctgctgtcaggatgatcatagatttggtgaagtagcaatacttaaaattttacactggtgttactaacttggctgaatgtcatgctgattgcctcgactgccagaggcaagagggaagggagtgagatagcaacatgaaagggatgagaagcagaagatgggtggtagtcaggataatattagaagtctagaacttggaattttattgctggatggcattgaattggctgccaggaagatctcagattttcctttcttctgccttggttcttcaaaaattaaatgaaggactagagatatgcattagaacctctgcctaagtgcctattctacaacaacaacaaccaagccttaattccaaaatagttgggttctgctatacgaatccttttgtgccatctccctcaatcacattcaatctgcctggtctatctgtttgaaatctctattactagatgaagtgcataatggtcaagtgctcttgaatgaatcgtgcggacgtttctcaagaaagctagcaaggttttatgctttattccttgtgatttttcaccttgtttgggtgttgtgcaggtatcctggcacgggggaat

SEQ ID NO: 6918 - DNA, 819 bp, Populus trichocarpa
  Intron number 2 from transcript POPTR_0004s13440.2 (locus POPTR_0004s13440) derived from phytozome v7.0 (chr-ID scaf fold_4; pos 13499139 to 13499957 reverse strand)
tctgggttatcatcctccttcaaggtacttatcaggtcggcatcatcaattaagtcttctaattttagcactgatattatttagttataatccgattcatttctgttccaaaacaaaaacaaattattgtatttatttgttgaagaagctttttttggtaaaaagattagggaattaaatcagatcaaaactgtttgcttcttgaaatttaattcacgtagtgaccttcgagttcttttttgatgaagttaattaacctgacgtttacttgtcaatgaaagtatatgtagcttgtgcagtgttgattttatctgataaaatgcgccttggtagtagggagtagccacaaacacagggacatgggcttctctgtaaatctcaaaaagatgtatatatacccctacttatctagacatcataaatgggattatattctatgtagattaaattgcctgttctttatagcatgttgagaagaaatgcaataatccctagctgatagggaaattgtcatttggtggctctaatagacatggcacacactcaatacacgatgctggatacatgttacgttgaatttcatccttcgtttctagctgaattcaaagtcaatggcacgcatttcttgttgtttaagaaatacaggatctgtgtaatttggtgcaagatcataattaatcttctattccatcatactagtcatttgttacttcatacttgggggaaagtgattgtggttctcagtgctttgcttctgaccctggaataaattgttgatatccagcccaagcattaggagatccatctgtgacaattgaa

SEQ ID NO: 6919 - DNA, 1650 bp, Populus trichocarpa
  Intron number 18 from transcript POPTR_0004s07890.1 (locus POPTR_0004s07890) derived from phytozome v7.0 (chr-ID sca ffold_4; pos 6444245 to 6445894 reverse strand)
ctgaagccctattgaagcaagttagatcatatcaggtatatacatatagagtaataattattatattatgttattgcgactcgatattactgtttttgattcatttctggagcttgtttgtagtacacaatcattgcatatgtgactgagtaggctatgcattcgacaaattgatacttaacacgtcatgttatggtcctgtcaaatcataatttttgtgtgtatgttttcattacacataattacatcaattttctagttttctagtcattcatttgttagagaataatataaatcatatcttggaacctcacttaatagcttaagctattgagttgagttggttctttgatatcacttactgtagcatcataaatcaggttactattagaagagagataattgtacattctgaaatcttaaatatgcatacaccaacaaccaagcctcaatccgaaactagttggggttaaatgtgcatgatgtacagggagggagggatgtgactgagtaggctatgcatttaacaaatggatacttaacatgacatgttatggtcttgtcaaatcataatttttgtatgttttcattacacataattacgtcatgttttcactacacataaggagggagggagggagggatgtgactgagtaggcaatgcatttgtgttatggtcttgtcaaatcataatttttgcgtgtatgttttcattacacataattacatcatgttttcaataccgtccattgaagtgttgcagaaaatgattccaatactgtcctcttttggccttgatgcttgttctgcaccacttcattctactaacaggtttcttttggtggtagccccatcctcactacccaaaacttatgcccccatctttctggtgtatcaatccatcttcattcacatggcgtttgcatctgcatcaacgcccaatgcccctcttatagtagcttatccttacaagtcattttctttttcctttcagattcttctatcttgtccttgcatattgaacttgattgtttcttttcttctgttttcctaacgcacatgtctgacactagcaacctatgctaagttgtgattgcctccctggtccaaggtttggtcaactgtccttggaaggaaaaaagtctactaaccactgataaaaattaatttgatgagatctctctaaagcagtttttgttaacactaaatgatagacgaagtcaaattcttaaaatagcccctgaatctgtggcccctgccaccatctgaaaacaatttttattgctttcatgcgccaattggattgaagtttcctcctgtgatatcttttgctcataggtgctccttggattagcttatccaaatatttccaaaattcattctgtgtccatgtccaaacccacatgtgatggccatgacattaattacgataactgtctcctaatgtttgatgggtttgctagtttttttagtctgcaccgttattgggtattgcttgatattcactcataccagatgcagagattcatcatgtccttacaaacagatttattttagtttcaaaggccattgttagaattgattgtttctgttaattagttaaactctttctcagggatctgatttgtggaaagatagagatcgatttaa

SEQ ID NO: 6920 - DNA, 1128 bp, Populus trichocarpa
  Intron number 2 from transcript POPTR_0019s15270.1 (locus POPTR_0019s15270) derived from phytozome v7.0 (chr-ID scaf fold_19; pos 15815155 to 15816282 reverse strand)
agtccttcccatctgtagccgccttttgaatcaaggttctttattatcttctttaatctcgatctgtttgattcttttttcttttcgccttcttgattctggtgctataaagactgcccctcttgtttatagttgttatatgcaggaggaaaaaaccagaaaacatcagtttttttacttttaaaattcaattttctgttactgccgcttcttgaatgttggagtcctctttgtaaattgcttttgatggatgatgtatatgtatggttctccttaaattctattcttttgatgcttagataatgttagtcaagctacttcttgcaaaatcaagtgatttatcatgaatgaatctagggactcgcatctctacactctactatgcattgattgttttacactgtggtttccatggatgagaatacgctaataatcattaaaataaacactaatcagagtaacttacatgtaatgttaaggttgccgaccttagtttatcttgctgaaaagcaatttatatcatgcctagctgtttcttggattattgagatgtagtaggaggcatgagagttggtttatgttctttgtgcattgtaaaatcaatcatagcaacgaatcatggtctaaaacatccaagcagagcagctttcaggagtagatttcatgtctaattaatttcaattatgcaataatccaaagtgatttatctcgcaaaaatgggaatgtcatacaagaagtgcacataaagcatcaaactttcgattgcaaaaaccctcaattgtatttgcttgtgatagatcaccatttgaatcagtctaaaatggatttcataaatcaatattgtgtctttctctagctgagctaaggcggtgttggcttattgtgtctgttgattactagtattgatagtgattctgggcagccgtgtggttgatgtgtgtgtgtgtgtgtgtgtgttgctcacaaatcagtcaacatactttgatcacttaaattttaactacaaaagcttcaacttgagaacacatggttcagtattttcattctgttattctatcggaagagaaattttagttattccttgtgttagcagagatattgagggtttctggaaggacccccaaccag

SEQ ID NO: 6921 - DNA, 1018 bp, Populus trichocarpa
  Intron number 1 from transcript POPTR_0008s10020.1 (locus POPTR_0008s10020) derived from phytozome v7.0 (chr-ID scaf fold_8; pos 6245762 to 6246779)
tcggctgtatcccttcaaaggtaattcccttttgttttggtttctctttttgatctctttctgtgttaaagttgttgggttgtgtttgtttctgtgagattttatattttgtttgctttcagatctgttggtattgtttgttacctgaatttgattgatgggttttccgtcggaaatgggaatttttctgattgcttttttgatagagatttcttgttatgtattttactgtttatcgaaatttcgaacaaattatgctttggctattggagaggtttttgactgtttaacggaaggaataaaaacagtagaagattttgtttgttattggattcaacattttgatctccatctgtgaaagttcatttcgcagtgtatagaaggcccaaagtatcctgcaattaatccctgttaggcagtggatttaggttgggaacgctgatgaaaccgtatttcccaaaaattcagaaatttttcttttgtttttttacttaaaattattttttttatgttttcaaataatttggatgtactcgtatcaaaagtaatttttaaaaaataaaaaaaattattttgatacgtttccaggcaaaaaaacattttgaaccacaaccgctaacacactcccaaacacctctagattatccaaatagaacttttaagttgtctgattagttctactgattgtatgttttacatctgtggttgacatggtgatttgttttgtaaccagcttgtttatattagttcgtctaaaatgttctggaattcaacatattatgaactgtgtatttgtgcctttgaagttaacaaccagaagtattactcctggattgtcaactcatttatgtattctttgtatttagttatttaacctatcttttgtagctttattgttctttcttatagccaaactctttgacaagcattgggaaaaaatgtttgcacacgtaacatatttcacatttggaatttatccaacccttctttttttcaggcacttcttcactcatcacac

SEQ ID NO: 6922 - DNA, 1865 bp, Populus trichocarpa; identical to SEQ ID NO: 6909
  Intron number 1 from transcript POPTR_0006s22050.3 (locus POPTR_0006s22050) derived from phytozome v7.0 (chr-ID scaf fold_6; pos 21059351 to 21061215)

SEQ ID NO: 6923 - DNA, 826 bp, Populus trichocarpa
  Intron number 2 from transcript POPTR_0005s08570.1 (locus POPTR_0005s08570) derived from phytozome v7.0 (chr-ID scaf fold_5; pos 5962674 to 5963499)
tgacaactacagctttatctgaagctatcaataaggtatatcctatcgtggatccctgataattcacattaaatttgtagaatctgagtcctatactgttgtagatccataggtattagtatgatgaggtgaaaaaataaatgaaaagccctcaagatcatttttccatatgtaattacttgtaaccagaatgatgcatagatagtgaaatactatcaaattcaagtggccaagcagacttcctctgttgttgttacctctctattcgataacttctctccccgtatgctcaatttgtcctcattaatttcacttataaaaagcaatttgtgaagatttgatcattcacagttaatcaagaaaaagattattcaaataaaagctccaaaaaacaaaaagaaagaaagaaagaaagaaagaaagagaagaattctttcagttgaattgaatatcatgagtttgacctcccatttgcttttttatttaattcatgcacaatgagtaaaagatgattggctggatcaagcgactgtttacttgaatattaacatatcttatatttatggagcatgcacatgtacttatatgatgaggtcatggatgactatggggagatcatgggtgagtgtagattggctgttcatgagtgagaagactgacattgtggtacaccaatatttgttgataaaatacattttgtgattctgtaattctctctgttttgcagcattatatgaatttatttagctggctttatgcaatttaatattaattcttaccctaaaaatactgatgttttgtagatagaggagaagcatagggacct

SEQ ID NO: 6924 - DNA, 1856 bp, Populus trichocarpa
  Intron number 1 from transcript POPTR_0001s31640.1 (locus POPTR_0001s31640) derived from phytozome v7.0 (chr-ID scaf fold_1; pos 30010652 to 30012507)
gtgtgagtgtaaattttttttcttttttgctgctttgcttctatgcgataaagtttagattattcaatgaatggtgggaatttttttgtgtgtttttgtgattcaagtaaagggtagctgtgatgatgaagaatgatgagctacatggtgttagtttttgtgccctttctgaatttcaagattgagactttatgtttagcttgtcgctttttactcacaattcataatggtttagctgaattctactgatagacacctatttgtattggattagaacccatctttgttgtattgtgaaccaatgtcttgaatgttggaatttgggagctatgggactgcagaaaggtcatcatgatccaagtcgtcttgttctatgtccattctatgaagtgttgctctttttatttggatttaaagaggtgaaatgagaggaaagttagagtctgagattgaggaggaataaaaaagagatgaagctacttcaaggtatggcattcactggtagtgaagggattaatagtaaggagggttacatgggattatgcttcttgaacctgtaccgatattgtaaaagaattatcaagcgcaacagacttgtagtgtcttgttagtgttaagccgtattagccatgatctatggctgttttgttttttctttttggttgaaaggacccccatttgatgctttggctaattgcagatggaggcaacacttgatgccctgaaagaattattaagtgcaacagagatgtctttttttccttttccgagttaccttttccgatttagtaccaaaagaactagaaagcatttttcaaatatagcaaccaagggatgtttgcagagtttggaacaagcaactgcaacaaccataagcaagctttaatttttttaattggctgtgaggaaagttgcttttctaaaactaacatatagtgccagagagcactagataatttactaattggatgaggttagattatattctaagaaaagtgatacatgagaggtagatttgctcttgtatatagcctctgaagtctgaaccacacatcattgggtggggagaaaacatgaagtttggcaattcaataaaaggaatcgtatatgacttatgaccttgagttgaaatttggaaatgaaaagttttccttgagttgtatttgatttagtggaaaatttctagcagtacagaattttctttgagttgattatatctaaggcggaaaaatttctagcagtgctaacttgtactcaaaaaataaatcttgaactcttcagctactctagacttgaatgaaatttccagaattccaatggattgttgtgagatgttgacaatagtatagcaacattctgctctccaacaataactgttgcctacgacttccacttgttgcacggatttcaatagcgcaagtctttcatcatgcatactttagataactgtttcaagagatatgttaatccccatgaaagatacatagtgtgttcttatttttccccttggaagttatgagagttgcccatgcctctaataagctactagaagtatatttaggtttctctagttagggagcatcagctggacaaaacaaatattttgtataagaaaccactttaaatcagaatgttccttttctagttttgtgaacatattggcccacatgaaacagagagatgattagtttttggtgtactatttctctttgtatttaatttctttattagatgtaagttagagattcatcattgttatgtcaataatttttttatatcctattgtttattttcttacagctctctggatactaatgtttgctgatgagaaagactaacatttttccttgcccagg

SEQ ID NO: 6925 - DNA, 1227 bp, Populus trichocarpa
  Intron number 11 from transcript POPTR_0008s05280.1 (locus POPTR_0008s05280) derived from phytozome v7.0 (chr-ID sca ffold_8; pos 3061513 to 3062739 reverse strand)
aacgactcaatgtaagctgaaggtagaatgaattgccctgggtcttcattccttgtttctgataaggaaatcacagaagacttactcttcaagaaacccaaggactactcgcaagcacacgtgcacatacacaaaatcttttactctgtgcatgtgcaatcgcatgtggtctctatcatttatatttgaaaattcaatttctgagcatgaagttatttgcttcagattttttgtttctttttgcaaattggatgactagaaatgtttaacttcatttctatgtttgtctgtaattacccatgcctgctgttgtctgaatgatctgatgataacagtagtcttttgaaggccctttttcctaggtgccataaggataacaataatatatattatgctgatatcttcagtttccagtaactctgctaatcatggcacaccctctttctaaatcttcaactcaattcttaggggttcctaaatcaaagttcaaacatattacataaaacaccaaactcatcatcatgtggcaagaaataatttactgattagtaaagacttaatacatttttacatgctggagatgtgcatgggcttcatccaggcattgggaaacatcagtcaaaacctaaaggcctagccaaaactaatgaggtgattcaaatttagacctcagcaatcctaactagaaattgaagttctggctaagctgttggttactcaactcattcataccctacgttgttcctggttattctttgtagctgaagctgtagcatgtctacagtgactgctgtttcaaaaacttgtcatgtataacacatgcattaagaaataggttttgattggactaaatgtacctaccttcctttgcaagacagttttaaccaactttcattttttttggacagcattatatgtgatggcgccaaaatttgacctgattatgttcacatatccaactgcatttggtttgcctagcttttggcagtgacacatcttcagtattgtacattgtaatttatgcttatcacattaaattgcatagcatttatccttgttcatttcatgttggtggtgttggtatttaattgctgatatgtgttgcaccggttcatagagtttataggcacaaacatatctttccatgaactgctgattaattatggtttctttattattgatttggcttctttctgaatctaacctgttccttgcagctcttggaga

SEQ ID NO: 6926 - DNA, 944 bp, Populus trichocarpa
  Intron number 14 from transcript POPTR_0002s14400.1 (locus POPTR_0002s14400) derived from phytozome v7.0 (chr-ID sca ffold_2; pos 10667476 to 10668419)
gagaggttaggaactgtgtttttttttttttatgcttagaatttgtgctcctccttttgtcttaagcattaatagctttaactggatccatgaatgtttgacaagcttaccacctgagatgttcagaagatatttgacataattttgtttaaaatgatggaaacttgatacatgaagatttggcaagggttccatctaagatatttagattaaaattcacatcaaaattagtttctttgatgtggtggaattttttaaattttgttattaacctttgttttcaatccataaacatatttgcagtagaagtagcaattggtgataagtcagtgcaatagtgtcagggagctggagttttgggcacacatacatgcccatctctttattgcaaataatataaatcatagcacatctgattcttctttcattttattttcaaccatggattgcaactatgaacattctctggattttatattgtctcatgtgaatgcatcagatatctcttaacttttttcaaggatgtttagtgctccaattaatagtctgtattttgactaccctcttaaagaaataaaattaaggtgatcgaggacattttgagctggtgttccatgttcaggtaaaacttttaatttgtatgttaccactacactcttggcaccaccatctctgcatctgcttctcactgggaccattgtacctccagctccctgatcccattgcattgtcttatcaatacattactgcttctgtttcaaatttgtttgtccattgaagtatgacatttttatatcataatctgatcataactgcaactagattaggggctaaactagtttgtcaaactaattaatagtctcaacagcctttgtagttttgttctctaaccttgtgtcatcattgcagtcaaatagcattaacattcaacaggctgggcagca

SEQ ID NO: 6927 - DNA, 925 bp, Populus trichocarpa
  Intron number 7 from transcript POPTR_0002s22970.1 (locus POPTR_0002s22970) derived from phytozome v7.0 (chr-ID scaf fold_2; pos 20235487 to 20236411)
aggcagaatttttggcagaatactgctctgcatcagtaagatccattgtgaaacttttatttcataatgttttccttccacattgttcaaatatgattctttgtgaggaaattaaactatatggacatgttttctatgtgggtcttgaaaattgaatctagtagttgattcaaaaagatgtgagtatatttgattgaaagaaaatatgaatttatttgtggttaatgcaactaaactgagcatatctgtctagtagattttacaaatgatgcattctgtgccaagatctgtgcgtgtgatttctttttatgactttccaaatgcacttttactgcttgcaatttgtatactgaaggagattgacagacagctgtgaattctatttctatctaggtcatgaattctgttcaggattgattccaggctttcccgcatgtctgtactgtcctagatttgttgaccttcaacctatttttgaagttatcttttaaaagcgtcatatacacattctgtggatttttatttcttttggaaagaaatcaaggtaactacaagatgtgtgaattaggtgtttaagaaacagatctaatgatttgttgaaaagctgatgatgcagctaacctgtagggtttgagattatattttcaatgctacatgctttataatttagtcctcttgactttcttgatgcaattttagtacttagaagtaggagaaattgacaggtatttttgaatgttccgtatcaatgaatgcttgttactattgattcttgcatgttttaccctcctgctactatgaagctacccactacttgctcttgccttgttttatcaatgctcatggtagatgtttatttgatgacttagactggaaatgttgcaatttagggaaaaccgtggcctgcttctgtgtggaagttcta

SEQ ID NO: 6928 - DNA, 2062 bp, Populus trichocarpa
  Intron number 1 from transcript POPTR_0006s19690.1 (locus POPTR_0006s19690) derived from phytozome v7.0 (chr-ID scaf fold_6; pos 18709568 to 18711629 reverse strand)
gaggtcagtttaactagctaaattatactcttccttgaatgtaccttgtatgctttctttgctatcatcttgacatgatgaaccggtttcaattgaagtacacagcataaattaagctatccttgctaggaaacgagaaagaaaagtgttaattgggatcaaatcaattgtgatttctactacatttttcaaattaattccatagcttgatatggttgactttaagcagaagtatccttcaaggattcgattgtcttcctttttgttatggaaacgagttcaaaaaaaaaaaaagatgcaagcaagtagcagtcaaaaccattttcaactattccatgaagctaattaattagtcgccctatctcaccatttatgatttggggatctttaataattatttgttgatgttattttgaataataatgccttaatgatgagccaaaatatttgtgcctctcaataaatgaaggaaacgtgcatgccaaagtatagtcccactcgtgcctaacctcttgtacgtgacgacatgcccagtagtcagtcaacaacacataacacactctgccctgggccttaatacccgcccccattctatcagtatttttgcatgctgaaatttactaatgtcattattagccagtactgaaaggaaaaacgactgtataggtacaacaaaaacccaaaaaaaaaaagccaaatgggctctcgtgatctctctgtctgtgtctttttagggtttggttttatcccacctttagaacagccccagtatctcaaaagggccaagcaccatgagtttttcagtcactttctttcgatttttcttcctctcttttttgtgattcatagtgtaagcaaaacaaaacaccccccccccccccttcggggcccaaaaaaggcaccataaagtgaaccaacttttttatgtcgtcgtcaatggtttccatattattattattgttatccaagaaaaaggatgcttccctctctctttttctctggtgttttgtcttgcttgtttgagttgacctcgatcggtcagagaaggaataaaaagtagtggaagatagaaacttgtggcaactatgagtctgtgtaacttctttctttgaagcacgcgcattcagaagaagaaaatggtcatcatgatgatgatgatgatgatgatgatgacgacctacaaatggaggaggaatttgaaaattctcagatcaagacaaagcactacaaagaaagaacagcaacaataaaaaccgtattctctgaatatttaatttttttttactaaaaattaaatttttttatatgttttgtattgtatacgttaattttaaaaataatttttaaaaataaaaaaacattattttaatatattttagcataaaaaatattttaaaaaacaattataattagactctctgcaacataacctgaaacatgcattataacaaaatgaagtgataattcttagcacttttttttttttatccattgtctaattaattaactataacagtgaaatttactttatcaacaatttctcgaataaaaataaaataataaattactgatgttgtttgtgaaaagattgaagtgatatcatgtaatcgaatatcacttggaaaatgcatttcaacaactaataaagtgacatttgaacttaccgaaatttgttcaattattgacattttagaataaagagtactactgggaatttttgctctgtaatttgtaggttaaaattccctttatatataatgttttttaaaagtaaatttattttgaaaaaaatattaaattaatatttgtttatgattttgatatgttgacattaaaaattaaaaaaaaatccattttattgtttttcctcttttatttcttaattttacccaatttttgtgaaaaattcgtacatatgcctaagtaattttaaattccttctggtcaatattttcatgtctaacttcaacttccaatatttaagtatgggaaaaataattaatcacacgggtctcgatatttaatcatgtgtgtgcaggaccaggttgttcatcagtggcat

SEQ ID NO: 6929 - DNA, 3617 bp, Populus trichocarpa
  Intron number 1 from transcript POPTR_0006s24980.1 (locus POPTR_0006s24980) derived from phytozome v7.0 (chr-ID scaf fold_6; pos 23457702 to 23461318 reverse strand)
atcctgatttctcttacttcttcaaggtccactctctttctcctatcaatattcttaacacttaaattaacatatgttagggtttcttactgtatctgcttcttcagattcttgtttagtttgtctttttgtgtgtggttttatctgcttcctctttttctaatgtgaataattagcataatcagcggttattttcggttttcgattctttacttcaaatcctatactctttactgttcttaagttttgtgtttttggtgcatttttgtgtattttagtggttattattatgtctggttgttatttaaatctgtattgtttttcattttacttaaattgatgtttgttttttgttactttattttacttttttacttgttttttgatatccacctggtatcagagcctttttagccatgggttagggatggaatgtgagtctagttcaatttgttttggtttttgaaacgggtggatctaagctcataggagtggtcccggtagcaagtccgagaatgcagtgaacccgttggtttagctcttatcttgtaggagatcatgttagggtagcccaaacgaaacaacaagatgtactcgtactttagagcttcttcttcccccgcctgtaatatcaccggcaatagagtaatcaaccaagaagaaataaatactgagaattttagcaaagccatttgacaattgagaaattccaaaaattgctcaaaaagaaatctacgaccatagcagtttcaatttctttgacaaaatggattgcaccatcaaaactgaggaacatgatattactctgttcaatgattatgtaaccattagaattttgtctcaaagttctataaaccatcatagtaagaaatataacttcatctatgtaggatttatttcaagctggtgttaaggacttgatattgcaattcttatggttcttagtaggttcctagaattcaatgattctttgttagtaaccatagagtccagtcttttacagtggaccaatatattttagatgtgttgaccctacaaatcacgactcacaattacaaaattcagagtggattcttacctcttttgttagtctggcatgctgatatttgatactagtacaataccaaccaatttttctatataaggaagcattcacttcccaaatctcaagagcacattaggagaaaattccattctcttctaatctctcaaaactcggaacctcattttatcaaatttggtactatattcgtaagtgttcaatcctgtgttcaaaatcaatttgtttgttttttatttcaacttaatttcaattgcatatatttgcttccagtggcctgctctgttgcccaattctttttctattttcttcaatcgcatagatttgcatgtagtggctggcgctgccacccagattttattcgtttgtgttaactttcatcaatttattttctttgtttgctttattatctgatatcaaagctcggttggaatgggcatcattaagttgtaagacctgaacatcagtgggtagcctaagtcataagacctagtgggcccccatataggacatccaaagtgagagacgttacctgattggttctgggctaaaaggattaagaagtgccttcactgccagctatagcttttagcaaaatggtgacgttgtccaattggtatcagagccactagggttcaagtcttgcttgggaggaatgtgcagcattaagttgtaagacctgaatcaccaatagataggctaagttgtaagacctggtgggccctcccacatacctaagagaccttactaggtggatgataaagtaacaaagaaaataaattgatgaaaattaaagcaaaccaataaaaattaggcagcaaggccatccattagatgagaatgtatgtaattaaagaaaataagggatgcaattggatgtaattatgcaattgaaatcaatcttggtacaagaattctacatagaaaaaaatactgtaacattactgttgagggttgtttgttattgtagaagtacttgaacatcaaaaaatttgtcttctagtgcccagaaaaattttcttttttactgaaaatgatgatttaatgggaccaaaacttctgcatctaattcacaatttgtaaatgggtcattagattcatgtgaagaattggagacaaaatctgccaagatatcttgcataatctaaaaatattattctttgaattttgtggcttctagcggtgcattaattgaagatttttgttggagagaatgattggttgatacttagatggttttagataattggggatttttcaaaatccatgcacagatccataaaatactaaaattatgacaaaattggagaagtcttggaaaagatactttctttggaattggttgaaatttattgccaaaagtttgttatccttctggaagaatttctaggttggttccaaatcaggaccaccattaaatgaaccaaattgggaattggatttttgttcttgattttcagtaaaacattcaagagtgcttgaaatgttgattttgaattataaaggtattaaactaggcttgttcatggtcccaacaattgaatgttgggtggctttttagcttcgtgttattttggttaaaaaaatttggtatgcttttgttcactctaaggaatgaatgggttacaaaattggaatggcctttttgtgtattgtgtttgattttgactggcccaatttcgatatattttcataataatttcaagacatgcttatatctcaagctttgaaatgccagtttggagggaaaatatttttggcaaaaaatccttggattgttacggtaaaacccatgttctcttagcaaaatcttttgaaaattttgatttgaaaaatattgttgaaaattgttttgtttctgaaaattattttgaggggtttttgaagtcaccacctgaaaacagtttgaagaggggtatttgactatttggaatttaaaaccatcacaccctttggattttgaaagattttgataaactgattttgattcatcaagttcaagattacttgtcttgatagaaatttgtttctcatgccatgaggaatcttcttttgttttagcaaaagaagacactaattattggattaacaattgggcttttaacagaagaacctttattgtacctatgtcaacaagtgtttgggtattatttggtatggtcgaacaagaggctgaggaactggttgaattgttaacttccggtgaggaaatttcatcttcatcagaaatcatttgagcccatgttttgacttttaatctgctatttttgtattgcgagggcataatgccccttccttcgctttgttgtttaggtggcatcaggtcatcttccttgcaaaaactagaagtttggaagggaatttgaatctcctttgcttttacatcaatctatttgggtcatacatatatattgtataatgtttagaatttttatggttttttgtttctattttctgttccttctgttattgaatatagtcactagtgagatctgctaggttgtttgttgatttatatatttatttatatgttttgcttgttggagatgtagattaa

SEQ ID NO: 6930 - DNA, 443 bp, Populus trichocarpa
  Intron number 2 from transcript POPTR_0001s43320.2 (locus POPTR_0001s43320) derived from phytozome v7.0 (chr-ID scaf fold_1; pos 43363017 to 43363459)
gttatcttgtcaagacagaagagggcttttacgtactgactttttcttggattttttggattcgattcttctctatttgatcttccttgttcaatgttttgattgtctagttttctgctcatatatgttttttgtgatgctaaggtgattgccaaggggttctgattcgtagttacttttaattgccttttgttcttcaaaaagcttagcttgtcacgtgtttccacgtttgcgattcatattctataaattcaacaatcatatgtaatatgaaggaatcatgtcccctgtaaaaaactttgcatatacttggcaattggcataaagttgtcagatactagcatgtcccccttgtgattttcatgttttattggagaatttagaaaattggaatgcttctggtttttaagtggttatcgagttcctgagggtttgctttgcag

SEQ ID NO: 6931 - DNA, 1102 bp, Populus trichocarpa
  Intron number 13 from transcript POPTR_0006s07780.1 (locus POPTR_0006s07780) derived from phytozome v7.0 (chr-ID sca ffold_6; pos 5697141 to 5698242)
attccctacttggaaaggtttgtcaaataacaattccttgttcttctttatgtttttggccatgtgacaaggggcattcatgttattatctcaatgtgattgttttttgcttactaggagcatatctacattctgtaactgcttagctgcatctgttctaatgacaatacattgaaatttactccatagacataatgataggccccacacttgtctggtttggccactttctttctcttagaatggtgcccgccacattctatctggataaatttacttctagatgcttaggttccttgttaatcaatttaagttgattttcttcttctttttgaagttgtatgctggtgacagaaaggcactaatttttttattatgtaaacccatactgcccaagcacaaagtttggtacagacttgtaaaatgaaatctgagccaaaactttttttgttggattgtgtacatgaaatctgagccaaccattgttatcctatcgtaagacttgtttgctgtctctgaaatctgtttcaattccttgagcttgtgctcatgtgattctgtcaggcccacatttttgtgctgggtgctctagcatttccttcactagattgggaactattattctaccaaaagatctaaatcatgaagatgaggtttgttgaagtggttgttcgggttaaatatcagttgtttctaaatttttaaaggcatcgtaggcagttagagttaagttggagttttaactggagtcctaatgaacatagggattaaaaaattcagaatatagttgaagttggaagacacatcatttcgatggatttcctgcttaagctagatgttttcaattttttattgttgtcaaggataaaagtgtatctatgagacccaacaaagtgtttttttttccttagacattagccttcccttcatgtcaattttgtagttgatacttggatgcattgtgtttgcagtttaaagctaccatgtatgacagcttatctaactactgaaaacaattggcttcatcatatggttttaattactgtgacatttggaacatattgcagcttattgtctgggctccaacaagagaaaaggcaat

SEQ ID NO: 6932 - DNA, 1026 bp, Populus trichocarpa
  Intron number 2 from transcript POPTR_0003s12190.1 (locus POPTR_0003s12190) derived from phytozome v7.0 (chr-ID scaf fold_3; pos 12856086 to 12857111 reverse strand)
agatattggaatcatattccaacagaggaatctaggtgtgattactgaaacttttgctggaattttgattagaattgcaaaatggtcagtttttcattatttatttgttagacatggctggtcaagtccaagttgatcggggcattttcttgtcgaacttcttcaaagaggttttttaagtatctttcattcttcaaagatttctagtccatgatgtgtgagaatttggaatccagcaactatttgtagttgtgtaccatatgagcttggaggtaatttgattggatcttcaaggggtaagtgagttttggattatgtcaagagtttttataacttccatttcctggcatcaggaatttttttttaatgtagaagtagattcttttgaccctgagcgtgaaaccaataatgtgactggggagcataatttgataatgtaatttacagaattatatccctgaagccccaagttattgaacaacttgtcactaacgaacctgctctggttgcctagctgcccccatccccaagaatcctcttcttttttctcctccatagaatatggtcaacgaggaaggaccctggacctaagttaatatttctgcattccttcttgaaacaattaattggcatacacggctgagacctgcatctgatttggcagattggataattgtatcgcacctttcttagctatgcatgattttgcagtttgtttgtgtgtgtgtggatgataattccacgatccaataatgtttttatccttctcgtagccactgcttcttcactttgcatccatattatgattaaaggattctaatatctttgtttctgtcgacactttgcatccatattatgctttttataagtgggttgatgttaattggattggttgtttctatgtttgtgatcaaattggtgattatttcccatatagatgtagtcaaaatagcactggaattgatccaaagttcctttgtttttcttgtaggttcaactcagttgcatatcttcagcaaatctggt

SEQ ID NO: 6933 - DNA, 1413 bp, Populus trichocarpa
  Intron number 1 from transcript POPTR_0016s01160.1 (locus POPTR_0016s01160) derived from phytozome v7.0 (chr-ID scaf fold_16; pos 479922 to 481334 reverse strand)
tttcgttatttgattttcggagcccatcaaaaaaggtacttttttgttattctttttgttgactattaatttttatgtttaatttctttgtgctttattaatttgtagttagttgcttgaagaaatatgggctcttcgttttttgttaaatttccatctggggtctcaataaaattcaaaaacatggtgaaagattgcattctttttatcattacatgatctgtaatttgttaaaatgttgtttttttgggttcaaaatggtttaatccttaatgggtttttgtttaaacttaaggagatcatgtttacagcttagttttccatcgttttttcttctaatgactgcttttgttgactatgaacatcactgcataaaaatgttgactttatgtgcagcttgtagtgcttgttgtttacaatttgacaggattggaaagcattacggcgcttgtctgtgtagtgttctacattgagatgctcagaatgtactgtgaattaagacaatgattgaagttttctttgttgattgtgtcgaatttttgttggattttatgtgatgcttgagttaggctatgtgtgtcttgcttgatgtgtagatataggccgctgtagtctagaggtttactttccttcttgctctatattttggatcataggcttgtctagtttgcataattgtatgtttgaggatgcctttcagctttatattgtatatcatggcaatttggtttgtttgtgttagtgttgtatttatgactttagatgaatggaaacaactagtttttatagagtgatagacagtgcatataattctttggctatttgggaaaacatagggtagaagagaagtaggtacgaggaagcagtaacctttgagtgataagttacaggagcggcatccagatttcggtggggaagtatattaatgctagcgcaactagtccagaaaaaagacagtaattttctttttttatttgaattgttttttactcatcctcttctgatctccaattgtcatatccatgactattatgatgtttcgagatcataatctgttaagtcgatgtaaatttattgggtagagtgcaggaaggatctggccaccattgtgcagtcctgtggtgagtttagaagcgtgaaacaggagatgagctgaagttaggttaatatagggggagaaaggctgcttctagggtcaaacaaaagggatgaggccaatagagttagcttaatgttaggggagaaagggttgctttaaaatttttaagcttctgtttatattgcacttgatctcttcttctctttagtttctgtctacagtggttacattctgtcaagctatggaaaattagatgctgatgctttattgatattgcagggaccgtaatcctcattttgaagagaaatactgga

SEQ ID NO: 6934 - DNA, 1899 bp, Populus trichocarpa
  Intron number 30 from transcript POPTR_0011s09250.1 (locus POPTR_0011s09250) derived from phytozome v7.0 (chr-ID sca ffold_11; pos 11453768 to 11455666 reverse strand)
taagttgtctgagccaactaacatcattctcccaggtgtgtagtctcttttgggaaagaatggggaatatgattttgcatttacttgctaaatagcgagcactttttttttactgtagatgagctgtataaattggactagctgatcttatcacttattcatgcgcccccccccccccgcgaactcttcagtggtgttgttttctgtattcttgtagatcaaaatgctgcaaatttctgtccaaatgttatgttaccttaaaaacattaaatagaaatgaaggtgggtaatattatcgttcacaagatttatattatctcagtttccctgttttttgtgtagatgaagagaagccttgaaaggtaaattagaaaatcatgggagggagtgtcctagatttatgagctcttttgatttctttactattcctgaacaactacctctagtcagcaggatctagcctatcattcacaagatttatattatcttagtttccctgttttttgtgtagatgaagagaagccttgaaaggtaaaatagaaattcatgggagggagtgtcctagatttatgatactgtgctctttttgatttcttaaacaaagttacgtggaattgaataaagaagttactattcctgaacaactacctctagtcagcaggctctagcctttgccttgtgctctaattatctcattctacaactcacaattttaggtgagttctgttgatgaatatatcttctgtgaaaccaaaccatactctgtatggattcaattcagtcaacctgaagtccaaactagctgggaatgttgggggaggtgtggaaaaggatagaagcatgagattgtactttgatctaaattaggcagtgtaagattgtatccttttttgggttgtgttcataagttgaattgggaaatgggagattgctttttattagaaatttggattttgtccttattttaatgggaaaatcgttgatggcatttactaggattttgattcctatttattcgagtttagggttttcattagagtgctataaatacttgcatgatgatccctgtaaaatggatccacaacgaaatctttccttttactttttcaacttttttcccttgttttccaagaatctgatgtaactcagaaaccttcaaactttgctcttgttgcttgcaagatcgtcatgtactcaagtggttgaatttcctcatgacaatcaagattgtcattatcattgttcaaaaacttttgtagtaactcttgcaaaggttttgaagctagacctgccttccgagtagatttatgtttacatcaaattattatttcaacctagtcaataagactaattctcgagaaactagagctcatgaaattagaaagacaattggctttactatgttaaaaagcaggattagtaatgttaccaccaaaagtttttgaacaaccatgaaaaaattgtcctaatttcttgagctttggtttctcatgaactagcttttttggctagttagagtaataaatttatctagacataagtctatctagaatacaggtctggctcctaaacccttgcaagaatgatccatgtgcgtagccattcctctttccaaattcttatcgaagctcttacttgcaaggtaattttgttgaacatggcatatagtacttgtttgcagacagatgtgaccttatatatctgtcccccttctttgattctttgctttccttgctgcattacattcttctcttccaccctgttgctattattgatacagttgctgaacattatatatgctatgctctattgtatactgcgttgtggctacatctccttgggagcatcatgcaaattaaactatatttcttatttgtcccagagcttccacaagtggaa

SEQ ID NO: 6935 - DNA, 1136 bp, Populus trichocarpa
  Intron number 3 from transcript POPTR_0006s25200.1 (locus POPTR_0006s25200) derived from phytozome v7.0 (chr-ID scaf fold_6; pos 23619217 to 23620352)
ctgttatttttactttcgggtcttatcgtcttggggtatatgttttcttgtgctttatgatcactttatctgtttcctcctctttttgtagttatttctgcacagttgtatgaatgcttgaatatatttgttgcttttggattgccaatttgtagtttttagctcaataggaaattgcaataagattagcagatcggaaaatgaaatggtgatcttttatgtttgttaatgtatggaagcggtaatgaacctaggaaaattgttttcttgctaattcaatgattcaatatgatgttatacttatagctttaagctggcctattattccaagcacgaacctgatgtggaacaatgataaaaaagaattaaagcaggaaagagagaagctttagagaaagaagctaagaattaaaagcaaataaagagaataaaaagccagaaaagggaagaatgggagttagaaaagtatgcaactctgcaattttcattcaattcatcaaaaactccctaacatttagaaaagtatgatatttataaatactaaaaccctaactagaacaagcaattgggcttatagcctactaaataaaatactcaacaataattaaatcaagcccaacaaataaagtctaattaataatctcaactaaaagttaaaataaattaaaccaaaacataagctaaagcccaatctctcaatggtgtgggctaccctccatcgtctatgatcatacgagtgcgtaaacaatggctcgggtctggtgtccccactagaacctttcatagtcttgcttgagccacctggctgcaagtgtgtccttagaaaatacctaaagcagtggctgtgtgcccaactgctttgtcctgcttcacttaaatccttggggttttagttgcaaccaacactcattctgtgctgttatagtttagttctagctaatattgtggtgaaaggatactgctggcttgtctgcccagatgaaacaaagtgggctttttaaaaatcattcaaaagtacactagaattgttaggctgttgtttctgaatatgatgtaatcttatgtttttgttactttagtgatctaattacattttctgttgcatttatggcaatgattactgttttaacaggtgc

SEQ ID NO: 6936 - DNA, 1105 bp, Populus trichocarpa
  Intron number 9 from transcript POPTR_0003s05530.1 (locus POPTR_0003s05530) derived from phytozome v7.0 (chr-ID scaf fold_3; pos 6836595 to 6837699 reverse strand)
aggtttatatttcttgctcatcattttatttaatttgctgctcttgcttgtttaagattttggttatgtcatgcatccacgacattaattgatctagagattatggtttaacatagcaggaagagcacttgttctttttatttcttattttgccttttgtagtgttttattctcttcctttattctttgtggttaattatttgtaccatctaattttatgaaagaactctttatggtgtcctaaagacgtgtctttgaaatgaaaagtttcaaatagtgtgaactaatgttccaatttccaggtttaattctgcaattaggtaatgttattgatgtgtaataaaaggaaatgcagggttggatttacataggtaaagcatgcttctcaatctctagtccgcagtggcaattatttaaaacatgtttggcactgatggtcaatcatcggctcatagtgggttgataattggcatgcattaatggtttaaggttgaagttcatcagcatctggtctattagcagaagtggtctaaactgatgagcaacatttgcatgtgttactcaatatagtcctgtatgttctagaagaatgaaattctaacaattgagttattgttaaatgtccatatgacgagctgtctgacattttgttgcatgcgactaaaatactgtacttattgatgtcatactatcatatcacttgtgtggaagatctgccttagcttaaactgtacagatatgttcattaatgtttaagcaactacagaagcttatgaacaacaaaagcatctgttaattgaagaattccatgggtagttcactggtcaatgaaatgaatcatgtggttcgggaatcattcatacctcttgtgaacaggaacactgacatgcacttttcagctaaccagactactcacccaggcctgcatcctccccatatatatatatatatatatatatatatatataatcattatataggccctggtggtattttaatgattagggaagggctcatgttcttctgctggaagtttctcttgaaatttgttattatatcttgtggagcagacagttgaggaacctcctgtggtatcactaaataa

SEQ ID NO: 6937 - DNA, 3659 bp, Populus trichocarpa
  Intron number 1 from transcript POPTR_0007s03970.2 (locus POPTR_0007s03970) derived from phytozome v7.0 (chr-ID scaf fold_7; pos 2369578 to 2373236 reverse strand)
gttttctctctttaatttccatgtaagtactctcttcttctatcttttatgaagtttctctctttatatgcttctgttttctagttttttagggttttgtgttaattcttcttagtggttttttcttaagttttgattttgagctgatattgtagagaagtttatgaacctaatgattagggttcgtttagggtttattgccattctgatgctttaatttgggttttctctgtttatttcattgattacatttttggggttgtttctagctcatgggttttgatattttttagtctttctatgcaaaagcttgatttttttgagtctctctttggaaaagcttaaaacttttcatttactgtaaactttaattggtttttggattctgattttatagatttgaaaagcaaatgttttacttgtttacggactaagcatgcttctgaggggttttctttgcctggggctcaaaatttttagtaaggaaaattttgggttttaagtgtagattgggacttgataggattttcaatttcaagtaaataggtttgtatcgatgatagagaacagtggtttttgttttatggagtattgatgtggaagttagtgtataaggttgtttaggattcatttgtacagatgtatgtaagaaataaattttcaacacttgagtaaacaactgctagaatctatttctttagaaatttttttcttccaagttcttaaattagtttagataattgtatagtcaaactttagggatgctgcatggcgattaaactttaataatgacttagcaatgctttttctctctgcaatgaattgggaagagtgcttcattcgtgaatttattctgtgattttcatgttttattagtcacagccaataatttaatgtaattcatatatctattgttcaactttgctttctattctaatttttgcacaatgaatcatctgatatgattgttgaatgatttacaggatttgattgttgtgttaaatatgcatctaattaacatctggtgcgtgcttagtgtacctattatgacatcagtgctatattcagtatagttaggtactaaaatcagatgatacatccttttccttcagtctttaggttctatccttttttctaggctaactgcgtacacactagcagaccgctactagggtatcatacccatatgtgctctagttctatgtatctccatagaaaacatttacctgattgctaatatcagatataatgtttatgcagtaactcacgaggtcaatgcgtggagggatttccaaattgttcaaaagtaactgatgcaattagttttgtaatggatttcaatccttccacaagtgcaacattgaattttagcaaaaattaatggatcttggtcgatttgtttgattggagaccattcaaaagggtttgagatagcattgtaaattttcatcatagttcaagagttcgtcaaagaatccatctacaaaagtaataatctttgatgtcttgaggtccgatgtccattgatgttgtgtcgtgcagaaggattaagggaattaaagttgtaaccttgttatccatatgcaagctactgtgctaaattgatggttagtgatccatcactgatcatcagcaaggccacatttgattgtggcaaatgttgagtgcaacatcaatgtcatatttttattagctgtaaaggtgtaaagagcttgcaatttacacgacatgatatttctatatataaagctgtttgtttgtaggtgatttgccacatggcaaacaggaggttttttctttcttttctctctctctatacattatgtgatgatatgagatgtttcgatcatcaattatttgttgtttcagaaaaatggctcatgcttttatgttcctgaacttcctattttatatataaactgacatgttcagtccatgcaatgttatcttgttacagctttataagatctttttttttaatagaggaaatctatgaatcatatttctgatgactctagagcgctattgtaaagctgattaaaattgcgcgatcatagttgtctatatcacttatgagatttagccaatctttgaacaaatgacaaatcgaaaggatgatgttttgacagtaagaaatatctatcctatcaaaatcctgtgggatgtaatttgggatgcatatcctctccttcatgggatatggcctggttgcattcaagtggagtccatcttatgtttgcaaatgcaggggtgagcacccatttcaaacctgcatgctaaggcccaaacaaactcaactcccctccaaaaaaataaaatagtgcacatgttgcttgatcccattcttatttgagcaaggtagtgactgttttttagcaaattcttaaatgattttcaatgctgttggttagattgttctaactctgtggatgtatatgaattagtggaagctgtatagaatgttgagtggcattaattaaaggaacttctttcgttgtttatttatgtgtgtaatgggtgggtttgctattttattaatgccacccactcttctttttttgctctgtttataatattcttgtaatttgtttgtgtttgggttcaaaaggaaatatatttgattgagactactttcttgacgtgttgggagtattgatttttgaacctgcatgtgaaatggaaaatcttgttaggattcactcgctttatattccttttcttttatctgtggggtgtttagtttatgttatttttcttttatttttgaggagcgtttagtttgtccagttagtccaaaaacaaaaaaaatccaatagatttttcacttgaacttaataaaaccaggtttcaatcaaactagcaaactattcaatagaaatgttgatctcaattgaattagggaactagggtatgttatgatcgaatgttttgggagttattggaatatgtttgggatccactaagtaattaggaaatttgaattttgaagctaataatatgattttagagatcagataagatatgggaggttggtttgtttgttttttttttatcatcatcatcatcatcatcatcatcgttgttttctcttttaatcatcatcgttgttttctcttttaagttcttgtagtttgctgaatcaataagatatggattaaggagttgtcatattcctctccttttggttaagttatgtgagatttgtttaattttacttgctggaagtgaggtcaattattgcattctcctctgattttgtgtatttaaaaagaagggcaggggatgagggttaagctatgtgctttttacgactatagctattctatttgctttttacgactatatctattctattaatgtttcgatagcatggaattattcaatatgttagccacatctcaattatataaaacatgaatcctgtttaaattaatatgctccttctctgttcattggtcaggttgttaacttttatagcatgatattattagtttttgttagctacatctacaatttgaaatatggatcctgctagtgattggatattttcatgcaacttgagaaaaaaaaagaagagaaagtaaatagacaaggatatattcaatatcatcaagatttatggacctgtggttttccctgctcccagatactccagttga

SEQ ID NO: 6938 - DNA, 1488 bp, Populus trichocarpa
  Intron number 5 from transcript POPTR_1151s00200.1 (locus POPTR_1151s00200) derived from phytozome v7.0 (chr-ID scaf fold_1151; pos 3870 to 5357 reverse strand)
tgaaggtatttagactccaaacactgaacatattattttttatttgcttttttaaaaatccaatacagttttcttatatgcataaaactatataaaggattcttttcggacttcatagttactaaagcaactcctctttcaattgttttatcattatattcttttcttgattataatgttgaggtaccctctggatgctattgttatcaagtatttttaccatcaacacatttgactgtgttaaactgtcaatctttcatttgtctcgagggtctgattaaatttcttagatactgctatttagccttctgtttgatgaattgtgaacttttatgtttctcctcggcatgctcctgtaatggaaactagcggcactcaatgggcaagtaatatgactgcagagatagtttaaaccagaagaaaaacttcatatctaactgatatgcatgagttatcaaactcccaaaagagccatgaatatttgttttattctctcatgatacaacgatataaaatcttgtatccgctctatcaccagaatcaatgaaggtatacaggtagtcaacattctcaggatgtgttcctccacctcctcttcttagttgaccacttgcattttatactcgtgcaaatctcaagttgttacaattttcactctaaaagtgatgcaggcgaaagttaatagaacaataatagcacagaaaacataaaaatcttaatgagcaaaaagggtcgcaaatataaatcctaatttcacaattttattctttaaaaattagctgctttctcaataaatttacaagtccttagtataagctaggaaaacctatatctaccaggaaacaatctattgtcagaaaacattaggaaaactaaaacaaaatccaaaataataacgataaatctagaaaatccggggaaaaaatcaaaattgttccaagtagtaatttatgagcctaattctaaaaaattcaacgattcaataagcggtagagtagctttctgtagaaatactgtctatagaatctcctaaaaaaacttaagctcgattcaatagtcaaatattctgttatctcagttttaagatggtaacctagtctaccataactaggttttttctcttatgttaagccatctacatagtgactatgttagatcttcatctagcagtgtcaagtcctcacttgaatgctcagaaccttcacttgaatgctcagaactttcggtttgtataacccggctgcatcaagaagattaatgctagtttaatggatacttcattgaacaaagcgattggctgagataaacagaataaaaaataacttagtggacaaaatgtaacacactgactaaaactttttaagatgttgctattatatctcatccttttatgattaaaattgtgttcatatgattggtgagcatctttcatctactaactcagtttcatagatttgacaagttaccttcaatattgtgctctttcag

SEQ ID NO: 6939 - DNA, 1367 bp, Populus trichocarpa
  Intron number 4 from transcript POPTR_0016s14470.1 (locus POPTR_0016s14470) derived from phytozome v7.0 (chr-ID scaf fold_16; pos 13663016 to 13664382 reverse strand)
tgtgtgctctgggctccttcacgtaacccaacaaggtacttgctttgacatcaccttcacttttgttgttttctacttttgggacttgatgttgtgaatacatgggctcatttggccttttgcaattcaagcagggccttggtctttttcatgttgttagggatattggtattgctactatcattctgaatttgaatccatgctgcttcatgaacttgaaactggtatttttgtagattggagttgtaataattcataagcatatcattctggcaagttgatgctaagtctgatatttgtttttgttgttatctggtaactgttaaactctgcatactcaatgcaatattgtttttcattttttacttcttgcttactttatcactccatttatacagttttttcataacaaagaagtctaaagtaagatttatgtattttatgggtggtggaactgtggaaggctcataattctcataaatctagacagaagatgaattcaataattagagtgagtctgtggacgcctttaattttaataaatctagaccgaaagtttacagtgagtctgctgttgcatcagatgccatgttctgctatctaagttctggaggtaagttctggcttcaagaggcaatcatgggcagtatgttctccttttggaaaacgatagtactgtctcctacactaaactttttttttgttgttctccagtgaatgttaaatctctgcatgcttcttgccctttttttctttaatttttttttcttctttctcactttatctctccatttatacagttttcataataaagaagactaaagttagattcatgtattttatgggtggtagaaggcccttaattttcataaatatagacagaagatgaattcaatgattaaattgagtctttggaagccttgtgattttcatagacctggacagaagatgaattcaacaactaggtaagtctgctgttgcttgagataccatgccaggatagtactcctatctaatttttgggaagttctggcttcaagaggtaatcatgggcagtatattctccttttggaaaataaaactaaggctcctgcactaaaatatgttgataattctgtgttatagaaatcaaaatagcagaaatcctatgcgccctccaaaaaataaataaataaataaattaccagcaagcatttttctttttccctttcttggattttttacaaggatgtttactgttatgcattgcctgtatttttgtcatttgaactgaaatagtaaaatctaatcatattaatatgttgcttcttctcataaagaaatagatatctaacatgctgctgctaatcgggcttgctcctgcagat

SEQ ID NO: 6940 - DNA, 1910 bp, Populus trichocarpa
  Intron number 10 from transcript POPTR_0019s05610.1 (locus POPTR_0019s05610) derived from phytozome v7.0 (chr-ID sca ffold_19; pos 5965235 to 5967144)
gctcaaggtactacccaatgcattctttagtgtttgaacatgactttttttttttccattctattattcccatacttttttgtcttcatgttttagcttgacattgaaatgcatatacgtaacaagaagtagtggaactgctataaagtataaatgttgatttttaatgtaagttgtttacaaggttgcacaacaaagaaagtgcttagacactacaaaacaactgagtactctcaaaaaggtatactgcattctacattacttgaactcacattattagctatagtaagcatctgtgctgacacaatgttttttgataagccttggcaagataacttaaaactggtaggaagcgaaatccaggctggatatggccaaagaattagaaacatcaccattttgtagaatttattagttattttgttgtcaaaatatgttgtattatatattagactagagcaaagatgtttagtttatcataacaagagcatacaaaacttaaaagattgtttaaggtaagcctagagtgcatacaattttaaatctatgaacatgcgaaataaagttctaagagaactatactttcaacgtaaatataataaaaatattaatagcatgcatactaagtatatatttaaacttgcaatatatataatatcaaagcctaacatgcatactaataataaaaataacaatgcctaaattaaaacagagaagggtacttacttgttgaagtactttaaagaaatggaacttttgttgttgtgaagaatgaatctttggtccttaagactttattgctccttacttgtgcaactagaatgtttgaaatatttctctcaagattctaacaccaccatcttaatttagatatatttctaaaaaaggtctttgaaccaaaataaatgaactcaaatatctctcaacaaagtatgaacctaagctctagatttgggataaaaaacaaaagcataaaagagaatgaaaactctaaaaataaggtgagaaagagtgaaaaaatatgaaaaattcatgttagaaactatttcttcatcttcttttatagtgatttttggaagctagaaggttgaagaattaataagaattaatttccagaattatcaatctttaattagccaccataaatcaagaattaaatcttaaaaaaccaagggttctttgagtaaaaaaactaaggattctttgaaattaatttctcatttacccataatttattaaaatcatgttaattaaataaatttccaatattttctgtatatgaaagagtgagatgaatctttaaatcctttttctggatgtgtcatatgggttctttcattcagttgttgtggtacattaattcaactggacccataacttgaaaccaattggaaaagcacaatgattgccattcctttgttcttcattgctagacatgtataaggctataagcccatctgaagggacctttttttagggaaagactaatattattcttgttgataattggcacaaatccacactgtacctgactttgcggtccttccaggtatcctaattttctaggtttctggtaaatctggtaaattttctatctgccaaatctatgttatgtgatacagagttgccttaaccatttcctttaacaatgacccctcttttgttggctgtacatgtggatgattgtgtatggtccatgtgtttgttttatttctttgttgaatttcgttggcatcatgaagcctattattaattggaatgatatattctaccattcatagttaaataaacaatacttaaggaaacacttctgcattaacatattcactggaattctcttgacaaattccatatgatatgtaaattgatattagttttcttgttttgtgtcaattaaacaggtgaacaga

SEQ ID NO: 6941 - DNA, 1506 bp, Populus trichocarpa
  Intron number 3 from transcript POPTR_0005s26990.2 (locus POPTR_0005s26990) derived from phytozome v7.0 (chr-ID scaf fold_5; pos 24799423 to 24800928)
agagtggacactaggtaatttctcgcgcattacttttatcttctttgctgaggatgtgaacgcagcgtaaataaattgcatcgctagtcagtttaaggagcaacctccaattgttatagtctcttgttattaattggattcacagtttatttatttattttatgaaggaattgatagatattcctggtattctttaaattatcattttagttttgtcatgaattggtttgccgatacctggtgtatccaaaaccaattatatttgtgtggaactgccactgattgtaattaaatttaaaactgtttttgtcttggaagggtgtttattgtgtgaaataaaaactggagatcaatttggtgtccatttttcaatcatgaggagatctaaaggatctgtgtgcttgcgctatgccatcgtaggaatagtactgttgattgaaggctattatttggattttcttgggaatatgtgtggggatgtttgttttagagccatgatagtgttggtagattgacctaaaaggatttgtatgattatatactttagatatggagcttttagttgtggatttattgccattgtaattattttgctcccaaattggtatttataggaaaatcgtgcacttcttgttgatacaaatcaggttgtctaaaatgatatcctcattcgaggcatactttttgatcccctgctaatcttttgagccaaagtgttttttcaaaatcctgccaaccattatgtaacaagaacttgacaatcttcttttttactttaacttagtgggcggtaaatggctgtgatttttatgatgaggattaagattttttttttgtgaaattgattagaggagaaaagcattatcatggaccccttttattctatgcaagcaaaagttgtttactgaacctgatggccctaaggattttctttcacttcttggaaatttcatattgggtagtcgaatatggttgatgtacttctcactttcattgtgcccatttcaagaaatggatggcatcatggttgattttgtgtgaaatattttgaaggtattcactggtggggtcgttgtgctctcatgatctgtagactgtagcccatttatggaagtggcatgctgcaacatctcaagcactggattgaaaaacaaaaaaatagttgtcaatcttatcttttaacaagacaaaaaaaaaaaaaaaaaaaaaccacgagttagaaacaaatatcataatttgtctcccaacatcatgcatatagttgttatttagttttctgttctttgcttaacctcagttcttcattagaaagtgaacgttcagtttaatttggtggtcactacttatgcatgtcatagctatttctagttatctgacattcttgacaagaattttgttttcgtcctcagattttgtatcagcaatttattttaccaatattagaatttataaggaaatggggcaaccatactgttattttgctgatttcaggcatcccattgaaga

SEQ ID NO: 6942 - DNA, 1134 bp, Populus trichocarpa
  Intron number 1 from transcript POPTR_0010s24280.1 (locus POPTR_0010s24280) derived from phytozome v7.0 (chr-ID scaf fold_10; pos 20573653 to 20574786 reverse strand)
ttctgctgaagatatcaagaagattcttgcctctggtatatgctctttattgtttatatttttctttttggcttgaaagatgaaatctttgttttcttgtttttttgtttttttttaaagaagaaatcttgaaaggcaagtaataagaaatcttgggatttttaaaaaattaatcttgtgttcagtttggatgatattattccggggaataaaagaatgaccagaaaattaaaaacccattataaattatgttaaagttttttttccctgtttgggataaaaaaacaggggattagctagtttttttcacaatgttgtatgtgatatgctataatgtgtgttgatgttgtgtgttatggcatgaaaagtttagattggatgcgtgcctgttgatttgcctactaaattaggcataaaaacgggttgtgttgttggttcatctttttttttctgatttgtgctttgaatatatctaactgtaagggatttaggttctgaaagtaatgtatgttttgtgctagatagagaatattgtatggaaggatttttgtggcttttgtgttttgacacaagggatacggagattgtgccgtccgaagaaacttgattttaaggtcaataggactgatttgtatgcttgtgttctactctgaattgaatcttaatctgggttatgtagcggattacctcatgcttagagtttgtttttatattttaaaaatatttttttatatgaaaatatataaaattgatagttttaagtatattctgaataattttaatgaactaatgttaaaaatgatatatatattattttaatacattttcaaataaaaaaatatcatattacttgaaaatatcctcgtttcttattaaacttgttttttatacttgtatctttaattctatttttcttaatttgaatctttttttttttaattggatgtatctctttgattaattttgtatagtactatctgaattctttctcctttcttttgaaaggaaaaacaaaatgtgaattttcagtcacaaaagccaaaactcaggacaaaatggacgtttatggaaataattaggctttttcaggttttgaatgctttgaaatatggtttgcagttggtgctgaagctg

SEQ ID NO: 6943 - DNA, 687 bp, Populus trichocarpa
  Intron number 1 from transcript POPTR_0007s15240.1 (locus POPTR_0007s15240) derived from phytozome v7.0 (chr-ID scaf fold_7; pos 14849283 to 14849969)
gagagtcacttcctaaccttgttcacaaggtaaagtttcaaactttgtgcttccttttctctctcttttgagttagttgatagtgaagtcggccactttatgtagtatggatacactattgaactgtcttgtatcttggtgaaatagaaaagtgcagttgatttgaatagcaatttttttgttttatgttcaccggaaaatgaatcgaagtgacttctataattcatttgaactttaaaatttccttctttttttttgttctaaatgtatctacaatctacaaactgttgttgattagattattcgaataaggatttgttcatataactacgaagcttctgttgatattgctatatagtctagttgttgcttgttaatcattccagtggttagttcgctagtgaaaaagcccatgtaagtaactgaattcacaaggataagtcatattagtcatctaagccttgctttcctactgttactgttttgtttccctatcattgtactttggcaccatgtgtcttcatttcaaagattgtgctagatagagaagaattccattgaattagttgatcgttttctttttcttagaaaaagctccttgcttttatttatatgtggataaatatttctttctattcattctgcagagttgttgcttattttttatttggcttttaggttaagtat

SEQ ID NO: 6944 - DNA, 813 bp, Populus trichocarpa
  Intron number 8 from transcript POPTR_0004s10070.1 (locus POPTR_0004s10070) derived from phytozome v7.0 (chr-ID scaf fold_4; pos 8611660 to 8612472 reverse strand)
cactggtatttgtttcacagaattttcatgtttgttcacagaaattgcatatttgtttcttaatcttttttgtaagtaggatgtttgatgaagagataatgctgtgctgtttttttattgtattcttttgacaaagtggaatatatattaaacatagggaaagctgaagtgggacatggcttagttcttcctattcttttgatttttttgtatgctgttctgctatctgacgtttcaattccatattgcaatttgtttttgttgtcaaagaatttgttagtatttttgcaatttagtggtgtttatcttctagcaaatacctgttttaaaataactttggaataccatgcttttgttatggggatgagaggaactcaaggatagtgtttgctatgcttcatgtcaatgttttatggaagagaaagtagtttcgaactagttgaataaatattaacttaaagtagtgtaaaagtagtttgttaaataaatgctgaattaggattctcaaattctgtgagttgctggcttttggatttgtaattgtaggcttttggtacaactatgatctgacatagtcttatcagagtggtcggatatactggcatctgacaataaggctatcataatagattttttttttcatttctagtttgtagacaggaataaaatcaaaacaagttgaaagaatgcaagttactgactctgcatctagagcttggtttgtagcattccatgctatcaaaatacttactaactaatctcatttggtgttttgaaggcttgcattctttacgtcctcagagttggtgtaac

SEQ ID NO: 6945 - DNA, 498 bp, Populus trichocarpa
  Intron number 1 from transcript POPTR_0001s32370.1 (locus POPTR_0001s32370) derived from phytozome v7.0 (chr-ID scaf fold_1; pos 30726079 to 30726576)
gcactacttgcggcaaaccctgccgatccaaaacagtaatgaaaccctctatttattattcactttgtctttccgaaacttagttttgttaattgtggattttgatgcatttggggtgctgttttttttttctgttgcttacaattttcgctttgcttgaattttatggttccaattctgattatttttttaccctctagtttgttttatctgatttgaatattaaagattaaaaagatagaaaatttatagttataatgagtagtttaaggcctaattttttttttttattattttgggttttatttgtttgcaaatctttaaatttggcttgtaatttggaaatttattgttataatgagcagtttgagacctagttttttttattattctggggaaaaaaaactatcgttttgaatatttgtggtgattgtttgggttttggttttattttgtgatgaaggaaagtgatttgcatacgaagagaactggccatac

SEQ ID NO: 6946 - DNA, 1616 bp, Populus trichocarpa
  Intron number 1 from transcript POPTR_0001s22740.2 (locus POPTR_0001s22740) derived from phytozome v7.0 (chr-ID scaf fold_1; pos 21629835 to 21631450 reverse strand)
gtgatacggctgcgccaccggaagcttcgcctcgggtatttgtagttttttttttatttattatgttaaatatatgagtgaatttaatgttaatttattgatttcagagaaagaaataaagtattggaagaaaagttattaagagtgttgatttttttttaattgagtgaaaatgaagttataattatgtgctaaaatgcttttaagcttgctgtggattgataaattaatattaaataaagaagctcttaaactcatgtatgatattcgtgtcaattttgcaaatttatagtgaaaaataggattttaaattatggagataagttaagcttgtgtagaaatgctttaggataagagaatctcatgagatgacatcaatcaatgatattgagatctgtaggttaagagaaaagtgtgaactttcgaactattagtagtttgaataaagatataaatatgtttttggtttttggtgtggattctaattggattttttttatttaggattgagagagatatgatcaaataacgaaaacccatgaggggtcattgattttcggtgtgtttttaatttatttgtgcatgcatgtgtatttgatgtcacttttgtccataaataaatatatcgcatcatgctttaaaaagaagtaaatttaacattggtaatcaaaatgtttcaggaaagcattgtatattaatgtatgctatctctatattaaatagtggcagtgtgctgagaatggactattgatgagtactttacaaagtggcatccttgatgctgtcactgttgaggtattttgttttggtgtatagtaatttgatttggtggaaagaaggttatgatgttcattttgcatttttaccaccattttccaatatatttcttcgtgagagaagatcatgtgtttacttgctgaagtggaacatgatttgctggaattaaaagaaattgacaagcatatgtattgagagaaacaaatgttggaaaccatcttttctctatcctgacatcagaaagaaaaatggagaacaagagaaagttcagttttgcagaatttggattcgaaaacctggcgtctcgagaaaaaaactaagtagctcattttagagatgaaatgccatctaaattatgtgaactgcagttttatgcttggtgctgggacataacaaattggaaaattatcacgtgttttgcctctattttctggctgtaagatgcattatgtttggtgttatgaagtaattagtagagctagagctccataaatctaatatatagtcagatatctttatgattccaaaagaccagaagcagggtttctgatgttcccatggaatcttgttatgcttgcaaaagcacagttagaaagctggctatgccttgggatcaaacacatgaatgcatcaagttttatggttgttaccaaaatggagtttcaaagatcaatcctttcacttcctccatcttgtttgtgaagtttattttatttcacatcttatgtcaattgttctctttctgggaacacattatttagtgtgcttaatttgggtgtgaaatatcattttgccttatttatggtttgtccaggggttgtctgggcagcagagatcac

SEQ ID NO: 6947 - DNA, 1736 bp, Populus trichocarpa
  Intron number 1 from transcript POPTR_0001s31330.1 (locus POPTR_0001s31330) derived from phytozome v7.0 (chr-ID scaf fold_1; pos 29670900 to 29672635 reverse strand)
gtggagagttaattctctgtgactttgagtaagatttttttttccttctattttctgactttcaagttcaatctttactgttcaaagtcactgtcttgttgggttcttcttgtttcttcttttgctattgatgactgagatattttgcatgcctggagattggagtgctagtttccgtcttttgggggtcaaagggtagttttgtcttggtgagtttctgtccgttggactgaacttgcctcatgtatgctgctataacatacaaggattgtagtaatatttgcttttgctttcccaagttgaaacaatccattttcttgttatatcttgatttttaatcaaggcactatattatgtacattgttagattgtcaccttgaacatggcagattcttcaatgcctttttcaagaatttagagttttctgtgatttttatttttgaatttcacagccactgaatgtccgtggaaaagccaagatcggcagtatctttgcctttgggaaattaaatttcttaccaaccaaagtctattttttcttttgaatatggaagttcttgatttcagtattgataggcctaggagcttgtgaaatcgtgattttggtattaattggtaagttgatggaaactaggaaaaagaggtccttgttgtttgaatttgatgatcttgtttcatttttgtgctcaataaaagttgacattttgtgtgtcataagtgttttcttgagcacttcctttgaattaaagcttagatagggttagtggatggaaatcttgtacttgtaaaacattaaaataatagaaagtactaggatttaattgtttaagaaacaatatcttgtgatctttttctttgatagtttatgtttagcattcaattatgatcatcattgatcatttttaaatctatcactcgctgaaaatgcagtcacaagcaatgttgtacctgtaatttttatttgtgcacaatttgttttttctgaactcaatgtcagatagattcagctatggagaatgcctaaaatttgaaggtatggatgactaagaaagttgtgttttcttctatctagaaaggggaatactgattgtatttttccaaaaacatcaacacaataacatgtgatcatgttgcattgccttatgtttattatcatggtgaatttctctgtttggctcaatctatttacagtatgaatgttgctagctttggtaggagtaataggttcattactttatgaaagtcgagcctctcttcaacaaggaaaataaaagaaagaaaatactgatgttcctaaatggaagttagtcacttggatagtgtactgttatgaagcatggtggtgtttaatacattgagatagttgagcggttttcaattagcgttgtcatccttgttttctgacagtcaaatagatatctctaatgatgagaattgagaaaacctgccatatattattataatgagtacatactgcagaaagctttgctgttatatacacttgtccataaatcatgatttaatccatgtccgtgaataatttatggggacggctataatctgattgtggtaatcctgcattgaaactgcactcatttcttgactttcctctgaagtatgtgcgacagctacttccatgcatctcttaaaataaaattgtcaatgtcattgttgcctttctaacttttgtcctctttctagtgattgtctaaaggtttaccatacagagtgtgtga

SEQ ID NO: 6948 - DNA, 4303 bp, Populus trichocarpa
  Intron number 4 from transcript POPTR_0019s07955.1 (locus POPTR_0019s07955) derived from phytozome v7.0 (chr-ID scaf fold_19; pos 9248189 to 9252491 reverse strand)
aaggtatctcatctttatccttgctttgcttttctcagctgtctataaggtttgcttgcatctgtgatacaatttgaaactatgaattaaggatggggataatgactatgctgcaccaagcctcttattgagtttggctgggagcaattattgtggactcagatgcatggttcttggggctataaatcccagaaatggctttggtttagccttaaacagttctctctctctctctctctcttttcttttaaacatttgcatcttttttttttacggaaagataaaatgacaatcaacaagaaaacaccaagaagtccctaaataactccacgcaaaatgtcaaagtctatgacaatggtctagctgggtcaactatgcatatgttgggcatgggctgttcttctgagagtgtgaggtcaaatttaatgtttaaatatgtagttttatggcccattttattatccaaaacaaagtaaaactgacaaactaattaacaaaataaatgagtgtgtaaaagacattaacatggtgtagtgagaatttttatattagtgacctgatggattgcttgtaaaagcactggttacagcaaactcacagatgaactaattctaatctttatggtcgaaagtttccaactaagacttgtctaccccttactgaacaaaccaaatgagtgcagctgaacatggacaagagaagtgtatttttttttttgattttttgtgtagtaaaatgttattttttgtgtttctaaaccaacaatacggttcattgcattttataatgtgctgacgttacctctgtgctcattattctcccctaaaccttgctgaataaatttgaaccatgctaaaacctcaaaaaattacaggcatgtcatgatgtaggacagctttggatttgtcttgcaaaagagttggaagaagctaggttaagataattaaggattttaggtgggaattagggttagaattgatgtctaaggaactagaattgtttagttatgtgttttagaagaatgtgggactgaattcaaggctgtgaatggtaattgtgggactgtaacagcaagcagacttttagaagccagaagaagaacaaggggtatatagaaggaaaagagaaggcaaaaccctaagcatgaagccttcaagataactcaaattctcaataatgttccattatctaaatccttacaatcacacagaatagccttttctttataggcaccaaagcccaatagttctaaaccagagaggaaatatgatgcaagacaaatctttagttgttgttcaccagactctagctgctttctcataattagggatttttccttgttcatttgtgtgctgcttaataaggagttttggacgactaggttttggttattttcaagggccacaatttctttttatttagggtcttccttagtatttaaggctgctactgctgtaaaaaagaatgatatgatattttgagaatttgataaagagctttgttctctttcctggctgtacaatccaaaaaactatcctttggctgcattttctattttcctgtgtcctacatcaaatagaaaagccaacaagaaaaggaaatcataaaataacagaagactccaaattaatatgctaatttcccaagcaaaccataatttctaaatagtattaagattcttaagtaagatgaattcctaaatagactaggttcgcaagaaagaaatctagagatttaaagatcacttttaaataactgacatcgctttttttgtggttggagcagtttattaagctaatatgctatgcataaaataagagcctagttgcctttcaaaaccacaatcttgattgaaacaaatgtaccataaaacttagtcactagttgtttgcatgcaaaacttaatttaaatttatattagtattatgattcggtgaaaggagactaaattgaatccatgggttttggaagagatgtacatctagagcagggggatttggtgactacatggcttgtcaatgtggaggggttgccactgggaatgtaaagttggtgtagttgattgcagtagagatcgtcagttgtatgcgtgatggggtggaagtggaactaggattttcttggtgggttttggccagtttgagtggaactggttgtgagacagatggtggttcttaggtacaaatgtccttgaggactcagcagtgtggccaattgcaccagtatcaggtgaaacccccctcctcaggtttggtagtttggatctcataagcaaccccctctatctaccagtgcaaaatcccaaagaatcccagcttaacataaaacacttctctcataagtttctagtattgagcttttatagcctaatattctgttacccaagttctcttgatcttctgatcagaaaagtagcaactgatgctggaatgcttggaaaaacaaccatctttggggtcagtttttatgtctccaaactctaaatcttgaaggttgaatttaactgaaaaaggtgattttctaaattggccatatctcttggattaagtagccctacacatcttctggaaagagtctttagatccttcaaaatcgagtttgtgcaaaagaaccaggggagccatgaccaccaaccaagttcttgataagcagtgaatatataaagaaggtgaaagatgtataaaaagagagctttagccattaaaagagctcttttaaaactaaaatgaaatctgaggggtacaaatggtttagcaaagtaatcatttgtccatttcgtcaacaaattaagtagcccatcacatcttctggaaagagtctttagatccttcaaaatcgagcttgtgcaaaagaacgaggggagccatggcgaccaagttcttgataagcagtgaatatataaagaaggtgaaagatgtataaaaagagaaagcttagccattaaaagagctccttttaaactgaaatgaaatctgaggggtacaaatggtttggcaatgtaatcatttgtccatttcatcaacaatgttttatatttgtgtcaacttttggaatctatcaaataggagttcatcaagaaggaagatcttggcagagaggaagattgtacaaaaaaagactgtcaattagggatcagaagaatagaagtggagaagaaagtgtctgcatcaagcgtgtggctttattgtgcagcgtctgaattttttcattatttctataaatcaaagtccgcaaaaaatgatttggtccaatgatttttttttgggttatccaagtcattgcaagacggaccatgcaagaaaatcttttaaatttcccccttttacagtggtgtggaattaaaatacccaacatatttaacacatcatggctatcagaaactttttgcttcattcagtttataaaataaaagattcaaatcctttttgcatgatttcagtttcgaagacctaaaactgtattagcgtagctaattgcaaatttgaatttctgatgttactgttattaaaacttatgaattagtctaataatgcaattatgtggttgagtaagaggtcaacctcgcttgacattttctaaagcgggaattctcggcatcatgcatgttaggaaatcatccctcatttccttgtttttacatttcatgctttcttatttgaccaattgtaatttactaaacctactagcatgggcaaagaactataaatttgtgtctatgtggcattagatatagtgtcaactctggaaggctgccaggaatctgtatttgtaacacatggtccttgttttcttgcttcaactttcagactaagtttgtagaccaaatttttgtacccaaaagttctttctgatggaaattttgtacaaatattataatgatttttttctcttgtttgtcttttatgatattactcagagtaaataaaaaaaaggaagcatcaacttgttgaagattgtttgaaaggaatgcccttctatctgatctctttcattataaaagtgatcatgtttacatgcatgatcaaatgtcagctattatcttgttccaatttctatttatcctaattttagccattatgctgctttaatttcagttttttactgttttccccttcccacattattaccttttgtaaaatggcattccctgatgttgacttgggccttgtgcattaatatgtaaattaagcgtccaattataattgggtttatagaaactttgctccataattagccataaaatcaatttaactgatgaccgcctgaaattttatatttttcagattgttccagtcttgcttaa

SEQ ID NO: 6949 - DNA, 1117 bp, Populus trichocarpa
  Intron number 2 from transcript POPTR_0006s02270.1 (locus POPTR_0006s02270) derived from phytozome v7.0 (chr-ID scaf fold_6; pos 1491006 to 1492122 reverse strand)
aagtaagaatagttttcttttttgtggcacctgtaatccatttgactcttattctcacccttactcttttactgaaaagtttttttttaattcatgactgctggatgtagcctaattagcttattgtttaatctgttttatctgtttgattatatgtacaatatgtgtattgttttggatgcagacatcaattaaggtcttattacttagtaattaattgtcattgtagcttggaaacttgagatgattgtcctcactgcgcattcattactaaaccagaagttttaagttaatcaatctaagttaaaaaaaagattaaaagattaatactgagctaattatggcatttgtaaacataggaggttagtgatacatttatatgttttgatttttgagtggtaattattcttttgaaaacataagaggttgctgatatatagtttgattttgagtggcaattattcctttggaaacatacgaggtgctgatatatagttttattttttaatggtagttttataaatgatcgttagatgtgtatcaaatgaagtttctaggtcctttcttttttgtggatgaaataaaatttatatgtgacttgtgtaaataaaaaaaaatcactcatttcataaataaaatttatatgttcttcatgtagtcatcttagaaaaaggagcctgtagaccttgtactcttgcagaggagaatggtctattctgtgcttaatttgatgaagccttaagtgtagctgtttggggtcagctacttttgttctttcctgtgtttttattatttcagtgtccattctgtatttgtttaactcttatctgaagagttattgagaaagaaagataaaacctttatttcttggtctgatacttctctgttctgttgcagccaactattgtgcattggtctttgctcttatcaaaatctaatcattatgaaaaaggagtcttatcagaatcaaaccatgaaatcatgtagctgagtcataattaagatgctgcactattgaaactttggattgctgttataatgactgatattttttcctgttctttttttgttctcttttgatttcagggtgtaagtttaggatctttatctgaaattg

SEQ ID NO: 6950 - DNA, 828 bp, Populus trichocarpa
  Intron number 2 from transcript POPTR_0006s28140.2 (locus POPTR_0006s28140) derived from phytozome v7.0 (chr-ID scaf fold_6; pos 25942960 to 25943787)
ggtatgtttgctatgtttctttttctttttcttattattattattattattcttggatgaattactggaattgctactgaaagtgttttttttaattgcccgagtgagatttattttgtttttttagctttggagtatatgcagtagcttgaaaggcttccagtttttttttggtttaatttgatgatttgtgtcctcagtcaaggagggttttcgttttttcgttttttcatgtttcttgctttgaacatagtgcagatgtaatggaattggtgtgatggattgtgggtttatggttatgttgtgtattttactgcttaaggagctctgtaaataaattcagccatcttagttgcagtagttacatgaatattgttttcttagtctgacactattctgaaaattctgttcttttttttaaggttattgattctccttaccttgctctgtttttacccccctgtagtttttttgttggaaatgaagataaaggctggttttttacacgctgtgtttgaagttgattggttttgttctcatcatgtgtcatcttattgagatttggtagtccaggctttcaccctaccaaaaaccttctatgtctttgcttgcataatggctgaagcaactcttatgaaataggcggtcaaataatgatggtacccacatgaaatgtatgaaagtaatttttttatgtaatcagcaacataagctctcttatcacttgcctagcacttagatttacttcttgacgaatctgtaacttttaaagtttccctactcattgagtatgttcattgtgagcatttgcaggtatttgcacactct

SEQ ID NO: 6951 - DNA, 2007 bp, Populus trichocarpa
  Intron number 1 from transcript POPTR_0007s06490.1 (locus POPTR_0007s06490) derived from phytozome v7.0 (chr-ID scaf fold_7; pos 4859838 to 4861844)
tcttttgctgctgttgttgctcaggtttcttcaattttctgttttgcaagcaatgagattgaaattagtggttttggttcataaagtttggttctttttggtgtctgtttagtttcttaaggtgatatgcttgcgttgggaaattttagggtttcccttttttttggttatatgttattcaaatttgtatgctattggttcttgcttttctaggttaaatatgttgatttgttggaattgagatagatggttttggaatgctatggagattgttggtagattttcttatgttgtggagtgtttagctctctgaatgcactttgagtttatgtattgacttagatatgcagccacggaactccaacatgggttacaaacttttggaagttagcctttgattaactatatttttcacgaaattcagtgattgacttgaataatgttctgtaagctggtattacaatgattaagggtttggtctgtgaataaaaggtttctaagcaactgtatcaaaaatgtatggatttaatgtacaattgaaggtcattaagataaatgcaaatttcttagagacagatatccaccttttatccattgttttggtgctaggggaaagcagtaggggatagagacagacctttcatgctgttattaatgtggatgttctattgctatttgcgtaccgcatggcttgcagttagttacatgcttttacttgtatgtgcgcatattgttagttgcatgtttcttattttgcttacataaatctgttcaaatctattagtctcttatggcttactttgatttgtgcgttgatatgtatctaattagtgtatccaaagcagtgtccagtattttattcaacactatgcttgcagtctaatatcatttggtggttgaattaattttgatattaggtttacaatttacagttactcatgcaatgaaaagtttcatcctcgtgggatgtatgttcgtggcgtcagttgtattcttttaatttgtattacttggtgaatcaaaaggtgaactggactctgccttctcttaaatatacagaatagattggtgattggttatgaagttaacctttaacatcttcagagctgtttgtttgaacctgagatcttgacattttgtattgagtcctgactgctatttttatcaatagtctttcgtttttgtaaaatgaaaacattagaaaaaaattaattccatatgtcttcctttttaaggttttgttttcactttctaattgtcatatgtatactattagctttttatccctttggtttcattcaggaatgttctgtgagatttctgatctttctaatgaaatgacttgccttatgaaaaatctcattaaaaacatgccgatggctttttcacagtaatggtgcatggtctaaagcatctttatcatttacccctttttttaatgattagtatttgtcagttgatattgttcatttgttgctttttttttattgtaggttctggagaggaaagatgcagcaggtgaaagattgtctgttgatcatctttcaatggtaaattttttgcctctttcaagactaacatggattttatattcgcctctcagaaatagatctttgaagtcactattatggtttgacatcccttctgccgtacatttttttattctgcatatggaagaacatgttagttttgtcactcaaatggactgtttgttaaacagttcatacttagataacaatgcaatcagatgcccatctagtaaatttttcactgcagctcagtaaaatcacatgaattagacaaatttgcctttgcatgcttattctttgttttggagtctgtttgttctaattttattgatgtttggaatgttgggaaaaccgaacttaatgtgtctactttcatgcagatctgcacttcagctgtcagagaatctttagccagtgtaagccagaccttaactgctcacttatccattgactctggttttacaagtcaagttccttc

SEQ ID NO: 6952 - DNA, 796 bp, Populus trichocarpa
  Intron number 1 from transcript POPTR_0030s00330.1 (locus POPTR_0030s00330) derived from phytozome v7.0 (chr-ID scaf fold_30; pos 127817 to 128612 reverse strand)
ccattttaaaggtacacattcgaattcaaactaaaaaatcacacacatttgttaacaattactactgatttctttatgtcggtcaaagtgtattggtatttcttttatcttgaattgttgcaaatgtagcttctttaagctcacgcaatcgcctgtaatttagcgtttgataatttaatgccgtttgatataaacagatgtgtttagtaggatttttttaaaagaaaccagtgccgggaaactgagcttaaaatagtgactggagttaattacgtgttgttattttttttggaaccgaagtcgtttgaatttggcatttttaacttctgaaatagaataatttagttttgagattatttttacatacacaaatacgaattttaagtttattttcggaatgatgacttggttgaatagagcttttagtttgcttgtgcatttgaatcgcaatttagattttttcttaggaaaaaaaaatttgtaacaattctgcagagttcaaaatgttgatgggcagagttgcatgaagaatttggggtcctgttgtattatcgttagtttttgtattagtccaagttatgtttcatacttggaattttaggttaaataatagtgcatacagatttttagtagtttttttttttcaaatctatatgacgggaatgcagccatgggttttgaaagtcaatgtgttatttattgccattgatatggaagctgagcttgagtctttttttctttcttgggtgttgttcttgcagcttcgatcgctatcaagtcctagtgaaattgcaga

SEQ ID NO: 6953 - DNA, 755 bp, Populus trichocarpa
  Intron number 1 from transcript POPTR_0012s11830.1 (locus POPTR_0012s11830) derived from phytozome v7.0 (chr-ID scaf fold_12; pos 12206493 to 12207247 reverse strand)
gaacgttacgttttcaagcgccgcaacgacggttagttacttataactacaaaacacgaagttaaacactgtttccttgtcagtgaaatggttagttttgagttttgtgtgtagttagtgtctgaaagaacaaggttttttgggctctattttagttttttctagatgggattttgtcaagtgatgaattggctcccttttccatgtttggtttctgtttttttaaggttttatgttttctgctttttttttgtagtatttgttagaagaatggtaattcttgttggtgtttttggatgagaaatgtaggaatatgtttttagaacaatgtatgtaatcttgcggaaaatcttttccggaatcagcttgtagaagaatttcagccattggatttcttggactcgacaaacttccagtcgatgagtgtttttggaaagtgattttgtgcagtatgtttgattaggtttactcattgaattttggttagttgttaatcaggattacttagattcttgaatttggttatattgaatcttaatcgtaattaagataatttagcttaaaaagagtgttttttatatcaagtatttctttttgcttttaaaccatatttatgcttgtagagatgctgttcttggttgcttttgaaatattattctgttaaattagaaatgttaggatgtgctttgattctgtgttttgagttgctttgtaattattgttacaggaatttacatcatcaatcttgggaagac

SEQ ID NO: 6954 - DNA, 4167 bp, Populus trichocarpa
  Intron number 9 from transcript POPTR_0014s13940.1 (locus POPTR_0014s13940) derived from phytozome v7.0 (chr-ID scaf fold_14; pos 10193760 to 10197926 reverse strand)
atatcgtaaggttgatgtttatttcattatgacctgtgttgactttatgatttgatgcaactatgctattattgtgtttatcattttctagttatttcgactttgatttttgttttgttacaattggagtaatctacgatgtagttgtagaaaaacaaattacaatattatatataccttgattgaagtaagctatgatgtggttgtggtaagctttgatcttatgctatgctattatgattgttgttgtagaaaatacaaattaagatattatgatttttcttcaattatatctatgtaattcttgaattagtttatctagaatatcaggatatcaggagcttttcccaaaaaagaattattcttatttagattttcattttttacttaatttaggactgttagggttttggtgtctataaaagagcaatgattctatgttctagtcaggattgataattgagagtctgtttgggaactgcaaaccgcgctccctcaaattttgaattttgtttttttgctaatttttttttatgttttcagattgttttaatgtgctgatatcaaaaatgattttgtaaaaataaaaaaaatattattttgatgtatttccaagcaaaaaacacttttaaccgcagtcgttaccacaattccaaacacaccctgaatcttattgaaaagttgtgtcttgtgtttggcaagtaacttttcagttcctctctcccattcttcttattgcccttttggctccttgggtgaggttgccttctatggatttttgggcagaaaacccaacccaattcacaggtcacataaagctggccgtggggcccgtgcatgccccatgctagaaaatccagaagttagtttttctggagctctttcattttggagcttttctagcgctttattatttgtaatcgctatcttaagactgtttttaatcaaacaccttttctctctttctaaccatcactataggctatagctacacttacaactacaacacaatcaagctacaacggcaacaaccttattccagtcttcttattcttgtgtttttgttctcttataccaagctattttatttcaatttggtttatgagttgaagtgattccttaccctttcatttatttttcattcttgtaaacttttagtcaaactattctatcaccatggtgacaagtgtcgagttgaattccacattgtttcttttttgtcccttgtgaaaaccaagaataacatatcgacacctaacctttaggggaaagataaaattagtggagacttctatcaagggaataaaaggacccttgagagttggttgcttttgagcaagtttgggagccatccatctagcctttctaaccttggtcactgaatattagttagagaaataacctaatactagttagagaaataacctaaaagcacccagaacacgaaggtctagcaacaatatcctattccataactattgtcttgataaatagtaattctaggatttatcttgacgcgacaaacaacatggataaaactaggattctcaagccctaaggttatagacctaagctatgaagaaatttagagaaaactcaatggtattttataagtctgaatttgtatgtttagaaaataaactagacatcactatttgtattagttctagacctaaaatctttattggaaaggattcctaattaaaacttacttaactaacataatctatctagcatgagaattcttaactagtaaaatttttaattaaattaaaattcttaagctaagtaggaaaaggaatccaaatacaacaatgtaaataaagacaattccacgtagcaacttccgggtcttatttgaaggtcttcccattctctgatcatcatgggattttaacctaataggaaataggttcttcaaaatcttttgtcaaaattcgtgcttgatccaacagtcagattgaaagttatgcttgattttaacctcttcttaaactcctcaaaacataaaattcttaaccattaatgaaataatacaataaacatttttagaccaagaatattaaagaaagttccccacgtccatcccctctacttatgaaaaactcgccctcgagttaattgtcataaattgaacttgaacactccaaaggaatagaatcatagatacttcaaatatagcattgtagctagcttaatcgcgatgtagcatgtctttgacatgtgaacttcaaaatttaatttatggtgtgtgcatgctaaagaaaaatccatatttaatgttatactttctaagtccacttgtagtttcttcccatatttttttactttaaactcgagttcatcatcatttgccattgtatgtaaaggaacacaagataattttccataatatcttaatgagaattgtaaaaaattaccatgttctccatgatcttatttgtaagatcttcatccatgacttaaagatcatcgtttgccaaattcttctccaacttaaggtcaaaagattgaaacagtttgtcagcaccctctttggtaacgttatcttatgattagataactttgaaattttgcgttcaccaaactcccacatagacaagtggttgtctcggtggaatttgaggaataggtcgaagttaaggtcggcctgaggtaagtctctaagcacgtacctctcctctttgtgattcttgtttgtgtcatccattagccaatttagatctattatggcttgatacaagcaatcaaacacctgtccccaatgatctagtttatgctcctgagcttgcacaacctccactcctgtattgcgaaatgggttgctactgtctccatccatcaaagaggccaatttgctatgataccaattgacgcggtgaataatgtcgataaaactatggttctcaagctctaaggttacatacctaagttgtagagaaatttagagagaaatctatgttattttatgaagtctgaataatagtctgaattggaatgttcataaaacaatatagacatccctatttatattagttctagacataaatcctttataggaaatgattcataattgaaacttgtctaaataatagaatccatctagcattagaattcctaactagtaaaatactaattaaactaaatatcttaagctaataaaaaaaaataatctaaatacaacaaggtaaataaagataatcttgcttagtaacttctgagtcttatttgaaggccttcctgatcttcgatcatcatgggattttaacctaataggaaatagggccttcataattttctatcaagatttcatctcgatccacaatcagattaaaaagttatgcttgatttagcaaactacatcttgaactcttcttaaactcctcaaaacctaaaatcttaatgaaatgcaacaaacattattatgccaagaatattaaagaagttccccacatcatttcctcaacaaaaccaccaggtgactactgttcttaagcttctcaaaacctaaaaatcttaaccgttaatgaaataatgcaacaacattattgtgccaagaatattaaagaaagttccccacatcatttccttaacaaaaccaccaggtgactactgaaagcctcaaccttggagtcgtcagcatggcttctaggattagtatttgctcgatttaattttttctacaattcaagatttttagtagtttttcagagttccaactatttcccatctagtggatctatttcccatctagtggataagcagcctttactaggaatctacttctatttcatatttagttggttttcctaatatttatttctcaaactgctcccagggattttaattttatcaggtctaaattttcctaatttgtattggcaccttggacattggaagttgggttaatattgattgatgagataaactttagcagaatttggttcttctttggttgggtttctccattctttgctttatccctgtgtgtacattggttatttggttatcaagttcaatgataagtgctgttgttcaattagcctttcatatttcttgacagaattgcccaagctgcttggatttgattaattttggagaaaatgtcttgttcttacattgcaaattaatctatccatcattaacaatttcagggctgtacgtgct

SEQ ID NO: 6955 - DNA, 630 bp, Populus trichocarpa
  Intron number 7 from transcript POPTR_0002s08280.1 (locus POPTR_0002s08280) derived from phytozome v7.0 (chr-ID scaf fold_2; pos 5778190 to 5778819)
gcatcgttagagaaggtaagagacgcatttgatatctcaactgttgcagttatattcagaagaaaactgtaactactaagatcactttaatacaagatgactatgatgacttaagacacctgccaaattgcaagatatgatatttgcttaaatattcatgaatggccaataatccaagcttggaatcaaatgcattaagattctttttatttcaaaccattaaatatatttacctttagccaatatctagttggtatttaagttgttctttatacggtcagcttccttagatgagctctactttagcaatgaagaagctatattttttggacgttaaacagaaaatcagatatatcctaaaaaaatttcaattagcacaatgcaaggattggtattaaaattagacaagcctttggcatattttacaggacttcctttgttattgaattacacagccagtttgattaagaaaaaaaattattttttatccaaatatttgtcttgtcgtgatttttctatttggaacattactgtgcacgagcatgaaagttgggttgatgatgagcactacttgaaagaagtagctacgcatgaattactgatctgtcttgatactctgcaggagtcata

SEQ ID NO: 6956 - DNA, 3154 bp, Populus trichocarpa
  Intron number 5 from transcript POPTR_0008s14340.1 (locus POPTR_0008s14340) derived from phytozome v7.0 (chr-ID scaf fold_8; pos 9509617 to 9512770)
ccattcaggtgaaatttctcctccattttttcactattaatcgaagtgaaggggaggattcaaagtcgaataccttctttgtggaagctagtcagcttcattaaaggcgtgatatttactgtaatattttgcagttctttttgttacattcagcgaattgttttgaatgttattgaagagcattgattaaggcaaacccttaatcaggaatattcttaagatgaacccacacaataactttgtaaatactagatactgtgatttagattatttgggtgaccacttgtgtgtagatgtttcatcttttacatgcaaaggagatattatcttttaccttatttggcagattgccttttcattattaacgtttcaattatttcagaatcagatacatgaaatttttttgaggtttgcatatttcaccccattagtgtaacaactaggaacaattgggatatcttgtgatttgttgacgaggtagcacttagtattgttgcatgggattccaggcatggaatctgaggtttagggattgggaaagtgatctagcataaagagcatgcccagctgagcggggaaaattggtaaatggagatggtgtgttggagtttctgatatcaattgggttttgtttggtttagaagtcctatgacttcataatcggttttgatttttaggtatgaagatatagaattgaagatcaagtataatagaagtgacggatgctatgatttcatggagaacattgtttttcttgtcatgttgcctccttgacaaagattttgataataaagaaatcataatgagctgccgttgatgcatactactcatttggatgtcctataattgattgccttgacagtgttggctggttgtatggaatttttttcatgtgtacatgcaagcatgtatgtttctgtatagtcctttttttggaagttaatgattgttgactggcaagtccagtaggtctgtcgtctgttttgggcttccttaaagcttctaaatgggctttttttgtggaataatggaaatatgcacgagtatgaccaaaatttacctatgtgctctgtctcttgcccacttttcaaactttctcttcacacccttccttattcttcatattttgtcttctacctcgcaatcttctttatttaagttcttcatcctgttatgttattttttgaggggtatggagatgctttgagctcttgatcttgtcttctctctttttccttcaccccctcctctttttatgtgctcgcatcttgcctaatcaaaggatcaaggtgaaaatttcattttatgctttattgaggatgcaaactacagctagagcatatgataccaatgtttcaatgcgatcattagtaaatgcaagtataaagctactggttaattgacaaaggaatgcataaaaatgtttttaaagttagacatgtagattttcttactccatatcaggtattaggtactatgaaactgcgatcacatttctcggcaccctctagtgacactgaagcgttgatgacagctagggagtgttttttttaggtccagcctgctttccaaactatgttttgcttgtaaaggcatcaaattgatgcttttttaggtggttttcaatgttcttgatgtgctgatgtaaaaaatgaaaaacaaatatgaaaaaacatcattttaatgcattttcaattaaaaagcacttttgaaaaacaccttgcaccgcattaccaaacacacgcttgggaccttccctatccaatactaccttttagaaaagaagttacattttttactactgttgctagtgggtgttaacgtgcttgtgtttgtagctgaactgataaaccaaacatgttagcaatttctttggcatatagattcccataaaaatggctgctagtgttcatcgtagatgcttctctgaatttttgaattatgaacttggaaaatatgtggtgttcttggtcaaagccttttttttctcaattggtgaaacaaattgtcttttttgggattctcaggaattgaaatttttgtaatctgctgcataggtcattcgagacttggttcctgtacttccaatttcagttttcacctcccttgtactttggaccatttgaaattgtgtctttctgttaggtttcaatccattttaatgccaaaaaatgagaagcattaaatccccctttttctctctttctcctgttcttttcttttctccacctcctctttcacttttctatctaccccccctcaccagccaccacttttatcctccctcctctttgccttccttctgctgttatgcgtctaatctttgcacaaatgtcggttttggtcttgttgggattttgcgttttggagatggtggtggtggacaaaaagggtagtacttgttgatgataatagcagtgctgtttgggtgatcggtgatctcctcctccttttcctcctacatgtcttgaaatttgggactatgttttgaagatgatgatgatgatggggtcttcttggggaacatcctgcaattctttcattattttgtagtaaaagagagaatgagagtaataaatattgtttgatggctggtgagagggaggagagggaagggaaagatggggaggagaaaagaaagagaaggaacaaaaagagaaaaagaaaggaacaaaaagaaaaaagaagagattttatgttttttccattaaaatggatgtagacctaatagaaggatccaatttcaaatggcccaaagtacaaggaaggtgaaacctgaaattagaagtaccgagactaggtctcagatgacctcaatttcaagggaggttaggcaagtttagccttttttaagcccgtcatttggtccggaccataatctggctatgcatagtaacatttgtaagatttgttgaaggattgagaattttgtgtgatactttatggactatccgtttatatgtccgggcaagttgttcagttattactggactgtttgccaaattctttgcaggcctggtttttgtttgttggtccatacttatgggcacactggggtattgctgtattgactactttgcaaattgaccagaatgatctgcagcatattaactttaactctggttttctttgatttaatcaattccagattgct

SEQ ID NO: 6957 - DNA, 2430 bp, Populus trichocarpa
  Intron number 4 from transcript POPTR_0006s11470.1 (locus POPTR_0006s11470) derived from phytozome v7.0 (chr-ID scaf fold_6; pos 8683565 to 8685994 reverse strand)
atcagatcgtcaggtagctctcttcgtgatcagttaactttacactttattttcctacttcctggttttgtctttgctttccctggaatttactttgctgcatgcagattatattatgtgttatatactaatatgaaaaagaaaaaagaaagtattctgcttcgagcactagaacatagcctgcctctagtattattctaggtatatttatgttcatggcatttatataaacatttctttggtgacactgatgaatacaccaggaatatccctccgtgcctgggataaaaaggaaaaatttaagttgaatgagacttgcctaacaattctaaaccagaaagaatgattttctgcactatgtaagatgttgagataagaatgaactaggaaaagatgctaatgatacttttattcttgatttattttcttcttttagtagtcaagatttgaatgggaaatgctttgcaggttattttattaacatttgcttgtgaacactggtgaatatatgtttcccacttgccctgaacaagaaccatggaagctgcatgaaaatttcaaaacctggaaaaaaacaacattctggactgtaaaagcaactgagatggcttggaacgaggatcaaataagtctattgtgtcaagaaaccattagtgagattcatgttctttattcaacatttttttgaaagatcataggaacaaagtgggcagtaacacagacaaaaacaggatccacttttatgatcacaaatctaactctagtattgctgctttctaaccacgaatttcaaccaaattagtggaactaaatcttagttggagtagtagtaggatttgacatatttggaagaaattcttaaagtgctagaattcaactggagtggatcaatcagctcgaaagtaactgccaaattttccacagcacccctctctaaatgcatcagagttctaaggctttaaggacaactttagttcttaagaagtggagcccacaagaaatgaagaagcaagggaaacttcccaacactaccctttccatatatttgtcagattcacaagttatggagcagttttagtttttaagaagttggccccatcaacattcttcataaattcaattttttttggtgtgcttcacaattttatgaaattcaagggttttaaatttctccatccaatcccagaacaaatcaactttaacaaccatgagaatgagtgaacaatgatatattgtataattcttcacatatttgtgttttgcaagcagatatgctgtttttcagtttcaaaaagccagggtttcttggctattgttctaggttttcacatttctcacatctttttcataggcattaaacatgtgagattctgatcaggcacacgccgcacaccattcacaatgatcatccaaatgacattgattttatagcttgtagatataaaagacattagcttacatccatgcttgactgtgcgaggaaggcaccatggcaagatatgtgcttctcttatgtgaatgggtgaaagtccagctgtaggctaatgcatctgaaatatactactggcatgtgcttggcaaagggaaacattgtagttgtaaggtttatgcaaaacacagtgaatggtaaatgctcataaaccatatgtttgccaatctagcgagctgactttgtccggccacttctatcataatgaacactgtttttattaattgtccattagattcccaatcacttctattgctcttgtactccttctagatcatgtcttacgcagaaacttgcacataattggattattaaatttattctacgtttaggccctggtcacttttgataagtctacattaggctatagttctgacttttatttgagtcaagcacttgctctagaaagctgaatttggtttctcactgagatctactttgcagatatttagcatcaaggaagaatacggggttttgtggaataaacctttggaagctgtatattctcagaatcatatggttcttaggaatgtaattgtacatgttaccattcagagaattttggaaaaccttgtgcttcaatggctcatcaaagcttctctttaaatggctgcttgatttaaagtgtagctataatggtgcattgaatagtagtgctacttagatagaaattgattgacctcacgcttcagtagctcattaaaagttctctttggaaatcatcatatttatgtatagcatctgatgctgaacttttctccagagagctacaataatattatgtaatttgatagtagtttaatttcacactctctgcaagggaacaatgatgaattttacctttctattcatcattttttaagctttgattagtttaataattgagggtattcatcattttttaagctttgattagtttaataattgcacaccgtcctatt

SEQ ID NO: 6958 - DNA, 3252 bp, Populus trichocarpa
  Intron number 1 from transcript POPTR_0010s17140.1 (locus POPTR_0010s17140) derived from phytozome v7.0 (chr-ID scaf fold_10; pos 15863508 to 15866759)
ctactcacgaacaagctcgagcttcccagtcacaggtacgcgccacttcttacactttctcttactgcatcttttcaatctcccttgctatttcgtatctgtatttttttttcttacttatccctgctgtatccctaattttagatttttcttagctttcattttttttttgctaaaaaggcagggattttttagcctttttcaatctaaatctcccaattcaaaattgatattattttccgtgtaggttgtgggattagtttcggtagtaattggtgatttttttttagacactggaaatttaagtgtatttggtattgtggtactggtgcataatgccttttgctttgaaaatattattttccagaattttttttgatattataatgcaaaatcataaaaaatattaaaaaaaaatatcaatttgatatttttcaagacaaatatacttttaaaatgcacttgaaaacacaatattaaacattcacgaagtttgtgcgtgagcctatagttagtttatagcttccatttgtagctaattagtacctggcttggccttggtacgatttgaacgcagggctttagtcttgacctattagggttgagtgctttggttattatgagttgaaatcttaagttagttgattaattaagttgttacttttcacgtaattgggggaagttagggtttgattaaagtctgtgtttgagtttcgttcgtaatggacatatagtgcacaatttgaggttttgtttatgattgatggataaatagagtggagggacgaaaaaatgtcaggaagtgattaagctcctctttttgcttgctctatctcaacagccacagtaaattacatgtttagtggaaactattattatttaatctttgtgatagttatatactatcacaaaaaaagttttcttttaatatttctaacgataaactagagcatatatatattacggtaacataaatttgaaattttccaataacaaatgtcaataatttatttccaagaatattttacaaatcaatgtttatgtaaaatatttttcaaaccagctcaactagcagcccttctcaaaagaaagtgatataggaccatcatttgttattcctagctcttgcatcagacttttaaaccgagctcacacactttatgtgccatcattcaatactctgcttctgctctagactctagactgaaccaccacaaattgcttcttactcctccatgatatttcattgccaccaataaaggcctaatatctagacatagatctcctaccatctggtgatccagtgcaattggcatcaataaagtcctctacctttaaatgcctattatttgagaacaacaatcccttcccagagcaaattttaggcatttaaggatgtgatggattggctgactacactaaactagcttagctatattaggacaagtatgtgaaaggtagatcaattgaccaaccaacctttgatatcttcctttttccaccacttcaccgttgttgttcttaaggagaggattcactttgacttgagaatcaatatgtctaaatcccaacatccatgtttgtgtaagtagatcgaggatgtacttcctttgagaaacaaagatacccttactttaccaggcaacttcaattcctaggaagtaatgcaacttccaggatctttgatctcaaattctttggcaagatacttctttaaaatggaaacctcatcatttcctattacctcagtatgatcaccatatacaatgagaatcgtggtcttacctttgtaatgtttaatgaacacaatgtggtctcttactttgtttgtatccatatctaacaattgtcttgctacatctatcaaaccatgctcatggagattgcatctcagcttgcatactttgccctctattttgtcccatgagaatcctaggggaatctacatgtgaacttcttattctatatctccatgaagaaacatattttttgcatccaatttttgcaagtcccgccctaaatttgctccaagagatagcaaaactctgtgtgaattcatttttgcaaacatttcctgataatctattccataagtctaattatatcccttcgcaaccagccttgctttgaacctcttaatacttccatctggcatttgcccaatgttaaagacccatttgcagctttgctttgttttatataaagtctgccacatttagtggaataagggacatcaatcaagttatctcatatgagattttgtctgaagattttgtagcaattttctttatgaatcaaataaatcaaatcatggttctgtttgcaatagctgaactgaatggctctcctaagaaaattgaaagtaatcacattattaaagtttttaaatgggttctttttatatcataagattggagttataaatttcttttaatctgtgcaatgagtttttttctgcagcatattccattcactcaaaaacttgacaattttggaatgtggtttgtattttggattagctaaatttggatatagaaaattgaggtttgtaattggaagagaagaacagaaggaacgtaagctggcttcaaattcaggcagctttatctgtatttttaatgcaggcgtaacttgtgtgggttgaccaggcaacctggacccttgggccgggtctggccttgggctgggtctgataattgtgaggataacgattaacctatccacatatgcccctaggtatgtgatggtaacagcctcattgaacataattttttgtttccctggcaatactaccaaccagcctggtttttcagctagtgagtctatctgtatctctatgttatttctgttatagcctaattgagaaaaataaaaaacatccagttataatctgtgctcactgatgtccaatgagtgttgaaattggctgtaatatatcaatttcgtgattttattagttttttctgttttggatgtgttgtaagctcaatgttattgacagtatcagaggcattaagtagaatctggtgcagcaaaaggttttgacagtactatgttgtcaagatatgtagcaactgctcaggaatctttcctatgcattcaatatctgtgcactgtctattagatgaatatgttgcgaacaattctttctttggtgatatgcatactttagttctgtgccatcatttttcattgcttgaggcaaggctgcgcatgtcaaatgaattttctttttgcaggactttgagcacc

SEQ ID NO: 6959 - DNA, 1375 bp, Populus trichocarpa
  Intron number 1 from transcript POPTR_0009s11060.1 (locus POPTR_0009s11060) derived from phytozome v7.0 (chr-ID scaf fold_9; pos 9319332 to 9320706 reverse strand)
acctgaggtatatactattgttttctctcttcttctgaaaatttattttttacttttgtttacccaccgatgaaattacaataaagaatgagtgaaaaatgtgatgtttcaataattgtgtttttctttttttgctatacctctggaagttctccgctatatataacttttgcgcttttatagaattttctgttttgaaataagcaatgatatatccaaaattcactggtcctatggttagtttaacctaaaaataatattatgtctcatttctttgatggcaagtggttttctagaaattattttttaaatttttctgtgtttgtttgctattagaaaagttggttaatgaaaaacactttccattcaaaagaaaatttggcttggttttcagaaaagtgttttccttttattttgaacggaaaacactttccagaagttgtgaaaaatttagaaatatcatattatttactgattatatcaaatttggtcctcaaacttttgattactatatatattttgttttgatttttttttcaatttcatcatttagaatttgatttttatattaactttgatccttatttttatgattgctatttgcttttctcttatcattttttaattgaaattttttatctatcaaatttggtcctcattcttttgattgttacttattttatttgaaataatttatgaaattataattataattattttaatttcatcatctttcaattttttttatttgttagatttgatctttattaatttgattattatttattttatttgacataatttatgaaattatatttttttttcaatttcattcttattcaacttttaaatttgtaagatttgttcctcattattttaataaacttgaaaaaaaataaaacattaataagttatttttcaactcattttacatgacataaccaaacactagaaagtgttttccaacttatttttcatgacactaccaaacatcgaaaaataattcactttctcagaatttattttttaaagaaatcattttctaaaaagaaactacttttcagcaaacaaacgagaccttaaactaagagtttattttgcatttcagttgaaccatctttttgttatttttgaaataaaaatttgctttgatttttatttttttagtatttttaaatggttttgatgtaaatttttaaaatttaaaaaaatattatttttatatatttacatatataaaacactttaaaacataacatttaccaccacagtctcattaaacagatcagaacacctctaattattaattttagcgggctttaattactctatgcaatctaacacatttcaatgaacagagaggtctgtgaagagt

SEQ ID NO: 6960 - DNA, 2191 bp, Populus trichocarpa
  Intron number 6 from transcript POPTR_0001s21240.1 (locus POPTR_0001s21240) derived from phytozome v7.0 (chr-ID scaf fold_1; pos 19630079 to 19632269 reverse strand)
gtttcattacaaaggtacttgagatttttttgctttgcttttattgttctttctattagggtatgtgtgcactgaataagttaggaatttttagaactgataatttgagtttcagattgtatcgaataaaaaaattgtatttattaatagcagatatgaatttatgatcatgttctcatttaaggttctattgtcatgtctcctttagcatgtggggcattgtttgaaatccagccaacacactgaggtaatttctgcctgtgatggcaaggttcaatagtgttggggatgcaagttggtgacttttagaaatcttcaaccatcatggcatttatttgccccaaagatatcgtggatgtataaaagtaattgttagtgataaagcagtaaattctagaataatattgctgctgatattaggaatagaatgagtttgcttaaatgacttttgctttcttccaaaaaatgggtttcacattttactgagccagcaaatataaatccatgattgttatggcttttgaattggcaataataaattatcttctggcttatgatttactggtccggtattccatccatgtaattgtgcatgccattggttgtagaaatgcatttcccttttgttttctttttgtggagtagcagatcacacatgtcattggttgtagaaaagcatttcctttcctttcttatctttttggtcaagtggtaaagaagcatatggatgataactatgactacgaaccacgctctgtaataacattcaattctaattatcaagaagctaatcaagatgtatggctcatggaatagcatgatcaatttgataaaatgcattgtttgaggtttctttttgaaattctttcctgttttggtaaactttccttgattttttgatctgcaaacgttgttatggaaaagagaactcagcaaaaggcagtcaagatttgtgtctgacatgtcttaaagcaaaattttaagcacttaggttgcttgggtctttattctgctaaatctaatgaaatgtggaaacccaacactgtttattgtttttgaaaaaaaccatgttagatatcctatgtagcttcatatgtcccaaagcaatttctccctctaaaaatcattcaaggggcttatgatttttgctatatgtaacttaccaaaaaaaaaggtgtagagactctaattgacatcccatttgtcatctctaacaaatgcatccatccttttcttggcccagtgaaccaaggaagcatgattgaaacctttttggttttctagatctgagggtcatgtagtacataagatatcattcacattatatggagatagcctaagctccccatagcttggagaagcgtaagcctttcagtctaatgagacagatgttgaccattcatgttattgacaatgagatggatgatattgctgcttaccatcttgttgctctcatatataagcttgtgatttttaagcatgcttctgagcctggttaaggtttcataaataagcttttgattttcagaatctagacctcttaaatgacatgttatccaaatggtttggagctaccattgtcagtagggcatttaaacatttgaaaaggttgaagtatagcatttattggtatgaacgttctacacaaagctgagttcccaaaaattatagtgattgttttcagattagagctcccaaatgttaccagaggcaagcttcacagtgttcttgcaattttctctttgaaatatctcattacccacttatttctgagagttattcaaggtttatatttaccagttggcaacacttcattttccaaaacaaccaataaatgtttcttatacagtaatgctaaacattaagtaaaaacaagaagtcaaaaacctctaatacacgagcccgtggattgatgggacccaaaattgggtctcacatcaatatcatgatccaatggctcataatcttcttgaagttttttcttaatgtttagcattttttgtttctaatattctcctaaatgttatgtgcttaagttgtatttttcttgttctgttcaagtgacatttgacaaaatcctccctggattgctgttcttgaattttgaaggttctgtgcttctattgcacttgacctggaaccccatttccatttttactgatatttctgtgcataatattgcctttcagac

SEQ ID NO: 6961 - DNA, 1948 bp, Populus trichocarpa
  Intron number 2 from transcript POPTR_0001s35590.2 (locus POPTR_0001s35590) derived from phytozome v7.0 (chr-ID scaf fold_1; pos 33933595 to 33935542 reverse strand)
ccccctactcccttggagattcccttacgtccccggtgattcacttctttctttatgtggactttgatttttatatgtaatctgactcagacactatcttactgcttgttaaggcttttgattgcacataaattccgccatatagcctaatccacaaggattctttgtaatgttagttgattgcatgattttcttcttttaggtgcttactcattattttgatttgggccgtgtttgtttcctggaattcactttccggaaaaccactttccaaactttcctatgtttgtttgctattaggaaagttggtcaacggaaaacacttttcggtcaaagaaaaatttggtttggttttcaggaaagtgttttcccttttggctgtgtttgttttccggaaagtggtttccgggaaaccacttttcaaactttcctgtgtttgtttgccattagaaaagttggtcaacggaaaacactttccaatcaaaggaaaatttggcttggttttcaggaaagtattttcctggaaaatttgggcggaaaacactttccggaagttgtgaaaaatttagaaatgtcattatttgctgattatatcaaatttgatcctcaaacttttgattgctatatataatttgttttgaatatttatttttcaatttcatctcttaaaatttaatttttatattaattttggtccttatttttataattgttatttgctttttccttatcatttttttattgaaattttttatctatcaaatttgatcctcatttttttttattgttacttattttatttgaaataatttataaaatgttaattgttattattttaatttcttcaccttttatttttttttaattttttagatttgatctctatttttttgattattatttattttatttgagataatttatgaaattatattttttttcaatctcattcttatttaactttttaatttgtaagatttgttcctcattattttaataaacttgagaaaaataaaacattaataagttattttccagcttattttctatgacataaccaaacactagaaaatattttccaacatatttttcattacactaccaaacatcggaaaattctttcatgaaattcacttttccggaatttactttttccgaaattcactttctaaaaagaaactactttccagcaaacaaataggaattgggatttaagcttgtaacggtgtggtgttgcatctaggaaactttggaaacgggtttggtgttactggggaccatctcaatagaatcgtttccatataaatattaaatactagttgtcaatattaaatattagttgccaattcgatacttttttgttcctttgtttagctttcagaatgcggaacttggaaactggcatacctttgtcatttttttatggtatatgacaatgcaaaagcaataatctttacttaccatttcaaacgtttgacttcagttcagtggtgtcaaagttttgggaatttgtgttggggtgctgtttggcagaaggtttcctttccatggttactctgtcagttccagtggcttgtgggttctttacttggtctcgtttaagcaatgtaaaagcttaaaaagagggttccttgttaagattagatggttgttgtggtcactgctccaggacttgcaccatactctctgttcaatgaactgccccatatgtcaacaaagatctacaatttttaaaacaagatacaaatggagaaacaactgatctaaactttatttccagcacccttctgaaagatagcttgtaatccatgtggttaacattctttcaatctcatgctgaaatattaatttcatagttttagcagtactgtgtgtttgccaagcatgcattcacacacacacagcgttcactttttggctgaagaaacctttgtcgcaacaggcgctg

SEQ ID NO: 6962 - DNA, 1132 bp, Populus trichocarpa
  Intron number 24 from transcript POPTR_0004s19660.1 (locus POPTR_0004s19660) derived from phytozome v7.0 (chr-ID sca ffold_4; pos 19444966 to 19446097 reverse strand)
gtagaggtgagctgaagctcatcaaagttttccaggtatctcttgttccccatcttgttgtgttctgcagttacaaactctacatctcaaaagagtttttaaaaatgtctaaaactagaatgttcaacctgtaaaattgattgttcaaagattggtggttacactgggcccaaccagttggactgttatggtgttatgccataattatttccatctagattaactaattaattgtatactgtaaaattcttaaaaagtaattctcctggagcttttgtattcccacagaagtctattctccagttaggcatgtgaaaataataatataagaagatgcaagttgaattgtagtgcacatgtggcagtggtagctctctgtctcagtcaaggagcgaaacatactggcatgtgcttttggtgaatttgtagatctaaaataagtcaaactatttcaaaatgcaggaaaaaaaatatgattataaattatatggccatgtcattcaattaatacttttatcttggcagcataaaaaaatgccatgtacttcctttttttcttatatcatcaaaatccatttgcttcttatggagctttcagaagtgtggcagcagataaaaatttgtaaatgtgaagcacattcgtttaggacttttatattggcaacataaaaaaatctcatgaatccatgaacttccaatgactaatctgataattatagaaactatatttaacagagagtaaagaggggctcattgaatacactgctttctgacagatgacatttaaatttagattttatctttttatatgcgtgggcttatgttcttgtgacttctcccccttgttcatttatgcaaatctttatcactatatactatgagcaaatgaatacatttattttaggtgattacaactttaaatgctagaaagtctttacctaaatgtttgtgtattctatagagggagttgttctgaaatataactcagtcttgatgcttcattctactttatgcttttcataattaatctgtgtttagatgccacatcttttttattgaagtaagaatatcgactgattgtgcatgagatgcttttcttgcttgcaggctgagcttttcgacaagttcctcc

SEQ ID NO: 6963 - DNA, 1541 bp, Populus trichocarpa
  Intron number 1 from transcript POPTR_0017s09910.1 (locus POPTR_0017s09910) derived from phytozome v7.0 (chr-ID scaf fold_17; pos 8634100 to 8635640 reverse strand)
gatttcacagttgaaggcagataaaagaaaagaaggtactctctctctttctggatgccccaaatctagggttccttttaatatattcgtgtaattatttactctttagtcaagcttcaattccttaatttaaagctcaaaacttcacttcacttcacttgtctttatttttttagaaggtaaaaattcaagctttactttggtttttttgggtttttaggttggttttaaatgtgggttttgattttggtttgctaaagttattagattttagtgtttggttggtaattaagttggcaatagtcttcttttagggtaaatattcaatattgttgactggattctttagttggattaaatgtgggtttttggttttgattctggttagtttaagtttttgtttctccctttttttaaggaattttaattaatggtacggctagatttaatattggttattattaagctaggtactggttttaaagactgaaattttgggtttgttctagactttctgtatttatttctttttttgggcttaagtgttgtttggtgtcagagaaatgttgcagaaaaaggaaactgctctgtattttctagttggtagttatgacttgaaaaaaaaattgattctaagtcagtgtgatttcgaaattttttatgtgctatgttgtgagagtttgtgtcgttaagttgtgcaagcagttgaaaacaagtcattgagattttctttgtttaaaaatcaaaatctaagcaatttttagtttgttatgttataaatatggttctgtctgctttcccatagcatacaaatgtttgcatgtttatccattgtcgtgagatcatgttgatgggaattaaatgattgagactggggctgttaacagatagtgggaattgaatacccaggtggaattatgctgaatgtttgtctggaattgcttttcctggagaagtggttttctaattattttcctaaaattgactattttactgggaatgaagagggacatgttgaaatgggcttactgcaactttatcactcaaatactatgggtttttcttgacaaatactgctgccaagcatttttttcttcataatttggattaaaaggatgagtttttcttttgggaggggtggggttttaaaaaatgtgcttctttcgatgttagtgtattgtctgacagttgttacttatttttcaattgttgaatgatatacatggttacctctatcagtcttctctttatcgatggaatttatcctagtcaacattcaattatagaacacgtgtagaacacctaactttggttgatcctatccaatttttccttgtgagttgataggattgcttgctgatgcacatcacttaaatttaataatggtttgttttgtgcagcaatggttttcttctacacacttgacttttggcctaattctgttgaacttttcctctgaactagctttctccctcttttctttaatatatttatttttcactagcatctatcttgtgtgacatctcatcaggatttgcaag

SEQ ID NO: 6964 - DNA, 959 bp, Populus trichocarpa
  Intron number 3 from transcript POPTR_0011s02250.1 (locus POPTR_0011s02250) derived from phytozome v7.0 (chr-ID scaf fold_11; pos 2026864 to 2027822)
tcagcccttttgtatgtttcaatatttgcttttctctttaatgttgtggttgattacaattatttatttgtttcttaatggtaaattcattttcttgaatttactctatttattttgttcacatttttaagtccaatcgatctatggttctcttgtattcttttgatttctagaacactttaataggatttgattcttgtttttttttgggatgcttattgcagcattgtggaccttgaattgtaattttcattcacttcaatggtttctatgataacaagcaacatctgctatgttgttgtttttttatttatttatttttcctctctcatgccttgacaaatgatgcaacttaggaacctcttctgcatcttttctattacataaaactatgactcatttgacttggatgtgcaatatcaaagttcaaataaatatttgtttgttgtaagtctcttgcagcagcaacaatgaatggaagaaaaacaattggcagctgaagcctaaggtgcttctacgagctgaaattgttgggattaggttggagagtcctggatttaattttcctagatatagttggctcttgttggtttcagatactggaagatacttctttattgttctcatttatatttgcacttgtagatttttagcaggatatattgaccacttttgtattggtaggttcgattgatttaggaccatcttagttaagatatagaattcacatttaaaatatcttcacacgttaagaagtcaaggttaggaaacttgaattgatatgagaatcacaacctgcaaccacttatgtcaaaaattatgctttgtttttcttcttattattttttgtattagtttttcaattatgcacaacctaacatatttgatggttctcattttttatgatgaaacgttcttcactcttcaaattatatgcattttatggaaaattacaggat

SEQ ID NO: 6965 - DNA, 847 bp, Populus trichocarpa
  Intron number 2 from transcript POPTR_0015s06690.1 (locus POPTR_0015s06690) derived from phytozome v7.0 (chr-ID scaf fold_15; pos 7670740 to 7671586 reverse strand)
gcatccatgtaagttcacccttgattttatcctcttgtttagattatgtgattttcctgagttgagggctagatttttttaaaaaaactttgtcctgtttatagatagatagttataaagatcgaacaagactaatacatagcatttatgaaggtcattaaatgctagtcagtgtcattatcatatacttggagatcttttccaaattgtaggggggcaaggaagtaagcctttttaaggtcatgggtttgtctactattcaggcattgatatttatctgaaaaaggaacacactcctaccattttatcatgaagtggtcaagtcaagctgttgtgtttctgtaaaagtttgcaagtcatctgatttgattctcttaatttttagatatgctttgtagctttaagttctgccttggttgtctcaatttgccaagtcaaaagttctaaaacagtgttaagtccttggatcacataatctgagtaagagaaccttgctcttttgcatcaattaatgtatttcactagagaaactccaaaaatacttgttgggtctgaaagagctctcttaccaaaagatgatcttaatttatgtaagaacccaactttggatgcatggttggttttcaaagcaaaactagttatagatactgggttttacaagaagagttcttgcactaggctaattggtaagaatatacccctgttgattctcatttctataacctatggaactacccaatgtgaaagggacaaggggattattctggcaagatttttgaaaggttactaatcataggttggtgtaactgtaggactgtaagcattgttctgttgagaattagcagtt

SEQ ID NO: 6966 - DNA, 1046 bp, Populus trichocarpa
  Intron number 13 from transcript POPTR_0001s04200.1 (locus POPTR_0001s04200) derived from phytozome v7.0 (chr-ID sca ffold_1; pos 3320236 to 3321281 reverse strand)
tgggtgagtcttcatccacgattacaagtcttttctgagctttgtcgccttgaggaatcttatatttactattatattttttcattgtttttttcaatgagaaggttgattgtgtgttcgtagctcctgattctggatttttttagtttccttgttacctatttgatttttgtatatcattaagtttttattgctgttgtacttattttttgtttcagtcatcttaatggatgatacagtgtaacttctcttttggttcgttttgatgtgttaatgttgcctgaaagctatcaaatttctggtatctgagttctgtttgagctcctatcttaaatgtgttgtttacattgctcttatgcaaggctgtaactggtgttaacatggatttgttggtttaaatatttatttccagcaactatagtttagaaaatatagaaaggctaattttatgtagataatatttttgcattccatctagggattggaatggtggtgtttatttgcaaatatgccagttatggtggccactgtagctgtttaatggatgataatggggtagagaaatgctctaataagttggctttaacttttttgtattttatggtgtaaattgctgactatttacgtgtctaaaactaattggtactaattaacatccacactgcatgatttaaggtggcatgaacttgttgaaatctgtgcatataattgattttgacatttccatttcacattagcatacattctaaagatagttgctttctcttggtgtatgctaaattgtttccatccctatgagcaaatttttttaccaaagagcaccaagggttgcgaccaatattcagaaatagaatttctcatttgtgagaaagagtggacaagatcttcaactaaaaagttcaatgcattgaaagcacaattttcatccttagccattgatttacaacaatgctatgaatagttttgctagttttattcgtgttatttgcctgacatgtttcatgaatgtagggcaaggataagactgctgaagagagaaggattgc

SEQ ID NO: 6967 - DNA, 1263 bp, Populus trichocarpa
  Intron number 1 from transcript POPTR_0003s04970.1 (locus POPTR_0003s04970) derived from phytozome v7.0 (chr-ID scaf fold_3; pos 6077354 to 6078616)
tgagtccgactttggatcacttggtgttccctggtgtaagtctctatctcatctagcctttgatgaatttatctatctatgcatttgtaattgttgtctgaatttaatccgggtatctgggtcggagtcagatttggttttgctaattgggtggcgactgaggagatatggatcttgagtttgattatttccgtttggtggctgagaaaatgtaggaattataaatatgagaaattataaggaaatctacttcttatcttcttggcttggttcaattaatgggtttgtaataaaaaatgagaattggaaatgaggttttcttgttttgatatggaatctaagctcgatttggctctctgtaaaactgcagcattggcatcagacttggttgattgttcaaagatgttgtctttgagttcaccaagctggaatttccagtttagggtgcatgttcttggttattgcaattcttcattttgctggtttattttcctgaaggttgcttaacttagtgtaattacctcaaaaggaactgcatttgtgcttttatgggtgcacagggggaaaaaatgtggtattgtcgttgtaccaataaccactgatgcatcttctgctcaaatttcagtatttgtgggtccaacatgatgggacctgcaactattgaaatcggaaagatgtatgttttaaaagggagtgttgaagatttttcccgcatgcaaatgtgtgtgagagagagagacattcaggggatttgaaggatgtgggagaggatgctacttgtcctcgaagtctctaattaaaagggatatagcttttgcagaaggcttattgctaactgccacttgagttgatggttgaaatttttgagatattctgcagaactatataataccgtcgaaacatttcattttaattaatgaccaactacatgattcttgaatccttttctggtgtctttcactttacgcactccactctgacaactctttaccattttttagtctgtagttggtgtggagtccatgtctgttaatttttgtgaatttgggatatttttttttttcattttcttctttcttttcatgatattatggtaattattgtttgctcagtcagtttttcatctgattcactttttaaattttttgtggcattggatgctatattgctagtctactgaaaaactgagtttgagtgcttgatttgggttcttatcatccactcccatttgattcttgtccttggcaaaaggcagatcgaaac

SEQ ID NO: 6968 - DNA, 1100 bp, Populus trichocarpa
  Intron number 3 from transcript POPTR_0008s18310.1 (locus POPTR_0008s18310) derived from phytozome v7.0 (chr-ID scaf fold_8; pos 12254608 to 12255707 reverse strand)
cgggtgagttggtttgacttctagcagtggagtccctatagatgtacttacttcattgatagcatcttttttgttgtgtttggtttgtttttagctgttaaaaaggaaaggcaaggagattactttagattatgagaatgaatgggtagggaagagagcagttatttatttatttttagggaatgttaaaaaaattgagaaaggaacatatctggattttaactgagagcttatacctttttgctaaattgctcttgacatgcctcaacatttttgttcccctcaaaatctcatctttttttagaagaaagattcttatggatcacggaacagatttttcaaaactttctcagttttgaacaaaacaaatggaaataagaaattgtattcctgaacttgtaacattctctttactatacgggtgaaacatttaacagggagtcacagactggaattctgcagttctaatgatgtgacaccgaatgcttgtcctgcactggtatcccaggcaagattgcggcccatgcttaagaccattttcctgagatttcattgttggattcaaacacttcatttgcactccccttattcagcctctaacttgattttttcaccatctgttgtggatccaccatcaatctattttgatttagctttcaacttgttgctgtgcattctattaattctgcttgtctactcagtccttgctgtttgcaaaaaatctatcaactcagcacaaagttgttccttagaggtaaccaatgattttcctttttaaaactctcagaatcttttggttatttatgcttctttgtaccattttgcaacggtggagtttttttaaatctcgctaactttgtgttaaatagaaaaaccatttaggtttcactgttggcgagagagacagacaatgtataattgagtgcctctcttgtttactaatccttgtagatgctcattcacaaagttgtcaattacttccggaagcaatattcatatatttctacttgccattctgaactacaaattcagcggatgtatagaaatggtattgatagatttttcctttttgtattgtgttgtgcaggaaagaggagaga

SEQ ID NO: 6969 - DNA, 414 bp, Populus trichocarpa
  Intron number 1 from transcript POPTR_0016s11730.1 (locus POPTR_0016s11730) derived from phytozome v7.0 (chr-ID scaf fold_16; pos 10907315 to 10907728)
ccacagcagaactgaagagttataaatctccctctgtcggtaatccaagcttttctcgtattttaaacaactctttcttgaattattttcattttaaaaaataataattataataaggtctctatattatattattatgcaacgcagttataacatttccctcttaaataaaataaatatctctcccttttgcattaaaaactctatcatatggtcgtgattttctttattatctactaattactttcactaatggaaggaaattactgtttaaattgacgaccattttagctctaatcatgaggacttccttgcgcagaatctcccctttgtcttctttaacaatgccttggatcttcattttgaataatattcagagttattttcactaagcactttttttcttggtgaagg

SEQ ID NO: 6970 - DNA, 1368 bp, Populus trichocarpa
  Intron number 1 from transcript POPTR_0001s24840.1 (locus POPTR_0001s24840) derived from phytozome v7.0 (chr-ID scaf fold_1; pos 24084933 to 24086300)
gaaaaaagaagagaattttggctgttcaataagaggtgagtgaccatttggattattttgtggattttgtttcaccaattgtctgaaagtttggtgttttgaagagttttttctggtgacactgtgctttgttttgtttggttgatgtaaaatgggattttgacggaaaactcgaagcaagaatgactcctacatgaatccaagttctgaacttttttttttctctcattttcctcttgtaatcttgaaacttcaagtgggtttcttttcttgctctgatcatctccctccctccctgttctttcatggatttgcgtttcaatcgacaattctgttttcaacatattttcgatctgagatttcttgagtgatttatcgttgctaatttttttttttcttttcaaaaatacagaatttctccttttaacttaaggtgatgataaagattcattttttaacaagtttttggttcttaatggttgatccttgttgaaggtcttagatcctctggattcatctggtctgaatagctctcaattccttcttgagtgtctgaatttcagttttcgggattttgttacttggatcctttttatcagggttttgttgtggttttagtttattttatttttttaaaaaaaattaatcattttcctcatcgaacagtgaaaattttgatgtcccgattatgacatcaagtctcgatatttttttggtcgtttttatgtataaatcttggttttagtttattgatccctgagaatttctcatgccttttcctcgtgacaattttcctcaattttttttcctggtttatccggttatttatttttgtgtacttgctgtttgtggttagatcatgaggatatgattaggtaatttttccaagttttgtgcttgtatgtggtggattctgtatggattgagttgggttgcaagggataagagcctaaaaataatgatcagatgccaaaattctgatgcaagtttgcaattcacaaatccagtgtttattcataccaggacaaaaaattctgattattgcaaacagcacctgtatgcagtgacccttgtttgttgagaatttgcacgcaggattgatcttttgtttgatgctggtttatgggtttcattttaaactgtgtatcgtgcgattttctggtagagagaacttttttcatcatggcttttttttttcctcgtctttttaaagtttaatttctggtgttgagtttgtagccatgggtttttggctttgtacctaattgtcagttttatattctattcattggataagtcatctcttgatgatctcattcatatttgttgccagggttttatcgttggggtttgaaagcttgagtgatt

SEQ ID NO: 6971 - DNA, 815 bp, Populus trichocarpa; identical to SEQ ID NO: 6822
  Intron number 1 from transcript POPTR_0012s11870.2 (locus POPTR_0012s11870) derived from phytozome v7.0 (chr-ID scaf fold_12; pos 12232873 to 12233687 reverse strand)

SEQ ID NO: 6972 - DNA, 1081 bp, Populus trichocarpa
  Intron number 5 from transcript POPTR_0004s04690.1 (locus POPTR_0004s04690) derived from phytozome v7.0 (chr-ID scaf fold_4; pos 3435087 to 3436167)
ccatcatttggaacaatacctgggttggtagtactgtaagtctgcttatccatttaccccattattaactcagatttctacacaaataaaactgttcactgatgataatagtttccaccaaaggagctaatgtgagtgtatgcgacagagacttgataaaatatgattactatatgattatcttgcattatcatttattttcttagaaacaatttgcttatagtagtttgtccattcaaatcctttgttcctccaaccagccacatctcctgcttgctttaacaacaaatagaactttactttttcactgattttgcatttgaattatttgataagatgcaaaatgaggaagttgatgtttgcttaattcaaattcatagcaaagtccatgatgcaactcgcatttagctggatttgataggacataaatatgtaacttgtgctgaagattttcacgtaggaaaaattagccactgctagcacaaacaaataaaatcaagtgaatatccaagtagtcaatgtataatggaataaggaacacaaattttaacaataaaaattatataattgtggcatagaaggaccacagccataaaggcaattcagcaatcactgtgtgaatcaattggtggttcatattagtttgtgcatgcatggtatcatggataacttgatctttccccactaagtatgcagaatggtaaagaattagaaagaaagaaatccttaatgaaaaagaagcaaatatagtttcatgttgcctcctctttctggtgttagtagtcatattttgtcagtaatgtgatcctgtgctcgaggaaatgtgcagtcagcataatgtcaatttgcaacccttttttttttaaataactttgtatttagacaaaaaagaagaacaaagaaaaggtgattctgctcatgtggaaatgtgaatcaactcaatgttaacttctgggtgaaacaccagaagctggatgcaaatagaagtgcattttccaatcctaatcatgtgatttaactgtactaataaaatatctgatcatatctgttgcgtacagtgacctttcatacaattccttca

SEQ ID NO: 6973 - DNA, 2655 bp, Populus trichocarpa
  Intron number 1 from transcript POPTR_0008s12700.1 (locus POPTR_0008s12700) derived from phytozome v7.0 (chr-ID scaf fold_8; pos 8208655 to 8211309)
gattatccgctgattactcagggtatgtttcttttctattgcttttttttggctgaattttgattgttggttttggttgtctgtggatttgtttggttttctagtgtgtgtgtgtgtgttgagagagagagaagattgcttggtgaagcatgaaactgtgacctggtgctggaaaaataacccgaacttaaatttagtggctcatttgtttttttttttaagaattttattcaggcatctatttttaagttttgctttcttttgttgttgactcttgaatgagaaatttcttgcgttttgcattcttaaagctcaatggaaagagtgcattatggtctgttactattctaagcatagttgacttttgaatttcataatttgcctagtgttttggatatatttgacatatttatgttcatcgaatcgtaacacttaaaatgtggctgcctttgcttcctttgactacctcaaactagggtacctgcagtccacaatggtttaggagccagcatgaatggtgccatttaggccacaatgttggtaggatgtggtatggggagaaaatattgtttacatatgtttacttttatgcaaagatgctagatattcctttgattgcgataaacttagtaaactagagacaatatgttttttactagaacagcttatactaccaatataaaaacgattgagctgaacatatccctgcaagtaaccgtaaccctgggcttagatctaggattgaacaactgtggataagcccgcgcaaaaggaagcttctattggacctgctagaatgtggttcagagtatagtgaagtaggctgccacgtaggtataatgaaggatgattttgtcagaacggaagtttttattaaagtctgacttaataatcgttgcatgctatccaggatgaggtccaccacattataacttgcatacatggatgcacactcatttgtgcactgggtaagtaggttgatggaggaccaagtttcaatcccagtctgctcatgtacaatgggctctataaaggctttttgaattctcaatttagccagaagctaaatatgatttcttcatttattctttgcagtctgaagcagtttttttttctcccttttggtgtcaggatgaagttttcttaagttaggatatttgcaatattggctaaacagtagccttcttcgatcttccaactaacacacagctcctatgtgtaacattaaatatgttgatggacaccgtttcaaaaagacattctgagtttgcaagaattcatgggttttcatttacgttgtcatgttcatcaactgtgtgtgggcttttgagtattcttgatgcaggtctttggattgcgcattacagaatgcatgcatgcaagaaacttttttttttcttttttgagggggtggctggttggcaatctagattactgagtcgactaaaaaagttaaatctgatgattgtaggacaagctgcattaagcctatcaattaaaggacatcaactctgcaataagatcaaacattcattaataccatgtccagactggctagtatgttgaatattgtgagcgctagatgacaagtgaaggccctgaacataggcttcttaaatatgactagtgcttgtttactaaagaacttttacctcgaagaggcatgacagagcaagactgtagagttcgcatagtgattttttaaaatttttagcttagagtgttggcagggcattgaggctatttagctatgacagaggaccatgagtaaatttgtaccagaagcatgtttcaaaataattatgtgattggataaaagactatggatatcgtttggaagatgtccataaaaggttttgcatattgattcatacttctggattggttggttacttggcggcaattttgctatgaaatctaatgtttaaggatgcaatcagcttgatgcacatgcctgaggtcctttcatagctgtataaaagcctaatacagtgccatcctttacccttgcaaaagtaagggcatccttggcaatggctattggtatgaagagttgctgatgagctgtctgtacctttgataatcccttgttgatttggagtctgcttcttttctggtgatacatttgatgtgggtcacagagattttgtagccaccaacacaatgctcattcctgaggacctttcacagctgtacaaaagcacaatacatttgatgtgggttagagattttgtagccatcaacttgatgttcacatgtgaggccttgccattgttctataaatcattgcacaagtgaatggccagggaggcttaagaagtcagatgattataatgtgtaaaaattgaagctgattaatgcttacttggaagctcatctgccaagttatatgctaagtaacagggaatctcagttgataattatctcagttgataattagtagctttgtcactgtttatttactattggcagaactgtcttgaatctgttttctcctatgtcctttgtatttcaccaagaagtctctagcatcaaatacactgaattgttgaaaattgctaggcttcatttccactgactctgtggtgtcattttgctccataatattattccgagtttctaatattttattctgtaatcttgcagacttggctc

SEQ ID NO: 6974 - DNA, 1442 bp, Populus trichocarpa
  Intron number 14 from transcript POPTR_0012s11800.1 (locus POPTR_0012s11800) derived from phytozome v7.0 (chr-ID sca ffold_12; pos 12178065 to 12179506 reverse strand)
tgaaggtatttagactccaaacactgaagatttttattttttattttatttttttcttttctaaaaatccaatattaatttattttttctttgcctttgttgttacgtcttatatgcataaactaaaggattcttttcggacttcataatattctaaagcaactcctctttcaattgttttatcattatattcttttcttaattataatgttgaggtacactctggatgctattgttatcaagtatttttaccatcaacacatttgactctgtgttaaactgtcaatcttacatttgtctcgagggtctgattaaatttcttagatactgctatttagccttctgtttgatctcggcatgctcctgtaatggaaactagctgcactcaatgggcaagtaatatgactgcagagatagtttaaacctgaagaaaaaacttcatagctaactgatatgcatgagttatcaaactcccaaaagagccctgaattagttttattctctcatggacgatataaaatcttgtatccgctctatcactagaatcaatgaaggtatacaggtagtcaacattctcaggatgtgttcctccacctcctcttcttagttgaccacttgcttttgtactcatgcaaatctcaagttgttacatttttcactctaaaagtgatgcaggcggaagctaatagaacaacaatagcactgcaagcacataaattttaatgagtgaaaagaacagtagatgtgaatcttaaattcataattttattctttaaaaattggttgctttctcaataaatttacatgtcctttataaagactaggaaaacctacatctaccaggaaacaacctaatgtcaccaaatatctgaaaacataaaggaaattaaaacaaaatccaaaataataatgataaatccagaaaatcctaggaaaaaatcaaaattgtcgcaaatagtaatttatgggcctaattctaaaagattcaatagttcaataagcgatagagtagcttttcgtaggaaaacggtctatagaatcacctagaaaaatttgaacccgactcaatagtcggatcttccgttatctcagttttaaggtgctaacctagtttgatgtgactagacctcctcttgtgtctagacttgtcttattggtccatgaaaacatttgttaagctatctatgtagtgtctatgtcagatcctcatctagtaacgtaaagtcctcacttgaatgtgtttctataaacttgtctgcatcaagaagattaatgctagtttaatggatacttcattgaacaaagtaacttagtggacaaaataaaacacagcgactacaactttttaagatgttgcttttatagcttgtcctgagcatctttcatctactaactcattttcctagatttggtacgttaccttcaatattgtgctctttcag

SEQ ID NO: 6975 - DNA, 3002 bp, Populus trichocarpa
  Intron number 4 from transcript POPTR_0014s07010.1 (locus POPTR_0014s07010) derived from phytozome v7.0 (chr-ID scaf fold_14; pos 5283853 to 5286854 reverse strand)
ctggttatccttctttcctctcctatgaaaaccaatgatcacacgcacacacacataacaatccacaggttttcatagattcattataaatgatcaaaacaccctatagagagtataaaactagaagtgagaaatctattattactacaagtactaggatactgttacatcttgcggattgtttgctatttagtatccagtaatatttgttttaaattaacaatattacatgttgccttcttgcgctttgtcaaataagcaaccaaagtgatatgactttgtcttgttcacggatagactcttgatgtgcaaaatttgtcaataatttgaataaaagaaccgaatgaaaatacatattaatttgttgtttagtttaactatatataaacacaacaatcatgctcgaatgaagttacataaatttaaacttgattgtatggcaacacttgttaaattacttataatctaatttaaatgaatattagttattgtcaaggattaatcatttatttttaaggttttactactcctctattgttgcaaatagatttattgtaatcagtcttctaggattccaacaataccatcatatttagttgtattactaaacaagaaacacgaactctaaaaaatataaccaaaaatctccctacacaagccaagcttaaaagtgagtttaattggctgtttaatttaactacaaggtaaagtatataaatcctatataaacataggatcaaagtggcataaatttaaacttgattgtttagtaaccacttacatgttgaatcactttgaatataatttagatgaagatcaattattgttaaggattaattttttgtctttaaaactttattgttcacctcaagatgcaaatgaattaaatacaatcagtctcctgtgatttcaataatgtcccttgtttagttgcactattaaacaaagtccatgagctctagagaatataacttaaaatctctctacaatataacatcacctaagctctagtatttaagaaaaacaagggataaaaaaccagagcttaaatcgagaaggtaatttgaaaactgaggtgagaaagaatctcaaaattcatgtaaaacactcttctttccgctcttttatagtggattttaaaaccaaaattgatgtaaaattaattctggtaattaccttcttataaaacaaaattaacctaaaggtttttaactcgaaaatcttattttttgtattaaataaaaaaaaataggttaaagaagaagattgttcactctatatttatggacttgacaacctaatgagccagtaaaaataattctttatgattcaaataattattttataacaaactcaaatccaagtctaaaattaaaataaaaaaacttgggccaacaaagcacctatgacttaaacccaaagccattttttttgggttcatttatgactctttaacttcttataatataaactacaaggaaatcttatatttttttcaatgtggaatacagagttttgggtttcacacaacataccaacaaaagttttttcagatcgatttttttttcatccacattttttaatcatattaatgtttcgtactaaagaactttagttgaagaataatttcttacaaaagtttttattataaaaatgagtttacctcacttttaatttgtcttcatatatgtccattaaccatgctttaaaatgttttttctaactcttgtatgttgaaattgcttttgatatagtgttcataacacaaaaagctctaaaatagatgacacattatatgcccagaattctcaattgtatatcatgcttgaaattcgaagtgataggtatgtcattggttttgaatctattctgcttacaactacataatagatttagttgtttcggcatcgttaactatcaatgagagaaggcaatgagagaaggcaggaagggagctcttatattaagttactcttaaatgagaggaaatccttgtagacttggatttaaatacaatatttgaatacatgtatttatactagtctaagataattcaagatatttaaaaagataaatacatttttaatagttatacatacatctaggagacacctaggataactaaaagaacactttgttttcaaaattaatttcaacaccccctttaattatggaagtctcacaattcttgaaatttaaaagtgtgttgtagatgcttgcgaactttttgttcttgttaccttttcgcttggcacacaatgattttttgttatagccattgtcttattgtagctggatcagcttggtgccaccattttttttggatcttctatcttcatcttgagaagatttcacttttctcttttcatgtgtgatcttttttgtaccacaccttttcctgtgtaaggagttgttagcttgcactaagcctcttttaggcttcttctattattattttgatgtaaaatttcaattctcctgttggtttctattatcttgaacctcaatttttttttgtcacttgttattccagtattgtattttgggatttcttcctttcatctacacgcatgctttagtcattctaaacactcacaagattgaattagttccgataccatattagaaataacaataggataagggtgggaaggtaactcttacattatgttactctcaatgagagaaagtttgagagagaaaatcccgatagacttggacttgaatacaatacttaaacacaaatatttatactagtccaggataatttaaaaaatttaaaaagataaacacacctttaatagttatatatatagctagaagacacctcagagaactaaaaaaacatttagactttaaaattaattccaacaatgaatacattgcttttcttttcttctgcttttggcctcttttgttgccaacagatgtttttggttttacttaattttctcatgcacgtgaatttggaattgcagcaactaaaggaagaagcagcaagc

SEQ ID NO: 6976 - DNA, 2492 bp, Populus trichocarpa
  Intron number 1 from transcript POPTR_0016s03230.1 (locus POPTR_0016s03230) derived from phytozome v7.0 (chr-ID scaf fold_16; pos 1649014 to 1651505)
tgaggctctacagaacccacgtcaccgtctcaccagttagttctttgcttctttttttagggtttttgttgtttttgctcaaaatttcagtttttagcttatttggatctgtatggctatttgtccttctgggattttgttgatgtgtttggtgaatttgtgtttttatggattttttagggtttgtgattttgtctttgactttgggaattgaggtttggttgatttggaaattggtttatctaggaggttttagacagattagatctgcgttttaagtttttgggaattataggtttgttttgttgctaaataattgaggattatagatttgttttgttgctaaggaaagtctaatgtgatatgaacaaaaattataactttagcttagctatctccaatcctgtcagctactaacctaagtgtcttgatgtgataatttctttttggcaagtgctgctgaagggaatggattggtgctgaatgtggcttaaattcggttccgacttctttaatagttttctaattagtgacgataggtgtgttatttataatgaattaggtactgaccggagtgtcttaatgcccctaataagatttgcttttcacttacttggggcaagtgatgttgtagaagggaatagtttgctgctgaatgtagaatagatcaggtgttgatttcttagtcttctggatttaagtgcgatttgattattattgtagttcactactgcatctcacagggctttggtgcaatatttatattacagatgcagagtcctattttagatatggaaatgactactctgttatcaaggcattgttattgccactaactaaatgcctgtatttctgataaatgacatgagttatggtatttcaactaacatcccccttgttgtctgaccttgtgactccaataaagtccgaggccttggagcactggacgtgcctgctcttatgtaaacctggcgtatttttagaagtggatgcgttgccttgattaggattaagttgtgttatggatttttcttacgtttccaatgcgaggcaaagtgattggattaaagatatccacattggacagaatcggggctctgatatcacattattaaatagaattcaaccttactttccgtttactttctgaaatctcatgtgcctgttatgtttaacaaattaggtgctgttgagaatgccctttgtagttgggctagaagagagtattttattctatttgaagaaagacagttttgattgtttaggattattaagtaaaagtggatgttgctgctgtgtaacacagttttggtcctggaaataggggtggaactagaatttcatgagtggggtgctagtttagaatagtactaaggccaatttgaatatgaaatagcccaagccttaaaattttcagaattgttaggaataaaatggtaattcccaactgttttttggttgggggtggggggcctcccttagcctcaatgtagttccaccactggtcttggttagacactggtaaagcagagaaactgtcatagaatgaagggcactcctatatttcaatggcctgcagaggtgctccaggatccaactctcaagggaaaaaatgagaacactgcaaaatcaactaagatagcggcaacagggtttcaaacaagatagattcaggattaagaccctttgtacacagacacagacatttttgttgagtgcatatatgtctgttggatgtccaaccatggcaacctttcaaatcaagacactgacaagaactataggagcaatgcattagcatgaaaacctaaaatgctagatgatgttagggctatcattgtacttgaaagttctaggcatcaaatctcccttctgatattccaattgataagagagcgggggttgaagaaaaaagcctgtattcttccctgagctttttcttcaaacccttgcaattttcttaggatttggattgttggatatatagtttaattgtgtttgtcaagtacagaattcaattcaatgacagttgtttttttgatggatagaagagtttttctctctcctctctatgcatacttttgaatagctatcttgtttttaagttttgaatagggcatggtcttttgcacccgtgagcatatcggcacatgcattttgttttctaattcaacagttttttctgttatcaagctgcatcaaaacaaaactatagattaaggccaaatgaattcaatttagtttgccttttggcttacttttgtgctagctgaaatgtctgcttttctatgaagttaatgtagtttattggttaatttgtagtcttatttctaggggccttggtggtagtcagattttgctttttagtattttgtagttattttcattttcttcctatgaaaactattatggtgttctcttttcttttctgttattctttatggacttctaagatttattttgtttctcaattttctggatcagttttgcgg

SEQ ID NO: 6977 - DNA, 3321 bp, Populus trichocarpa
  Intron number 4 from transcript POPTR_0006s09730.3 (locus POPTR_0006s09730) derived from phytozome v7.0 (chr-ID scaf fold_6; pos 7157970 to 7161290)
tttgggaaagaaaccttaagagtcttattccccaggtcagttggatctctatttcttactttcttcttcttatgatgatgtctgtatgaattaagtatgatctcctatatttgatgtccactaactgtatttcatagttaatattggtctactggtggtacaattgtaagattgagcaatgggtgcttcattgcttgatctggaaggggtcttgtcttgttccagatttagattcttgcaaaatctgacaaaagtaaggtactttgtttccacatattacttgtatagaaacacacaaaatcaccgaagaaattgttattgtattatgggtgtaactgtgcaaaaacaagtgtcatgatgctttattacttgcggtagaggatgtgaaattctagagcaatagaaacttcattccttatcttgtagaagcaagtcatgctcgtacaggaatttgtcattcaatgcaaaaattatgattctaatattatttgcatggaggatatgcttgtttgtctctcctttttgtgtatgagcattgtctaatattattctaaaattatgattctaaaatcatgcttgtacaatatagattggagtgggggtaggggtggtgatggcaatcatgcttttgaccttcgactcggcacaagaaaaaaaaaaatcaaacattgtctatactttgtagatggcatggaggtaggttttgaacccaagaccttgcccctcttcttttggagagcactgctaggcatgccaaccatcaatataatggtcatgtctacatacatacatgtaattacatatcataggatgatactttatgtgtttacaacggtttgaatgtgaaactacaaactgaatcccaacttgtgtacaatcttcatttaaattgatgtgacatgtagcgtgaatacaagctaaggttctcatgccctaaggttacaaacctaagctgtagagaaatttagagaaaactctggtaatttataaaatccgaataataatctaaatctcaatctcaaaattaactagacatccttatttattctagttatagacctaaaatcctttacaggaaaagatttctaattaaaacttacctaactaatataatccatttggcattgggatttctaaatagtaaaatgataattaaactaaaattcctaatttaaataggaaaaagaatcaaaatagaaaaaggtaaataaagacattccctcgtagtaacttctaagcattatttgaaggtcttttcgatctccgatcatgaaattttaatttaataggaaacagggctttcagaatcttctgttaaaatttcagctcgattcaatagtcagattaaaaatcatgcttgatttaccatggactcttaaacttttcaaaacctaagaatcttaaccattaatgacaatgcaatgaacattattatgccaagaataatgaagaaatttctctacgtcagtcccctctacttccaaaaaacttgccctcgagtgatttgtcaagaattgaactcttccacttcaaataaacaaatacttcgaatatagcaatgtagccaacacgttcatgaagtagcatgtctttgacttgtgaactccaaaatttaatttatgatgtgtgtatgctaaagaaaaatccatatttaatgttaatactttatgttcctatggagtccgcttgtagttcatttccacattcttttacttcaaccttgagttcatcatcatcaacgacctctaatacttcaacccttgtataaaaaaaaacttcaagataatctttcataatatctttagaagaattgtcagaaattatcatatcctccatttccttgtttgcaagatctccggaatcactacaagatactaatttatgagctttctagatttattcttcaccattagtagatgaaacatcaacaagtagagtagtatttgtagcaatgttgttgtctctgttgtgatgttgaaactgtctactttgaagatgacatctcctccctaatttccttccttgctattttagaagattgaataaaagacaaataataacaatcgaattgcttatctattctatataaaatctcttcataatcatcctatataaattccaaaattaatgatcgtctcaaatcttgtcaagatgggattaaaagcataccaatatgagttttaaagtctagaaattcaaaccaccataagaaagtttgtgtgcgacaagtcttatcttttgatgataaggaaccttgttgaaataaaagtaagcttccaactctatctcagttaataaatcttttttttgaaaatctctcatcatagaatggaatctcataaagttcaggaataggttcggagtttggcctgccttgaggtaagtctctaggcaaattcctcttctttttcatgatccctatttgtgcctcccatcattcgaatgatatgttccaaattagtcaatattgccaccgttgtttgctcaaaacaatctagtttctgcgattggttccttgcgctgccttttgagccctcagatgacctccactcctgcatcgcagaatgggttgctattgtctttgtccatcaaacagaccaactgctctaataccaattgacacggcgtataacgtggatacaagctagagttcttaagccttaaggttataaacctaagttgtagagaaatgtagagaaaactttatagtattttataaaatctgataagccctaaggttataaacctaagttgtagagaaatgtagagaaaactttgtagtgttttataaaatctgaataatagtctgaaactcaatatcaaaataaattagacatccttatttattctagttttagacctaaaaccttttatagaaaaagattcctaattaaaacatacacaactaatataattcatctgacattatgatctctaaatagtaaaatattaattaaactaaagtcctaatctaaacagaaaaaaggattcaaatacaaggtaaataaagataatcctggacaggaacttccgagccatatttgaagaaacctaaaaattgtaaccattaatgaaacgatgtaataaacattattatgccaagaataatgaagaaatttccccaattcataaatgaagattttagcaaaaaagtgctcgagtgtttgatgataaagtgatatgacaagactgtttgattcttggaatgcatgcaacttgtgtgctatcttccttcgtttaaataagatttaattgcatgcgtgtttgatgatgagtgatctaacatagattgcgacattcctcagggtccaactataggtg

SEQ ID NO: 6978 - DNA, 1949 bp, Populus trichocarpa
  Intron number 6 from transcript POPTR_0001s22740.2 (locus POPTR_0001s22740) derived from phytozome v7.0 (chr-ID scaf fold_1; pos 21625041 to 21626989 reverse strand)
aaggctgttctccagttagaaggtaccgcatggtcttatatttgtttggttctctccatctttggtttatatcactgttttcttgctaagtttggttttacaagaattgttgactagttactggtctctatacaacatattctttatgatatttaaaggcctaaggctacattcacatgcatatattttatttcaggcagctttgtggatgtcaatttgggctctagtaaaaaattcaggtcatgtttacatgtggagaattttccagctttctaaaaaattcttgtcgagacaatagaaaactgtggatagatgtttggcagttactgttttcttagaaaactggaaaactactaaatgttgttctcctaattctccactttagaaaacaagggccatatatggttcagcagccatttaatctctctatcattccttatttttgaaacaatccaaatgcaatccttgttttctattttgaaaaattaattgttggtaaacatgttttcttgagaaataatatagaaagatgaaaagaagaaatggaaatttagtttctaaaagtaaacgccaccttatccttgcaatttcaggtgctgcataagttggatgcatttggtgtccattagttcactcatagtaagtttcttcaggcagacatgattgatggggttcaacatggtttctcgacctgctatctagtcgcttagctaattgtctgatatgctttttgggatttaggtactcgaaattgagatcatggactaccgttggtgaagttaatataagttttcaaagccattttctagtttcgttgaagtaggataaggattgggggcttgccatgttgattctaaatttgcctatttctcaagacaccttgaacaatttttttacatagttgaaaacagagtagaggaaataatgggaagaactgacactgctaaacatgtcatgtgaaatttgatgaatgtgttgatcaagtatggaaattgaaagttcacgaatttgaggatttgtattgctggttcctggatcttgattggctagatgaggaactagtggttaaaagcggacaagaggcacaaaacttacaaccacccataagaaactagaatagacctagcacacagttccactcctatgagtttaggattgccttgctaggagtcttgacgtattgcacctaagagggatgcatttcacaatccaattagtatcacatcttagtctcactgcaaagcaccaaggctaaactatcttactcaacttccatttgaaaaaaactatatgtagctccatgtgcatgggtccaccttttatctgaggtggcgcagctccaaggaccctgtctgtggagtcccctggaacatattagacattgtcccctctgggcccacctctgtggccctcacggtcttctcccacctctgtttgacaatgcctccctcactgtttgaacctcagacctctcataccatataagaggtagaaaaactaaagatgagtaccaattgagctgtcagtatgtgttcttggactgtcaagtgacctattctcagattcccacgtatcaataaagagattctccaggcagtcatgtggcctgtattactttgagcatatatgcagaggcggtcttgaactttgaagaaaactcctttggtcatactagaacaataatgttctgttaataactttcattcttttagctctcacagaccttatttatagatgcaagtaaaaatcaacgtggtagtttcaattgttggataaaaggataatgtatgaagagaaaggataggtaggaaaggttttttttttcatcaaacatctgttgatacatgcaataaggcactatattgcaggcaccaagaattcctagtaggaaacaaaatccctcaaacatcacatgatttgaaaccatgcctttcttttttccagggtgg

SEQ ID NO: 6979 - DNA, 3013 bp, Populus trichocarpa
  Intron number 3 from transcript POPTR_0003s15710.1 (locus POPTR_0003s15710) derived from phytozome v7.0 (chr-ID scaf fold_3; pos 15447955 to 15450967 reverse strand)
gagaggtgcggtccatattcttttttttatattgctgttatttttgcatatttctgttcattcattgattcacttattctaaatttgctgaagaaaagggctattcatgtaatttagaaattctctgatatagagcactgctaggactgctaagtatttcttttttacagtatgaaatttcttggaaaaatctctctatttcaatgctggttggcatgtctagaggttcactttcctgaaaccaagaccatggtggaacaaatttttcaattgtactgttaaccaatcttgcaaaaattgacagctacacatgccataaggaaaggcaagtttaatagctgcacaaatcttggtgaacatatctgcaattttttttccttgatctatttccgttctgtgaattgtttttgaccccacttcaagatcccatatttattcttttttggctatggactgtagaggtgagatcactcagcatttagttgagagatgagagagtcggcagaggaatgaaggtgtggtttctttgtagatgaattcgttagtacatcatcccacttaaacaaatgtttgagaaagaagctgtggttgatatatataagggtttcaactgagggtccttgaagattgacttggttgactaaaaaaactttgtaaggaaatgaccatagataagagatgaatttggagattttgaaatgatcaggatatttcagagtataagaactggaagattgattttctgttgagtcttcaagctagccataacctagcttgtaagttactcaagttcattgttttgattaccatagggaaaaatgactttattgactattttaaaaaggactctatccgaaacagtcagaagattggccgatcgagagcccgtagacatttcttcattgttgttacccaatagtatctcatactgcttatttggtgaaaaagtcatattcatatccatatgaccttcttcgttaaatatcttccccatgaagagggagcattaggtagaggcaacatctttcaaggtgacggttatatgccttttattcaccatgcttgatgcctcaaagaccttttcatttattcttgaattagtcccaggattagcataaaattgtctcactatctttgtaaagactttcttacttttattttccacaaatgagttccattgtgtatggattatcaacacgttaacatttgaaaacatccccaacccatcaagataaacttgacatccatgaacgacctttctcttatagaacatttgagcataatatctttcgtaggacttatgatttacaaagaaagatcttggataaagagggctatcatcaaaagggatttcaagaacattggatggaatgttgtttgcaggtgaggtagaaaagtgtgagaattcaccttgtgacaaaggagtagtttgagaagaggaaattacctaataatttaaagaggtaaagttttgtcttcttcaagggggcttttttggagatgcaaaagcaaagtgttttggtgggagaatgagtgttttgtgaagaagaagagaaagagagtaaaagaagaaatgtcttaagcctttgaaatggtcgaatactctttgaaagggtgttagaccatgagctatgtgtgtaagtaatgcatgaaaatctttaagctattatgtttaggatgaaaattcttaacttaaagaaagcttgaaatttttaatagcaaaagtgacctcttaagtatcccaccaccagtagacaatgacttgcacatatttttcactttttgatgaatttctctctccttttcccttcaggatatagaaaaacttgttatccagttttgtttttattatattctaggatattttaggtaattaaattcaatggtcatctaaccataatacacaccatatgttcattgaagtagtgcaaatctcaacttatatcttatgaacttatgtccttctatatgatgagaaatacggtggtggtgtaatcatgatatttacttgaaacattttgtggaccttggtattatgcgtacacaagatttctctttggagttagattttcaggaactcattaagagcactatatattcttactccccaccaagttaaagaacccctatatgtctatggtaagaatctaagggtccagtcatgctccactgttcttgaatctaccaagtgttatctaatattctttgaacaacgtgtgaatctttttttccctttcattttggccaaagccgatgttctgggctgtggaaattcaaacctgtgtctctaagggcctcgaccttgactactaaaccagtctgattgaccaatgatctgtatctttggatatgaatctttgatgtaccaacatgagaatcctatgtgaagtctctttgatgggtagagttcacatgcacttagtgacacagaatgatgtatggtaatgtgaaatcatgaaatcatgaaatcgagtaattcttagaatatccttcgatacaaatactggagaaatgtgttcatgatagatttgtctgtcaattcctttgtttactcataaagcgggtgaacaatatacacttagttcttacttgtgtcaatctgttccaagtttgtaaccttgcttggggactgtttgctctagccattgttcataactggttgcacatgttagttcatcattgcagtttaacatggaagtggcattacgtagaaattgaaacagatccattttgttgaagaaataaaataaagcagttgattctgcatttctgagttgttctcatctgcatgtgctctaagatgtgcgcactttgttgcgggtctgttctgtaacttattgatattacatgctgacatatataggcactgatggtgcacgctttcttgtggttctgctttttaactgactaatatgcaaactgttacgtgctttgttatggttatgtccttaacccaccgctattatgcactgacacaggctcatcgtgaatcatccgggacggtatcatccag

SEQ ID NO: 6980 - DNA, 4391 bp, Populus trichocarpa
  Intron number 10 from transcript POPTR_0002s19740.1 (locus POPTR_0002s19740) derived from phytozome v7.0 (chr-ID sca ffold_2; pos 15669613 to 15674003)
gtggattcccattgctaattttctgggtgttcttcgtaagtactatgaatctctcatcaatgcttctcttgacaatcatgttttggactgcaaaacgcttctctaaattgtctaccttttttttttaaattttccttgcttaatttctcatccatctaccatgtaagtacaatttgcatgttagcatgtgtttggggcagctttatgcacgagtttcagggtatttttgttctttatgtcctttgtttaggttgctttagaaatatgtgtaattgaatttgttttacttaaacaataacgatggttgaactattttgttctttggcacttcctcgtgcaagcttagccttccttatatgacacaactaaaggataacatgatggtctttttgctgaccagtccagattttcatttcattttaaaaattctggaatggtttcttcatcaggttccctatgacatgcatcttttgctagaaaacacacttcaagtgcatggacttgcttgatttttcaaccaagtatttcaattgttatttttttcaataaagtttctgaactcccaatatgtgatcagtcagtttttaaaattggatgtttgttaaaaattaaataatttggcccttaagtgataacatgacacttccaaaacgagggataactagtaaaacactcaccacacagcacttgattgaaccaaattgagaattaaaaattttaactttaaagaaaaaattgagagttgaaacactccattgagaaattataattaattaaatgcttgattgatcaccaattgaatgtagtgaagattccttaaatgtaacatgattttgggtagtgaagtatttgtgtagcgtttgattagtgggtgtaacctctaattttggtggtgaagttttgtggagtaggctttgctgaatcacattatattttatttcccttttattctgtgttattgcttgggttttgcacagccggtattagaacctagttcgaggttgtttgaagtcttgtgcaaaacaattgaagatggcgaggacacacattggcgtaacaaaactggagatcaaattgtttgatgggaaaaacaatttcgttctttggcaaagcaaagtgaacgatgtttgatctttcaaggacttgatattgcccttgaagagactaaacacaaacaattgaaggatgctgattggagcttaattcagaagagagtgtgagtcagattcagattcgattggctttggctcaagaggttaattacaatatcctaggtaagttgacacctagagacatatgggaaaagtgggagagtttatgctttgaagttgttgactaatcatttgcttttaaaattggatttgtactgcttgaggatggatggatgaaggaataagtgtgcaaaaccatttttttagaattttataggttgatgacatgggtaattaacgcaggagaaaagattgaggatcagagcaagcctttagctttgcacaagtcatacaagctggtagtgcaaatgatactagttggaaggacaaattgggtttgaatgacatgacttcaattttactagaaaatgataggtttttgggagtagaatataatgtcagtggtgataagacattggttatagaaggttcctttgaaaacaaaattatgatcatcataatagggatacgacacaaggaggtagatatgataaaaataactctagatcaaattctagacctaaagtggattacattaataaaaaatgcttttattatcacaaaataggccatattttgtaccattgtgagaagatgaaagtcggcttagaagagttgaaacaaagtcgcaagaagtttggggatgctatgattccaatggtagataagagcaataatggccatgttctcatggttcgtaaaggtaagaaagtgttgaagaattcagggatttttagattttgcatgctcccatatttgttcaaagaaagaattgtttgatacttcctaagaatttgatggagattatgtagtgctagtggatgataatgaaattaaagttgatgggatttgatagtgttaaaattaagatgcatgactatacaatgaagactgttggtgatgttaggcatgtgtcaaaagttgaaaggaatttagtatcatttgggagacttgattcacatggttataggtgctcaactgaaggtggagttgtgaaagttagtcgtggtgctttgatagtgatgaaaggaaaacttttgcataataatttatacaagttgataggaagtgcaattcaaggtggagcatgcaatgaagtgcttaatgaagtatacaaaatataatatttttttagaagagagttggttttgctttgatggatagtggtaaagaagatttttcgtatgaagaaatttgcaaggtataagcaattggaggcggagaaaaggggtgactgtttcaaacttggggtgaaaagctcacttttgtccccaaactttttaaattataaactttggtccctacacattgaaaattcaattttggttcaaaacttcatatttttttttttatatttttcatctctagtttgagagaagagagaaaaaatggctggattccagtggtagagagaaagtcttggttgacactgattttttccatgaaaaatgatgaattttatgtcaataagctccattcgatgagggaagtttatgttaggtgttctttgcccttaaccttacttaagatggtagatttgaacttagagtctttttttgattttgggctgatctttaggttttttggggccatgagtagttttttcaaggggtataaggtgttttttaggctttttaggtaaaaactggttgaaaatggatttttcgggtgtaaaaacccctatcctaactttccggttatctttggtcgctgtaatctaggcattgcttgcaattttttttccaaaaaattcaggggcaaaggacaggtcgtttgccccataaaaagagaaaaaaaattaaacaggcccaggcgcgtgggctactccaagcctgcatgtctggacctttttttgtcctttttttatttctttttttttaattggtttttttccccaatttgattattcccaattgaatctttattggttttttttttggcttattgtttttcaatttcatactttaatattttgttgatttttaattgagtaacgtaatctatctcggtttgatatctgtaggtttctcgtgatctcaaacaaaattcttgatatttagttggttatcaattttgtgagcgtctattttaaataaaaaattatataaaaaaaatttattgaacctgattgagtctatgacacgggttacggatttgactagttaatttcggttagttaggagtcgggcttcataatttgtttcggttgcacaaataattatagatttatttaaataaatgctacataaacttttcaatttatgattgagatttttttatgtcaaaaaacatgcaggaaatgctatcatattcattttttagtattgaattctttttttatccgactcgcggtgaagtgcaagtcaagtagctagttggtaattgcatggtgtggttttctagacaagaagggaatgtgtggacatattttgtttagaaaaatggacttttttttattggagttgaacttgaagcatgtctcgcaacttgattgctagtataaaaagaatgtgtcatgaatagtttatgtgtgcttccaatattgatggtgtgttgtggcaaccacaaatcttaatagtagaattatttggtgcgcactgtggtgggttttgtgaaagcgtttccttcacgtatagttttacacaacagaaatttgcgaggcctggtagttgtgtagtgaagattcaaggttttgggtagtgatgtatttgtgtagtgtttaattagtgggtgaaatctccaattttgatagtgaagttttgtggagaaggttttgccgaaccatgttatatttttgtttgcgtcccttttattttgtgggttttgcataacaaactaaagttttttacacatcctatacctgcaaaagcaagttgtcttcttcctttcgtcttttaaaaagcctatctttatgctactagactggaaaattccccttattttgtaaattttaggtaattatcatacatgtcatcatgaaactattatagttggtgaaaaaatgcttcattcctttaatgtttctatcacccatctaatcaattcaacattccttgttcccaactgtccttatctgaattccctcgacttttgattaattaaatatcacttacttaatctttcttatttggaagctttgcatctaatttcttgaaatgctttaccaaatacaggaattat

SEQ ID NO: 6981 - DNA, 1633 bp, Populus trichocarpa
  Intron number 1 from transcript POPTR_0004s21100.1 (locus POPTR_0004s21100) derived from phytozome v7.0 (chr-ID scaf fold_4; pos 20380105 to 20381737 reverse strand)
aagttgagggcattgttgtgaaacctcctgtaagtatttactcttttttttgggtttggggttttgggtttggtttttttttttcgtggtgatctgctttgtttttaagtttgactgtttttaagggttttgtgattctgggatttttttaaaattttaattgtagtggaaatttgatttttttggctaattttgtgttctcgaagtgggttttggagatgggtttggttaaattgttgtgttagtgggttttctagagctgaattggtgtatttcacgtgttttttggggtaaagggctaaactttctgcttaaaaatattaatttttgtagcttattttgtttgtgctgattgggattagatgccctcagtaatggtttctgttttgggggttttgtaagagtttaagtgcttcttacataatcttggtgagttgctgtcttaaaattcacgtattaggatccgttgttcaggaggtaggaagacgagggggagggagtagtaaaggatggtaaaaagctggtgctgaatgatacaagtggtttaattcggtgtgtggtgtctggcttgtgatagcatacggggaaatattagggacatgtggtaaagatttgtgtctaagatgtaaatgggacacggtaatgatgcttaagtttactagtggaacatttaaattgtaggattcaataacttaagtttccttatcaatttgtcttgtttcaagttatggtcctaaagtcaagacattacacacctaactgtttgataaatgatgccaaggctttgatgagggaagtagaccttctgtcaagttaagttgatttatgattccttaacatctactgcaaaaagagatgagtactttgcctaaaaaaaaaaaatgctgcattttggttgtttctacttcaaatgctttctgagaaactatgacatcttattgtgatgtatatgcctggtaaaaatggctcgcaatgtagcagtgccattgattactatttttcccaccaggctctgaaagttgtccttgcctattttccctctaatcaaggatcttttgatgcctatgaagtttctggaaggcagcatgactgcgagtccattatgatgtaattttggaaggaacatgatgcttatgccatgagcttgtttcaagttaagtgatgaaggtggctcagataaagttgcttctagcttgccctttgtggtcttcaagcatgtgatcctcctgtgcttgcattcaccatcctgacatgtttgcttcttgcagaatacttataaacacaagtcttgatgttttatctttttctgtatgatgttttcctattctcagaattcaattatcccttaaatatgtatattgggaagtgtctaactcttgtgctttccttgacactcatttttactgaacacttaggatacacaatttggaattcatgtatgtttcttatagctttcatttattgatataagtttggctggttgtgtcagctcagaggttatacaagatatattctgtgtactaccttttaaaaagcaaaatctcatgagctcatttgttttataattgtcaacaacttacagtgcgataatataagttaaatgttgtatatcagacattaaagcggaagagtg

SEQ ID NO: 6982 - DNA, 1846 bp, Populus trichocarpa
  Intron number 20 from transcript POPTR_0004s06180.1 (locus POPTR_0004s06180) derived from phytozome v7.0 (chr-ID sca ffold_4; pos 4907180 to 4909025)
ctatttcagagtacagaaaaaaagacaaaaaggtttgggctattttacacggatattttttgctttgcgttggatgattgttagatgtttatgtgctgatttgatttaaaatttgacatcatggggactggggtctttgttttacggccaaaaacgttttctacaaatcagacttctataccgcagcctgtttgtgttcatttcaagattcttagccactgttcgaagagtgttcaactagtttggacttcctgcatcaaaaccaagtgaataatttccatatcaacaagtcttaagtgcttaaaattgaaagaagcaaaagaggagaaagataaagccaaggagcacaagaaaagaagctgaataggagaagaaaggagcggaagaagagaggaaaaaattaggggaggaaaattcaaattctgcaattttttctcaattcattaaaattatctaacatgtagaaaaattacatcatctaaataataaaaccctaaacaaaatcaaatgtaagcttaaaaccctctgaataataaaagttcaacaaaaaaacataaattaaagtccattaataaaattaaataaaattcaataacatgttatgtgcctagtctccaattaaagagtgatggttgagctattcttttttgttttcgttatgtgtgtatgtagtccatgacgcccatgtgatttccccactagctctcctagagttggagaaactcgaccttgtcgagtatagtttaagttggctccgataatgctttcacagattaagatcaagttgttgtgatgtttttttagcaattcaagtatagtctgaatttgattgttttgtctatgaactaggattcactgaatctagtattaatatgttttttttttatgtcaatgataagaataatagggtaagagtcttaaaagaatcataaggggtaaaggtcttttattatatatataatgaggacattcatgttaaaaatagagttaatatcaaaattgttatagattaatgacataattttttgactcgatacatacagatgtggatttggtgtacccgccgtaaatgtttacattacatttatgctctataattggttctttggccaggagtgcgatatttgcacttgtaaaataaaatcttgtttccattcttaagggccataagaaaacttatggttatactccttagtctttactgcattttgactttgcataatgcacaaggaaaacaaagtggaagagaaatctcaatgctacttaggtaatgtttggaaacgcggttaaaatcgtgttttttaaaatttaaaattttattttttgtttaaaattaatattttttatattttcaaattgttttgatatgctgatgctaaaatgatttttaaataataaaaaaaaatatttttttaatgcattttcaagtggaaagtactttgaaccgctgccacacttctaaacaccaattgatatgatttttttcacctactatgtgttaagacttgctatgagtgatatgatttttttcacctactatgtgttaagacttgctatgagtgatatgatttttttcacctagtatgtgttaagacttgctatgagtatgatctctcaatcatcgcatatgatgcttgtctcagatagttgttcctggcacacggcaagcaaatcatgagttgattgttcaagctcatttgacttgtcaataaggaaaacaaaatagggccgcctttagcattgttataaaacaaacttaaggttttggtacgaattcatgaagttgttcaaccgatttctgtttttgacaggtcttgaaggaatagaaatccaaactgtttctttt

SEQ ID NO: 6983 - DNA, 1721 bp, Populus trichocarpa
  Intron number 1 from transcript POPTR_0003s15350.1 (locus POPTR_0003s15350) derived from phytozome v7.0 (chr-ID scaf fold_3; pos 15158536 to 15160256 reverse strand)
actgttggagaagtcgagtacattgtgtttttgaggtactaactatccatcccttcaatatgcttttatttacgtctttttatccaagtgctggtggagaagtcgagtacattgtgattgatgaggcagtttcgctcccccccccccccgcttctagcatgtgctttcggttcttgtctctactcaaaatgtacaagttggtccattgagacggaaaatgcatccttcagagaaaattgaagataatagagcttgccaattcttttgaatttcagctaggaaacaccgctggaagtcccaaaaaacagtaccctgaatagaggccagaacacatcttatcccatttttgtttccctcgaaagagaaaaaatccataaaaattccagagcaccactccaaccacatctgctaaagaacttcatacagaacatatctctgcaagggtttatggtcgttcttcttttcaaaacctggaaaagacattaccgatagatcttatacttgattagagatcaccaacaaccccgaataactgaggaaagatgtgctgcgtatcccaagcatctggatagtgcaaaaagaattgctctgcgtctgtccattattattgcacatcacacatgtattaggagaaatcttgttatatagcctccttcatgcagatgttgttggtattagttccatggtctgcatcacccaaatgaaggccaagcttcagataaaagtttgtttttttcagacacaagtggccaaagaaaaagaggaatattagttggggagtggaagcaacaaaatgaaatcctataacatgagttgaggattagaagcaacgaatcaaatcctatattttcctaccatttgggttttcagaaacatggcagcccccatattacctttgctatgctgtagagaaaaagtggcaacgatgaaattagagcgatcataaagatggggaaacacaatggtgaaagaatacaccttattaatagttcgctctatagataattgctgtaagggtgcctgtgaatgaacttaaaaggattcctgtatggctatttaacccaaaagggttaaatgttaacctttcaagaggagtgaaggatcaaggggaatatttttttttgtgcttttcctccaatttttaaaatctaatattaatttattaatttttcttttatgaaccacaagtttagtattatttaattatttaatttgatttaaaatttgatttgatttatattgggcctccttttaatccttatttttttcaactactaccaaacattcttaacattttttacagcttcttcgccttttaaatcccactccattaatatttctccaaatttctaacaccatactaaacacaaccttagaggcaagaaatcttttttctgagaaatatagtaaaccttccaaatgacaaaagggtctctattatttttgttttctctgaaacattaaatgttcagcataatctttcatctgactggctactatcgccagaatcttacaacggcattgatgatgaagaatgagggtggcccaccctaaaagagaaaaatgcacttttctgccaattgtttctgtagctaatagaatataaatatgacagatttcattgcaaagttttgtggtttttttttttttaaaaaaaaaaagccaccactcggttttaataccatttgctgtcttgacgagggaaaaatggcccaggaagc

SEQ ID NO: 6984 - DNA, 969 bp, Populus trichocarpa
  Intron number 1 from transcript POPTR_0001s44110.1 (locus POPTR_0001s44110) derived from phytozome v7.0 (chr-ID scaf fold_1; pos 44582443 to 44583411)
aacgcctatcacttccttctctctcctttccacaagtacgcttttatcttctatatatataatgctctcgaatttcataatttgttggttttttatattttatgtatgaaatcctaaagagattttctatagcgcagaatttgcttctttgtttgctatactaaaatgggttttgcttaaactggagtttaattgctcgtttagtagttggttaagaacttcatagccaaaacctatcaatttgttgtgatttttgtctgaaactacaattttttttgtaattttggaatgttgatgataatttccacatgaatttggcaaaagtgaaaaaaattgaagttatgattactgtttttgtttctcggtattgaaatgtttgggctctttgttgatatataactattactgtattagcacaaattcatgttcttttcctgttttagcaacactaggatgtgagatatttatagaagaagatggtggccagtgaaatttttgatttggtagcttaacaataggtgctggtaagattatgaatattagctttttgtgttttgtatttgtctgttgataagctgtgtcctgtttatatgattgcaatcttacaattaatttctacttcgctagagtgatgatttccaatgtttaacatgtctggggaataaatgaggttggcagtcaagtaaatttgtaaacttggtctctgtcacagcttcgttcaatgcattacatttatttgtttgtatttgtataattaactctgcgagttcattttgtcatacaataagatagcttcaatgttgttttgtgatgtgcttactgctagaaattagtattcctttcatgtcatcaaacttgtagattgctgttttatttactgtaatataccaaatttcgatgatacctgccacagtcacttgatagatcgttctgcttgctttacatgcaggtcaagtcaccagagaagcc

SEQ ID NO: 6985 - DNA, 1337 bp, Populus trichocarpa
  Intron number 6 from transcript POPTR_0002s15330.1 (locus POPTR_0002s15330) derived from phytozome v7.0 (chr-ID scaf fold_2; pos 11476766 to 11478102)
agggtgcaaggtactgtttggaaaaaaaataaatgctaactgtttagttcacgtagccaccttattctatataaatataacattgtaaattaatagctagcagaataaattgcatgtgtatgtacattgcatagaatagtatatattaattaaatgagcacaaaaattctttgatttatagataaaaaattgtagaattatcttgagcataaaatcaccaaactacgtataattatatatatgcaatgaaatatataccaaatgtttaaattatatctacttgttgatgaattttggatgaaataacaaaattaaaagcaatattgtcaagaattaaaaaattatcttcaaggctacaaacaatttgtatgcaactaatctcctggaattccaacgacatcctagaaacttaaaaaaacactcaaattccaaagttctataatgtagacagcaagtaggaaaggaaaattgaaggaatcaaaaagctgtaggtagcagaatggttttgctatgatgtttagtagatacaccgcctagagcacctatttatacaagaattttttttttttttttggggggggggatgatatatgaattaattctgtttttttatgaattttttttttatgatgtatgaatttaattctgttaaatagaatttagtttcactattttaactctttaaatacttgccataaaatacaaataaaacataacattttcctttataaaaaaaggggggaagtttaggtggtggaaatatatacaaataaaacctaacattttccttttttttaaaataaaagtttatgtagtggaagttaattttgattagattagttacttaattaatgagctgataaaaaataatttttttgagttaaaaaattattttacagttaacttaaatttaagctttggtgcccacaaagcctaaagttttcgttgttttataggcctaattttaacttctcaagccaccattatctaagtcacataaatcttaattttttttttaatatgagattgaggttttggatttgaaaaaaattatcagttaaaagttatttgaaattaatttttttatttacacataattaatttaaaatatgtgaatattttatgttaaaatatttatattaaaggtcaattttcaataaatacttcacaaatgtaattaaatggatctcacatttagtttaacctcaaataaatatatctgaccaaccgtgttttaaatcaatttgctacagtttctgctagttcgtttgtcaagcaatatgcagtgaaagatttattaggtaatggttctaaacttcatcacaggttctgtgccg

SEQ ID NO: 6986 - DNA, 1098 bp, Populus trichocarpa
  Intron number 19 from transcript POPTR_0017s12820.1 (locus POPTR_0017s12820) derived from phytozome v7.0 (chr-ID sca ffold_17; pos 12997963 to 12999060 reverse strand)
ctcaaggaatcgataacaagcaggttggtagctacaattaaggttaattatcttcatccctgtttgattggttagtctttattttcatattctatggctgcaactttacaattgatctgacatgagaagctaatatgcattttgttttgcaaattatttttttcaagctgtactttgaactttaggatttgcggatggtatccatggagagggtattccatgtttcttcctatggaacttaggttttaaggaaaagaatagtatggcctaccatattatgctcctgactatcaccttctattcaaatagcttttttgtagattatgaaacaaacaagttcctaaaattaatagtatgaaacatagttttctcttctgtgtacaaagagctctgccagaataaagtggaaatgtgaatgaatccaaaagttttgcagtggtctaagaggagaatttagtttgccttgcttatttgattggatttcagctttatattgctgatatttttgtgagccttggtggattttaatcatctagtattgcattaaagtctgtcatgtgatgctacatataatatgtgcagtataatgctggatgcatatgtggcatttatcaggtgactcaaatgagacgatgctctggttattatggggagttggggtctaggactgaaggatactgagattagtcacatttttcatgtgcatgtagtgtgagcttttgttaatccttgttcagtaattggcactgggctgtttccctgtttgtattttgccgttatacgtgtataggagatgctttgcttgtcagatttaatataataaatcagaagagatgaacgacttctgcacttgcatctagattctaatgaaagttctttaactgtatgaagagaattgccctgtacatatctgttgcatattccactggctataaatgttgttgtaattgagcccatctcatgttctgggtgtgtattttttttttcatgaaatggtctttaaaaaatagaaaatatatggaactggaatataaagtagatactaactccatgccattcacagctagcaggccgctctttgttctgtcttggattgct

SEQ ID NO: 6987 - DNA, 411 bp, Populus trichocarpa
  Intron number 1 from transcript POPTR_0001s07810.1 (locus POPTR_0001s07810) derived from phytozome v7.0 (chr-ID scaf fold_1; pos 5899408 to 5899818)
cggcgtcaccactgatctcactagttgcagcggtattgtggattctgagttttgatagatttttttactaatctgattcatgttgtttttttgctagggtggttgatggttttgaacctttggggttcaagaaattgcaatttgatttaaaactatgttaattttgtttccgataaacagaaaattaaagattgtagatattaattctcgtctttcaacttatggtcattcagattttcttgatattctcatttttattttcacatcaaggtggccgattccgatttttctcgattagaatattatgttattttttttaatatacgttcttgaacatgaaactaattgttttcttttccttgcctactttttacagcttcagctccaacgccagctggttcaggtaaatat

SEQ ID NO: 6988 - DNA, 2160 bp, Populus trichocarpa
  Intron number 1 from transcript POPTR_0019s13610.1 (locus POPTR_0019s13610) derived from phytozome v7.0 (chr-ID scaf fold_19; pos 14489456 to 14491615 reverse strand)
gtcgtattgaatcaagatccaccagctttaataaggtaaagatctgtgctttactgtttattttattattttgggtagttgttaatgtgtttgattgctgaaaatgtaggaattttgaagggaatcagtgttttgagttctgggattcttatgatttgggatttgaagatataataattttaattcggttttggttggtactgttaatgggcttgatgaagattgagatatacaattctggggttgtagctgtattatgacgtgattgttagcttaaattgctatttttgcttgtatgtgcttttgtcctgttgggtttgtctttatgtgtagaatggaatttttttttgatccgtgactttgcttgagctagatggatttataccctacatgatagaagggctgcattaactagtagatgtgaataaattgtcttaaaatccttagcttgcatttcatgattgtattcttaggatatgccatatgcttccaatagcttaataggtactgttccttagtggaggcaatggctttgatccaggctggtaatttgattcaggctgttgaattaaatgaccttcttaggtattgatttgagaaagttatgtttaaggcactgggtgtacgtgccatacattgcttcaataccgtgcatgtgaagcacaaacaaagttagcagggcattgagattgaagggattttgtataaataccttaatggggcacttgctccatgtatattgtaatgatgacaagagagggtagaatatttaggcattgtttggtagcgcggttggccacgctaccaaacgagcagttaataataggaggttatactgtatgggaaaatgagagaagaatgagtaataggtagttgttatttgtatgcagaacaaattgaataactttttttggagatgagtttgataacttacctgtattctatggggaagaattttgagagaagcaaacagaattatatttatgaaagatctgttcttttcagtatttttctattcaagtatccaatgtgctgctaaaattcagttttattagcaaaaggaacttgtaaagaaagatgaatggcttgctatataagaagaaatatgtgtgttttgaggttttatttataagagcatcaaacaaactgtgatctaaaggatttgagttgtgtttttgaggacaatggtaagaaatgcttatcatgttttaacatgcacctcatgtgcaagctttttgatgttattatttcggagacagctgacatgccacatattcgtgatatcatagaatacctggcattttgtgactttatgtcttcatatattgatgtgattggattttttttatagcaactggtgaaatattctgtgttttatatcaatctgcataagatggggaatcaaatggcactaaagttatttccctctctgttgtgtttatattctgtttagtttagttttgttgcttttattgtagcaaacactcttcattctttgtaaactgttattttagttgattaatgaaatttttgccttttcttcttaaaaagaaaggtgaaatattgttgatgtataacaaccttatggacaagtgtctccctggctcctctatcattttctttgagtgtaagttaaactccagaattgggcaatgatgaaacttgcgtacctgggtcatactgctgaactgtagattagaaaatgattaatttacacactaaaaaaactcacaaagagagagagagcaaaatagcccaaaatttgaaagtaatggcagctaccccactctcagtttgtgtgttttccatgccaccgaagttgtgatcttcaacaacactctacctagtttgtcatgtttgttttttttactctgtattttctttttaaccataaacttttagaagtgaaggtatccgtgtccatattcacaataacagcaatttctttcagtagtatatgcgttggatttactgctatattcagcaagtgatctcaaactgtaaaccacgtgtttgagcttctgagcatttatccttaatttttattttgataataattatgctgtaatccttgcattccctgtttctgctcctgtgccagcttatctccttgaaattaaaaactctgattctttttctttctgcagtactataccaagt

SEQ ID NO: 6989 - DNA, 1336 bp, Populus trichocarpa
  Intron number 9 from transcript POPTR_0014s14660.1 (locus POPTR_0014s14660) derived from phytozome v7.0 (chr-ID scaf fold_14; pos 10727202 to 10728537 reverse strand)
gcagggaatattaaccgatctctctcacagcttgggtatggtcatatcttatctcatttactgcttttttttcgtgctgagtttcaagttgctgtaaaatcagttgtgcctcaaaaaaataatattgttgtccaacaaaaaatcttctgatttttttttcaagtttgatactacagcatatatgatattgagtttcccagaacagcaaaacatacaataatctggcacttgtttgagcttttaatttagtactacaattgtgacttgtaaagatattagtataaactgcctctgaacagttgtccgaagttagttcacctacaaattaaaaagaaaaactctttataaagaattgttgctcatggatgttgttatgctactatctgaagcagatacatagatcagatgggaaattttatacacacatatgaaaaaggttttggttcatgataaagaacaaacttaataaaggaactgctagcttattgttatgttcaaactttcaaagaaaagacttatcaatgcaaggacaagctgattgtaatgcccgtgctctaaactgtggaccatccaaattaattattatgattttttctctaaatacaaaagaaccaggtcaaatctatgcgaggattaagtaaatcactaaaagaaaggagatctcatttgatttggtttggagtctgtcctgcccagttttatgatttttagaaattctgaaattttgataatctatttgtagcaaatccataactaaactgctggttttaaaatatacaatcaaattgacagagtgaaaaatgccatccaaattgggttgaaaatagttagcattagctagcagtcttctctctaactgtacaccttttttttttttgagaaattaatgttaatgaaaatttgctatgtctaaagctcagcctggattttctttgttgataaaaaaaaaaaaaacgaagaagtgcagtgtagaaacaagaccggtagtttgtagagtgcttaaaagaattatgtaggatggtctgggggtagaagttaagagcaaaatgcattatacatatcagaatcatcaaatacatatgattagggaataatctatttggctgcttttgggattccagctaaatgataaaattcctgattgcattttgttctgtcaatctgttctatgatgtgttttcaatggtcatcagaaaatgagtttgagcttcttaataggtgcaatttctaatgaacatgttcatctaaccatgcatcaagagacatttccctttaatggtgaccaattattgtatttgcaggaacttgataaacattcttgctgaggtttctcaga

SEQ ID NO: 6990 - DNA, 4899 bp, Populus trichocarpa
  Intron number 2 from transcript POPTR_0001s38450.1 (locus POPTR_0001s38450) derived from phytozome v7.0 (chr-ID scaf fold_1; pos 37568526 to 37573424)
agaccgaaaggacacaaaaagattcagcctaactggtatgtctcttttcttagaattaacatggtatcgacagaacttagagacagacgctgagttctgaaagatttaaagcactatggcatcagaaaatgtggttaatattgtttaccattctttgtcttggaagattataagcagtatttcttagataatatgcaaactgaagtatcagacttaacttatttacttaaactagtggagaaatcttgcgaggctgttaatctggtaacgtctagaggtataaggttatgctcaatctgtatcagttttctgaagcccagatctaccttcctagacaggatttttttgtgcagtttcattgtttccttgggtttttttaggataaatgctacccctctctttttagaaaacagtgcaagtgatgcattttgtcttgcgaacacatatttattaaatatgttgcaattaaatgtatgatgcatgaggacatcaaatatagtgaacattttcataaaatttcttgagattacacatcataagctttccgaatattgaatgctgcccttttgtacataatataatggttctaattgccctttctcttgagaagttatttaattatatacgcaagattgccagttatacaaggaaatttaaatctctacgtgctaattacatagagtaattttaggaagctatacatctaaatctcttcttctatttatgagagtatttacaacctaaattaacagctattaacaaggcataatttatggcattctattgaccctcccggccatagtttttaaacccagcccggcccggctggtcgacccgggacccggccgacccggggctggaactgggccgggttgaagaaaaaatagaggtgacccagcgggttgacctggtgtgacccggcaagacccggttaaaacctggttgcaacccgttgatttttgtttttttactaaaacgacgttattttaattaaaaaaaataaaattgacccaagcgacccgatgacccggtcaaaacccggaactcgggccttggatcgggccgggtctgaaaactatccccggcaaattgatgtgggttatccataagcatcaatttgtttgtaagaaaattatgttgcaaccgtgtgagagccttggtaaaaatatttgccacttgaagattgctagacacatgaggaagagagatagtttgagcttcaaacgccttacagacgaagtggcaaccaacctcgatatgtttagtgcattcatagaagatgagattgactgaaatgtgaatgatactagtgtttatttgcatgaagagaagtagggccacctgaagagaagctaagttcaggcaatagccctcagagccaatgtatctcaacataagcttgggatatagccctatatttggtagaggacttagaaacacaatcttgttttatacttttccaataaataagagtcggaatgagaaacatacaccaacctatagtagaacatcgagtgtcactacacccggcataatcacataatcaaatatcattatatgctaaaagatcaagtgaaataccaacaagatagaaaagtccctgcaaagctatgccatggacatagcgaatgattcgtcgaattgtagccatatgaaggtgccgaggagaagccatgaactagctaacatgttggaccacataagaaatatcaggtttagtaattgtaagatagaccaagttgccaaccaatgtatgataggcttcagggtttgataacaaattaccctcttctttgagtagcttgagattaagttccaagggagtaagtatcaagaggggtagagtcatggagaccaacaacaaccatcaaatcctgggtatacttgtattgtgacagaaaaatatcatatgaaccagcttctaaacatcaaatcgtggacaattaaactacaaatcattatctcactaattaaactaggcagcttctaatcaattggatacccaaaaaaatcattctaaccaccaccaaattgattatgacagacaagatgaatgtttactatttttcttattaacaatttacatatcaaattttgtctagtatgtacatttgctcatgggcataaattataccaagaatgacaattaatccctagaaacttgtccagaattaatttttttaattttattcccctctatatcttggtttttataaagcatacacacctaaaaatatgaagatttgtatgaggcctgaaatatggagactcgaaatccaaaactggggaaggcaatctatttataagaaaggttgttgtggtaaatgcttctacccaaaacttaggaggaactgaagacttaatgagcatggttccgacaacatttagaagataatgattctttcgttcagctactctattttgttgtggattatatggacaagaatgttgagagaaaatatacctttaaattgcaagaaagattggaacacatgagatagatattctccactcgagtcggaccaaagaattttaacatcaactgaaaattgagtgtcaaaaagagctaagaatagtttgaacatatgaaaaacttttgatttgtgctgcaagaaatagatccatgtatatttgctgtggtcattaatgattgtcagaaaacatttgtattgggcatgagaaataataagactaataccttaaacatcactatgaatgatctcaaaattataggtggctctatttccttcagaaggaaagagttaggttttacttttgccaagtttacaagttgcacaattagaaaacacaatggaagaagaatactctttattattcaatagaccaaatttcaacatattagatagaactttagaagataaagacagtatagagaaataaggcaaactttgtggaataggtagttgtagataaaaaagacatccatgcttaggccccttctttatcaattgcctgacatttgatcctgcacaacaaaaaccacaagcagtaagatgtacatcataattttggtccacaaagctggccaaaagaaactaaattcaggtgatataagaacatccttaaagtaagaagatgtatcaccaactgctatattgggtaaagcactaccattggctgtttgaatatgtgaagagctacgatattctcttacattacttaaatcgtttagagaattattcatatgattagaagcacctgcgtctaagatctaaaagagatatgaagaaccaataccttgaagacccaatgttgaaaatgcactcacaatcatttcttgcattgtttcctgagttagaaaaggtgctagagactataaaccagcaacagaagttacaataacaagcatagttggctgtaagtcaccagtaacaacaacatgatagaccttgttgaagcgttaaggatgaatagtacaatccttaataatgtgccctgactacttgcagcaattacaaaattcttgaggatagttaggagcattatgaccatatttcttgcaactatagcattatgtggtgctcatgtcacaacccttgcccttgccttaagcaacataggcaactgagacagtattagaagcaacacaagactgctccataatatttcgagtattgagcgttgttcctcacgcaagagttctcataacagacctccaaagtcagaataagatctctatttactagaggcacaaatagattcaaagtcaagcctctatttcattagaaattgatctctttgtctggttttgtgtacgtgttgtattatagagaccatggttgcaacaaggtcggaataatcatttttaaaaatcagaaaaccagagtagtagtctttaattgatagatccccctaagtatagttagcaatggccaactcaagctggaaacgcctaacatttttgtcatagttatagacttgcttgagataattccacatagcatttgcagacctatgaggacgtagagataataagatgtggctttatagaaccaagaatccaggatatgattttattatctttggcatcccaagcttccttgcggtcagagacctttccccggtagatcctcttttgctactaccatctatatgtccccacaactctttaccctttaggaaggtctccaattgaaactcccaagcaacataatttttgctagtaaatcaatcagaattgacaaacaatatctaacttctccataagtactaaggctatgactgggaaaactagaactaagatttcttagagaatgactctgaaaccgtaacagaatggttcgaattgccctctcttgagaaggtctttcattatataggcaagattgccagttatgcaaagaaacttaaatctatacatgctaattacatagtgattttaggaatctatacatggtaagttaaatctcctctcctatatacaacctaaattaacagctattaataaggcataatttatggcattctattgacagtacagaaagggaaaggatgagtgaaaatcagaaaaaaaatgtaatatttagagggagctgagcttagcagcagatgtatgaaaggaatgatggggggagggatttaaatcctacagaaattgaaagagagggggaggggctggggttgtgaaatgtgaaacattatactgataatggaagccatcaaattctgaagtaattacatggttacttgtatgccaattttataaacaaatatcattctaaaacattgcacattcattatcaaatttattgcattgattacaattggagctgtgatgtgaaacagtatgaaaattgtggttgaatatactagatgcctccatactcaaaataatttatccatttttgcaggcagtggagttagtactgatatttggac

SEQ ID NO: 6991 - DNA, 1430 bp, Populus trichocarpa
  Intron number 1 from transcript POPTR_0005s19960.1 (locus POPTR_0005s19960) derived from phytozome v7.0 (chr-ID scaf fold_5; pos 18950241 to 18951670 reverse strand)
gatcttccaggtctgttctccctcttttcctacacatcttcatgattaattagcttgattctctttttaaatgtaattagtctgaattttgttaactcggctagctcaatttccctgttttattaagtaatctatcgatttcgcttgatgggtaagctgaattctgcaggaatgctaattttttatagcttaaatcttgatgtcaatgctttttttttcttcttcttttaggtatgtatcgatatttgcatctgattttaaaataaaaaaaattgcatttcgggtttgatcaatctaattgtaattatatatgttattagtgagggattgtatattaaattcctctatttttagtttgtttggtgcgtattaataagcatgtatctacaaacattcaattttttttctccagctatttctgtaatttaaataattgaattcccatgtgcacagtcactaaggtagataattaaataattaaaattcctgttgtagattgatatgcatgtttggcacatacagttcaccaactgatggaaaaagggataaaccctgttggaactttttgtaaacagacaaaccaccttatattgtggtgggtataattgagctagccactgttttattagcttgtctgtcctcttcatatttttttcgagcctgtttgtgatggtgggatatggcttcactttttcataattcgatcagtactccaacctatatgggacactgaaaaaacagatctactctgtatgtatgttcattgcagggtttggaatttatgctaattgattgaaaaacctgattatgtttttccaaatctatgtgcaggaaattgtattcattttttttcccagttttctctgaaaagaaattggatttttcgggctctggttaacttatgattgtatttgttttggactgaggggatggctatcctctttttgagcaactattttatgtgacttcagtttgaacaatcagttgatgtgactattattaaatctgatattgaagttatattcagtaatgaattagcagaatccttctgttttgtattttatatatggagcgtagtagaaagtttcaatgctccacatagacctgaatattacgggagctcctggtaacttatctctccttcacatgtattgattctaaaatcagatgacctttctgacaatccttctcatgacaagtcttctttaaattatttatctccctcttattaaaagcctacttgtcatcctttctgttccagttggtttgacagtcattggcagaaaaaaattcctcagtgtttagctcaaatgtttatgtactagaaccggagttcgcttgatgtttatgggtgtcatcagaggtcttctaatttgaaattgtttcttttcacagaaactggatttcaagtttccgctaacagtatcttg

SEQ ID NO: 6992 - DNA, 2668 bp, Populus trichocarpa
  Intron number 18 from transcript POPTR_0013s08280.1 (locus POPTR_0013s08280) derived from phytozome v7.0 (chr-ID sca ffold_13; pos 7328205 to 7330872)
ctttcaagtatttgacacaggtttgaattttctcttgatttctaatgatcttcttctcctttagcatttgaaatctaatgtcattcttagccataaaagcttcttgtgttatacttaaggatctgtcttcttttacacttccataaacactgtaatttgacagttacatacaatttctgctgcaaaatatcaaatttatgctgtaatgatatgatctgttttagttattgacataaccaatctaatgttcaaaacctgtcatcgattaagtaaatctgaacaataaatcattggaatcatttgtcactagtttagcctgccttcctagctgcagtttgtgggatgaatgtaactgtacttgtagccttttgaaggttgtcagttatcagcttgcatgcatctttttatcatgcatctctttatcattgttatttttttagatataatgcttgcactcttctcctgaatctctctctagctgaataagatatatgcttaagtggacattatggacctgtttgtttttgtgtttcaaaagtgtttaagaaaaaaaatgaaatttttttatttttttctttacttcaaattaatatttttttttggtgtttttagattattttgatatgctgatgtcaaaaataatttttaaaaaataaaaaaaatattattttgatgcatttccgagcgaaaaacactttgaaaagcaaccgctaccacactcccaaacacccccatataatctctttgtaattactcccaatctgattgtgatttttttaggaaagtgtaaatgccacttttatgtcatcaatcattagagaatgaaaaataagaatattacatacgttactatggttatccttattggtaatatctacagatttaagaggctgggaaggtagaatgcctgattatatagcatttattcaggtgaaactcaatgctctattgagtgctttgaagtttcggactctaataaaagggggtagtgatatgatctgcaagctagaaatggaggagcttacagccatgcatattggttatttctactgaatttgttagaaagatggtttttggtgaaatgaggagaatagataatagatgcaaaccttctatactttttttttgtcctttgggtctattataagcttctaatgtcttagaccctagtctaagtttcttgcttattcgtgcaatgagcttcatttcttgttttctactctatcatttgatgtgacaatgggagtatcatttggtgcgtacctgaaactttggaagataatttgattaaaagcttggattgctctttcaagtactgagggtgcatcatgtttggaaatggttcctaacaattttttttttcaagtgtaaaatgcataaatgtgttgaagttttaacatctattgtttgaccattatttgcttggacaatagttaacaaatgggagtgcaggattgtgatggatcataaaatcttcaatgatgcccaagctgatagtaaatagaaacaacactgacaaagcattaaattaaatagttgctaattactgttctgcatgggaaaccattctgtccaaacaagaaaggtctttgtggaactgtaccacctacaatgtttaatttcatggttttagttgttttggcccattatcaatatgattatcatttcatcttccaaaaaataatgcattctccctctgtaattaatattgatgtttctaggtttcctatccccaatttcccactgcaaattatgtctattttttttttttaaaattgcccatgttaaagacctttgtttccttttgtcatgtaattcaggatgggaatttcattgtttcatctaaaagctatatcagcgaattttccaaggcaatttgaaattgaagttttttactttctttcagtagataggatataaacgtagctgattgaatttgtgctcttaaaactgaccggtagcttcctctatttcaatgctaaattggaagtttaaggttggtcattctgtaattgactaaaatggcatgatttacgatgccaacaaagtaattaaaaaaataaaaagaaataggttttgatgaaagaaaaggaggtacatggtatattcaaacaaaaagaggttttggaagttgattgtttttgttttaaaaacaatggtaatgatattctgtttcaaggggaaaatgaagtattgcttcctgcagatgagacagagatagagcagacctttagataggagggaaagagattgcagatattttttcccccttcaatcacatagaaaattgtggacttaaagtgcttgatgaaaattacataattagccttaattaaattccttacaaaatatgatactgagggtattattatgtctaacaaatgtgggcatcctgttgacctacccaaactaaaatcaactatggatgtatctggatttggtatctaaggggctgctacccaacttgtacatctacaacttgacacagaaaaaaattattcctggaaattaatctgaacagcaagcacaccaacaaatattccagtcctaatcctgttgagccttccaacatgaattgtgaaatttatggacaatttgtgtatactattatgtagtaatgcttgttgacgctcatttcaatgcatctctttttcccttcagcttgagt

SEQ ID NO: 6993 - DNA, 3113 bp, Populus trichocarpa
  Intron number 1 from transcript POPTR_0018s01310.1 (locus POPTR_0018s01310) derived from phytozome v7.0 (chr-ID scaf fold_18; pos 1268332 to 1271444 reverse strand)
aacccacctctcgctcttcgcgtgctggtcttcaggttttttttcttgtttttgtttcctttgatgggttttttgagtttttgcttttgttttaatcttaattgcgtatgtgctcgaagggttatgattatttagtgtttttttagttattttcgtaatgggtttttattttggttcttgtttctgggtctttgctggggcttattgaagattttgagtgcaagcctttttttaaaatacttgggacatgagaaactacgatgattttgttaatctattatattgaagttttgtggtaatgtttttttttattaagaatactgttaggttttgcaactgagtgatcgatttgtgaagagaaaataaacagagatttatgtgaaattgaggggaacttgtgcttaaggtgaccaagataaatattgtgcctagtggagctgggattttgaagtttggaaatctaaactatatgaaattgagattaaatattgggttttctttatttttctcaaattatcatgccagccgcattgatgactccgaggatttggtagaaaaaagtgagaactagaattttaagcaaatgtaatgtaaataggctcaaaggagaatgtagtagccattggagagaaggtgaacaaaggaagaatttagattcttgaaagaaaactagcccttggcttcctaagaatttactttcttcattaattcacattttccagaaatctctttaatgcgaatacaatcagaggctggtagaagcactttccattaaaatgtcacaactagatgttatagcttgggatgttgctgtataaacaaagtttgtatccttgtccttggcaatcatttgatgttttctgagtgtttaccatgactaagtttctattggtgttgatttgttagggattttgagcggtcctttgagatactcagatatggacttttttgagcttgggtggcttgaggttagaggggaaatgaaatttgttaaattgaatacaagtcaggtggagtaagtgtgatttaggaatatagtttggtgttatatattttaaaatggatgatgagaatggtgaacaattatgctttttcatggggcataaatttgaggactttaaggtatctattttctccagagtaactgggtggttcatgagttaccgaagagcatcatttagttgtttagttttttttgccaaatgactgttaaagtttagcattacagatggctcttttggtcctgtaacatgcatgatatttcagaaatgtgattagtttggagtagcttaggcattatcacatacccatgaaagattctttgagttagtcaaggattaaacaatgacatgtcaagcatttcgatacatggagccaaaagttcttcaggtcatcagttatttttggatcttagatcaatcaatctaaattcgtgcagatatatttgcatttcttttgcattgcctatgttgcttacctcttcacaaattcacaagaagtttttggttctatatgcttctcaagagcattgtctttttagatgtcttatgctacttgctgtacttgtgtctcattaacatttcaagcatttagatacatggagccaagagttattcaggtcatcagttatttgttgatcttagatcaatgatgttatctaaagttctgcggatatatttgcacttcttttgtgttgcctatgttgctgacctcatcataaatttgcaaaaaaaaaaaaaaaaaggttctgtatgcttctcatgagtcttgtcttttagatgtcctaggctacttgttgtacatgcatctcatttcgtactaactttaaactttgttttagatcgcatgtctagagagatacacacagctataacacagttgagaaattttaactagtggcatcctataagttacggcttggtcccatttattagtatatgtcatgtcactaaaaaacccatgtcagcaacataaaaaaataaattctgagaaattgcacttgccagaacaaacataaatacagattgcaactgcaaaccactacgtttctgtctgactgttgtgttagatttgcctactatatctaggaaacaggaatgcttacaaggaatttcatgattcctattctaggcctagagaaaagtaaggcttaattcatgagccttggagccttgagaaaatgtacactttttactaaccctttcccaacttcacctacagcctttaagacatcaattgggtcttcttcctcacctgctttctctcgatcccgcttctgggagaagtaaacaaagggatcaggtgaatgtttttaataagatttataagttgctctataacagattatatcatgagaggacactaatgacattccattatacctttgaacaaatctctcccgtgttagtacaataaaatattactatttaatcaattcaagtcccaatttttccaatcaaattagattctcttgatatttcaaatttcaacagcatttgttttgggattgacctaaatgagagtggcggctgttggctgtgccatgcaagagagaggaagggctgctagctatgccgcgtgagagagaggaaggaggatgggctgtgattttttagggacttctcattacatggatgaaaagaagagggaagatttttttttttttttgttgacatggattttttaatgacatggtatacaaataaatgggaccaagctgtaactaataggatgtcactagttacagcttgagcaccataaaatttctctaatagttgcttcttggttgtgggttctagtcttgaccttggttacaactatggtgtatcattgtgcatgactactgattgtagtatttttgctatttggccatcatggcgttgaggatttgattattgttaccttttgcgtgtactagtaggggaggagtgtgttctaggaatttgtgactttgacccatgacttgtaagcgtatgacccgttttcagcaaagtgtttcctttttagagctagccatttgtagttgtccataaacataaaagatttgaccatctatttccttctgtatcatccttgcagtttcctgttgggcgtatccaccgccttctgaagtc

SEQ ID NO: 6994 - DNA, 1990 bp, Populus trichocarpa
  Intron number 11 from transcript POPTR_0010s10310.1 (locus POPTR_0010s10310) derived from phytozome v7.0 (chr-ID sca ffold_10; pos 10872432 to 10874421)
cagcaggaattcccagcccaaaattttcagagagtgtaagtcaactttggccatcaattctaccgactattaatccattagttctgattaagtggtgttagtttgtgaacctatccctagttgctgttggtactaggaggaactgtctctctaaagattaagcctctagtgtcatacggcttgcagggttggagcttaccactaggcaaaagcattaaaactataatgattatgaatagttgcagccgatttagttgtagaagtagtacaacttgagtctacattaccactgattttaggggtgatagtaacaagtattggaggattagtgattatcaaatcaccagcagcaaaagtgcttgatttttttttttccttttatgaagactcctataaagctaataatataaaaactaaaaggggcctaagaatgttactaataattcatactattgtaggtcaagcattagcgttagcagtaagggtgatagcactttgtgtgctagctaattatcgatcactaaatggacttttatgtgatggtaatcaagccattatcatgaattcaaagctaggtgtccactgtcaagccagtaagctagtaggagatggtgttcctatggatctgctgatcatgaattaaatcactaggactatttgataactcataattgtgcagatgacagtcatagcagtagtagctattgcgtatataactattccagtagaaattcatgaattccatttatcccataacctagatacattcttcgacattaatactaccaaactcaaacctttcgaaattgtcaaattcaaccccaagccaaagttttgaatgcgtgagcaaaatttattctacaaaaacttttgtaagcttccacaaacttgcaccacaaataaggttaaactgttaccaaaagcatttttaaatactttttgttgatgaaataaaaggagaaacatgctttagatctatataatgcaagcctcttaccccagtaatatcacacttccaagacttatgcacactacatatcaaatctgcatgtatattgattaggattgcgaacatccatgcctgacacattctgtgttcctttcaaggaacttccttgcacgatgttggttctactggtaggcatcactcaatttatacgattctgttgtcctttttgtttgtttcccttataaatttagctttcactgttaatcgaaaagaaatcaaacatcatcatatcctcatagggcaagtttgtgaccttccttgtaagaggtagaacagtaaacctaaaggtttactagacaatcagatgagtaattatatttgtaccgctctgaattttcctgtttaattctcatttgtcataactgctatctgagcaatctatttactagaatagccttgtcaaattccatacactaggaagctcaaccagatcttttgtttaagatgctacctagaaaatgctttgattggatcattacccactgatgtaaaaggttaaatgtactcttatgtgaagcgtatttcctccggccagtcaatctaggttgatcgttctgcatttgcaagcatgtttcgtagaatgaatggtctatggacaacattgtaaacaggattccaagtatgcccacgtctttgcaaaagtaatcaatgtcacagccactatgatagcttaaatcatccccatatctttagtatttaaagagccacttataagaatgattcatgagattgccgttctgcaatcagcatggagatcacatgtagttaattgccaaagcaatcatagatgtcctcattagttaactgcgccgtgttttctttctttctttcttttattctggtgcaggtactagcatcctataaacacacatgtcgtacctagatatggatatttttcaaaatttgattcgaggctaaccatttcatttggcgattttcttttcaggagagaaacttcctactaaaaacacttggagtgga

SEQ ID NO: 6995 - DNA, 1068 bp, Populus trichocarpa
  Intron number 10 from transcript POPTR_0001s37610.1 (locus POPTR_0001s37610) derived from phytozome v7.0 (chr-ID sca ffold_1; pos 36577301 to 36578368)
ggtaactttgttttctgtttggtccatggttttaaattgaggtatcgcaggcataaaataatggatgcagctgtaactgttgcaaatcttttagcaactcttagaaaaattttatgattttactaaacaagctcaataacaacacttctaatggttctcacttgcttattatcatagtaaaataatacatcacaacttaaagttgtgcagaatattcatctccatataatttaaaaaattagtttagtaataacaagatccttgtctgatacaagggtaacaaaaacccaaaaaaataaaaataaatcaacgttcaagttaataaaaatctcaatatattagtaaaacataagatactaaccaaaagttttgataatcatttaaaaataatatcaaagccacttagatctgcagtaatctaataaatcaataccataaaatgttgtaattactaaatatttgcaagttaaatatcaacaattttttgtaagtaatgtaaaagagttgtgatattacatctaccatccaaacttaaagttagatattcactttcagaaaaagcaatgaaaattttacatttaattttggtccaattatgtgttttttaagaatttgttgtggctaagtagaaaagttgtgaaagatgaaaagatcaaataaatgaaaataataggaaaggaaacatgtgaaaatggaaataataggcagaaaatagtggccttgatgctgttgttcttgtgaaatggctagggtaatagattgtaaaaaatccattaaataaaggctattacataatgtaatggccttttttagaaccgtgattttgttagtcaattcttctcatttggaaatgtattgttattgtttatttggtcagaagatgataacatctaaaaatgctataattcactatttgaattcatcatagaagtttctttgaatttaatcatgactattgtattattgtgaaattgaaacggaattctattgttttccttttcgttgacatattattttttttcttgactttaaggtaaaaaaggtggaaaagagagggaaaaggctaga

SEQ ID NO: 6996 - DNA, 1012 bp, Populus trichocarpa
  Intron number 1 from transcript POPTR_0005s24190.1 (locus POPTR_0005s24190) derived from phytozome v7.0 (chr-ID scaf fold_5; pos 22803712 to 22804723)
cactctcttcctcgttaaattccattgtgtcccaggtgcattttctatctctggttttcattttggtgcttatgattgaaacccatttttaaagttcaattctttttatacgaatctgtgttgtaattgcattgtacattgtttttcacattgatcctttttcttttcacgtataatgattggtttagcggttcttaatttctcagcatttgtgtttctaaccttgaaagagtgcagatcatgcatgaagtagtgaattcgtaattatgcaaaattcacaagggataattttttttttgtgggaccaagtaaaaaacgatctcaaaagtgaatctgggattggcttcttagcattaatcgatgtggtttgcaaattaaatttgctgtctgtcatctttattggggttgttagctgattctagtgttatattgtgtagttgggttgggtagaggattcttcttctttttgttttttaatttagtattcttcttgttggttgattttattactaccttgtccaattgggtagagctaaatctgtactgattttcttatgaattctgagcaaggtttccctaactttgaaggttatttaagaatttgttccaactgtccatttttacgaggagtttgtcagttcatgatcctttcatttatgccgtaattaactttgccttttttttaggttcaattattttagatagagtctcacgttaagctttaaaaactttggtaaaagtacacagttgagttgagtatcctcctttttggggctttctaagatatttctgattttctcctttttttcttttttcattttttaaaagcattgctgcagatttatttgtaacttagttatttctgaattgattcaatttttctggtttctgggggttgtggccacgcactgcattgaattcagaagatatgcatttggatgattggtctatgaaatattttgatgaataacagccttttttttcttttcctatttagcgagtccagaaattc

SEQ ID NO: 6997 - DNA, 1960 bp, Populus trichocarpa
  Intron number 2 from transcript POPTR_0160s00230.1 (locus POPTR_0160s00230) derived from phytozome v7.0 (chr-ID scaf fold_160; pos 26604 to 28563)
ccgtgatcggcctcgtctcaaatcttgtgaagctggtaactcttcatcaaatattctttatgattaatggtgttggtttctttcagcatcatgcgttctttatttgattactcatttttctctgttgctgcaatatgtaggaaacactgcaacgcttttaaaccatgttgttttcgaaataagtatccagaatatatatatttatggtttcatttttcctcatcattgtctatgtttatcacttccataatatcataagatttcaggatgttagtccatgagagttcagattcagttattttaaggctaaacttagcctgaagagtcaagtcttgccagcatcagccaaatccacatgaacttttgattctacaaatgagagtctcccatgtatgatgctatctttcactaaattatgctaataatcaaagcatatgagggttggaaatgatgttacttgacgtcgtaagaagggataaatatgttttgagaggaacataaattaagacgttaatgaattgagtgatatccaatgctgtgaacataaactgactgcttctggttgtgtttgtcttttccatttcggtaagatatgaaagagtatgttttgttcagattttcttctacatgtttaacagatatgttttcttctacatgtttaatttttccgcaggctctagtcttaatgtcagacggaagattattattattattggtaagatagtcccctgacctcttcctgctttgatccttactgactgctgtgtgcattttcctcttcattatctttctaactgagctggaattcagaatgttcatcagtccctcgccttctctgtatagctatttcagtataatcatgatgatgtgtgtgattcaaactctggtgcaaataattgaattcgtgtttatactgaaaccatctggctggtgatttttctacgccaacaaatagaagtcactgttgttatgattggttgaactttgcccggagcctaaacacaatttgacgtggttcggcaactcacctttgtcaaccgggcagcccatatcattatatagagaaaaattacaaatatacaacaatggaggaggaggaactccctgtactctatccccactcgtgtatcacatctctcttactctctgctgctgctgcagctgctgcccatggcagcttctttctccctcttttgttgctactgctagtattggttcttgtattgactctatttatagtggaaatgggtgggacaaacatccccatttttgtccccagtcctagcatcaatggcagacaattagccatgatttcagcccatttcaaatcctccatttcagcctctcttcaagccttgttcacatctcatcaaagctaggattgtgggagttcgtctccacactcaacaactgtagatctttaattttaaattaggggatcatattcatctttcaacagagagagttcgtgatttaattttatttttttcccatgcaatttagctctgctttgttcagactgctttggctacacaaaatatttaagtaaacaacactttggcactatttatgcttggtctgtctcctcctcagaaaattcattacttgtctgaatttagtttttgaaagctttcctcgttcctcctgaatcaagagaacatttttctgtttctgctgctgtttttgtatcatgacaatgtcagtccccaagtaactcatcatcctcctcaactggcaggtgttctctttggatcagcaggaattttattcatctgcgtgattctttattccagaaggaaggcctcatcaactaccactcctatttttctaaagaagaaacataatcaagatcttgaggttttcataagaaaccacggaccactagcactgaaaagatacaatctgtcggatgttaagaaaatgaccaattttttcaaagataaacttggtcaaggaggct

SEQ ID NO: 6998 - DNA, 546 bp, Populus trichocarpa
  Intron number 1 from transcript POPTR_0013s14450.1 (locus POPTR_0013s14450) derived from phytozome v7.0 (chr-ID scaf fold_13; pos 14631096 to 14631641)
tccacttccactggtaaaaaaaaatagtctttgctgattttttttattgtttttctgttttgtgtttggttgctgagaaagtgggagaaaatagaaataaaagttgtagaaagttagtgtagttaggaggttaagcttttaacattcaattgtttgattatagattcattttttcacattcatgaggaattagcgggatttattcatttatttttatgaattgtttgtgtgaaaatttctgtttaatagttgaaaagaactaattttgtgattgattcagtaacaaaatgaagtaaatatattttagtatttttttttaactattaatgattcacctagtggatattggaaacttagacttgaaatttatatgtatgtttttaatgcgtaattgtagtttctgagaatttgtggtcaaagattttatttttccttgtcattattgtgtttatggttttaattctgcaatttttaggtttgttgatgtagcgtatgatagtgtgtggatttgttggtaatggtttgtttggtttattgggttttcag

SEQ ID NO: 6999 - DNA, 490 bp, Populus trichocarpa
  Intron number 2 from transcript POPTR_0017s13920.1 (locus POPTR_0017s13920) derived from phytozome v7.0 (chr-ID scaf fold_17; pos 14099188 to 14099677 reverse strand)
gcagaagctggctgttcttccagacatttccttgagtatactattctaaataccctctctctctttctctcttctaagttttgatgtttcttgcatgtccatcaatgattctgtgataatggttctgtgatcaaagtgtttgtgagttcttacacaaacttgatccaaggatgatttattacacgttgaaccgataattatcgggattggaaattcatgtgtgataagggaatctaacttatgtctcagtggttaggtatcatacttggtaaaataaaatggaaacgaaacttcataatgtgtttggtaaacagatgacatttcgatgaggaaaataaaatttgattttgcctatttattttgttaatataatgccctttcgaatctgtttcatgaaaaaaaagggaaatgatctcatggtcttggttaatatatataaatgttatctgtagattcttcaactgagtgaacttgccattgctttgcagaa

SEQ ID NO: 7000 - DNA, 623 bp, Populus trichocarpa
  Intron number 6 from transcript POPTR_0004s04540.1 (locus POPTR_0004s04540) derived from phytozome v7.0 (chr-ID scaf fold_4; pos 3289957 to 3290579)
cgtgtctctaaggtctgatcttgatcctgacactcaatagcatttagtagtatccatctagcagtacaatatactagtatttgagatgacttgtttttgggtttaatatttattttcattcaagtgctcagagtaaaatatgaatttttttaatgactactaactgtttgcataaataacttttgtagtatcgttgtgtactggatgctgtaactaagtatcctattggcagatgtgtttttggccttgtactcaacataaagaattgtgtgacgttcagtgcagtattagatgtcaggttttatgtgattatatagcatgccactagatttgcatatataatcaggttgtcagtatgaagttccattactgaaagagaacaccagtgcatacactataaatgaattgcactgtcacagctcatttagtcagcaagcaggtttcatgataatatatcctgcaaaattccttgattcaaaacaactatgttgtaaagtgtaatcttttgatgcaaagaatatgtttggttgtcaaggttctgctgaaattttgtcaagcctaaccttcctctcttccctattaccgcagggagctacaagacaggtcagattccagccaactat

SEQ ID NO: 7001 - DNA, 3734 bp, Populus trichocarpa
  Intron number 1 from transcript POPTR_0006s16360.1 (locus POPTR_0006s16360) derived from phytozome v7.0 (chr-ID scaf fold_6; pos 14288412 to 14292145 reverse strand)
cagcctcgttgtacgtccatccgtcagcgacggaggtgatgccgccggaggtggaggccgtgccggtggtagcgattacgagcctggcgaggtccgccgtgaacttccatcttattctcgctccgatcgatactctgacgatcctggttcggttttttcctctttattttagcttcctcgttttttttatctgcttttattttaattaatattcatatatgtgaagttcattcttttcttttttttgaaaccctagatcggagtagtagagttatttgagtcataatataatgatacgattggctgtagatttattttcagctctagaactagcattctgaaagctatgtttttttttttgttgttgattattttatgaattgtgtgtttgaaggataggagtggagtgatctgaggagaagttttccttataataatacaattcatgacatgaatgaaattgattggttgttttaggttgtaatttgcaccttttattgcttagtttatggaaatcatcgtttaattatgtgtgaagtcttctgatattgataatgaagctaatattaactatttggaatctagcttgtatctcatagaatgagaacatatcagtttaattgtgtaactttgttgggtggagctcggtttaattttgtaatcctgtgtatgcttcgtttgttgcttcataaaagttgatagtggaatgttgaggtggcatcatttcacagtttgatgttaatcctccaaatgattgaattgcaggaaactttacagtggatcgtctggttaaaatatccttctagcttatgttaaaatattgggcattaaaatggtgataccaagtgtttgttcaatatgtgatgattcatgtagaaggatttagaactgaaaagaaaatacatcgaccttttcgtctattgtgtacctaattgtgatcttcctcttcttgtttttccaataaattcggcaatgatgtttctaatttgtagaataaacaatgaatcctgtaagtgaatgttgtaatcacattcaactttccagaggttaggtaaatgttgaaaataccaaaaataataaaaaaataatagtttttccctagagtatgttttgcctactaaaatggcatatcaaatatagagtgagatctaaatcatcccatatacaatgaagtcattatgtattgaagagaagagtagaagtatgaccatgaaaagtttgtttttcaattgcatattggatacctttggagtatgcaagctttttctcaatttaggttttttggatgtggggggagtctatatctaagcatgctactgcattcttaaacttaaactttgaatataatgatactactacctttactttttttgaggcttaagtgtgctattacaagtatttttcactaaaatttataactgaaaaggaacttccgaacatgattgcatgttgtagaacttctacaggatccatggcatgcccatggaaatgagtatcttttattgtgggttgaattattttggaacaataagagacgagaatgggatcaataattgatttatttttcttcgacaattggttgagaggctgtaccttataggcttcactgagaaatagtaatcaacttcctcttgcaatttgcttctcttatgctgaataacctgttttatattttataagttgaaatggttctcgtaacactatggtttatatttctcctcatttgatgtgatatttttttcttttgctctattagatagaatattttcaaaggtttcttgtcagcatttgtcattttgttaaatttataaatttctgcagagtcggatataaaatcatattaggtactcattttggtcatatagtatttattcaacaagttcatctatttatacaccaaagtacttttttcccactcattgcatttcatgtcgagcttcttggtctgctaccatatgagtgtcgaattgcaagtaaattttgttgttgtgtgttacagcttgcctgcaagaacttgggtcttgaggaaggcatgttggtgtgagtgcagtcttggatcatgatctcaggggatttggtttttctattatggtcaatatatttatgggaaatgcaactatcattattttgagtggtatgggaacttcatcggatgcttttgtcattttgctggaaagccatttttatgtgtatgttcagggatgttgggggacttaataaaatggttttgtatagcgtggggaaaacaaatattgtcctgtacaagctgttttctcttaaggataattgagatgcaacatggtctgtgagtgtttttggataccaccattatcaattgcaacagtaaccttgatttaagtggtaagggacaatggggctggtatgtttggggtgtgatcaagtgtgcaggctgcctttcgacacctggaattattgcagctagctgatgggtatctggctcaggtttttttttttttagttggtggtaaattcctggtaactggtaaattctagaaggtatctgaatctgtgttggaattattgttgcaagaatcagtggcttgattgggattttcattattttaatttactcttcaacatttggatggttgaatcaggttgagttgaatggttcttagtagctgttcaggaattctacttttcagcattgttacatcaagtctgaagtccataagaactggggaattctattatcatctcattttttctagtctctgttgtgctgtttagtttttgtttaattggtgattatttagtctgggaagttgctgcatacctctttaaaatcttgggtgatggtctccattgggttccgatttccaatttactttaattggctgtatggggcaggtattaaccggtggcagattgaacataaaaagtaccattttgtgtcaaggcaggttgtaatggcttcagcctaccttctaccttgagctatggggtactgtggttgataggaacatatattgtatgaactgtttctaataaaacactctggtttctgaagataattgggactaattggtagctacttgattttgtgaattatttggctactgtgaacattagtgtcttctactggtggagtacttggtcttcctgctcttattgaagtatgttttgactgaagttcctgggacatacttgtgattgggttttgctggtctgtgctggattcaaagtttcattcccattgctattgtgaagttatggctgctcctgataaattgtattggtgttggtagttcagtgcttaggctagaaacttatctttaaggatgctgttggtgatgaaatagttggggatggcatgttaaagtaggaaaactggacttgatttgttctcgtatatagattgtggtgatttcaagtaattggttttagttatctccccctccagttgtattcaatataatgtgggctatcattctgagagatagcaacagacctttatcatgcaaacgtcttactctcccacgcttgatatctccttttataccactttttatggggagatgccctacctgatgattgatatctttgcaattttgttgaattggttatttcacagtttttgggttaaatctgcggctagcattgctactttgcaccaacaaaatttctcccttgtttttgggggttgctcatctttagactttgctggcttttttccagggtatagacttcgtgcaggttctggttctcctgta

SEQ ID NO: 7002 - DNA, 1224 bp, Populus trichocarpa
  Intron number 1 from transcript POPTR_0005s20780.1 (locus POPTR_0005s20780) derived from phytozome v7.0 (chr-ID scaf fold_5; pos 19910511 to 19911734)
tgattttggttcttctgctaaaccagaaaaatcaggttagcacgccaattaatttttcactatcatacttgactaaacattttgaatccatgtctgcaccttgtgccttcaatgtgcaatgcaaccattttttatgccatgcaatgctgtccccatcttagaaatctgatatgcttcataactcttcttttgtacagtagttttctattattcttcgtctaggaatgttaatgcatgcactttggacttttcatgatttctacttggtgttagatttagatctttcatttagtaactatttgtgaatggatcttcattaactaagaatataaattatatcctagagccgttgcattggttctttgacaggcttatctctaatatattcttatactaatttatgattgcattgatctcatttgaaacaaaggtgatagcaattaaaatatctctcataaatcattgccacaatgatgtcactggagtaacaaagaagctccccgatatctcagaaaattgatagagagagcgaatgctttagaggtattttttgagtgttgtgtttaatatgtgtagcatgcccaaggctgtgatctgtttttaatagatccttcattgtttctgcctccccaaatgtactggacagccaggcagtgtgctttctgaaacatcttgaaaatcaaacctgttcactagaaacaaacaagaatggtgcttggatattgattctaatggtgaataagtaataaaatatgatcactagtttgaaaatatgagacaaatgtatggaaccacaattatttgggtagactagaaataccagatcaaaccaaacttcttgcaacaaacagaaaaatcattcagtttcatttgaaggggctgtgttaagtttaatatgttagttactggagtggaactaacttatgttattccaaaaaagtttatatccacgcagctattgcagcaacaatttgtatgatgtctgtgttcactcggtcatagctcatgcatctgcagaggtgagaagtatagacggggaaaatatttgtgatgcttgatagatagtttacttttccccattcctaaggaagtattggtagttagggctgcctattgacacaagtgtgctttaattcatagttagttcttcagaaaaatatataatgattcttgttataatgcctttcagctccatctgcttctaatataactatccaaaggcac

SEQ ID NO: 7003 - DNA, 1043 bp, Populus trichocarpa
  Intron number 4 from transcript POPTR_0007s04580.1 (locus POPTR_0007s04580) derived from phytozome v7.0 (chr-ID scaf fold_7; pos 2840424 to 2841466 reverse strand)
agattttagctgaatttgaggacttggaaactcaggtatgattaatttttacaccactactgtcttacgagatttgttgtatgtttctaatactgcttcctgcattatatgtcagtttaaaccattcattttattcattctacaaaactcatttagttctaatttaaggcttgatttgaggttttgttcagcctcctgcattatatgtctgtttaaaccattcattttattcattctgcaaaacccatttagttctaatttaaggcttgatttgaggttttgttcagtttagtggtaaagttaatggtttacaatgtacttagcctttacttgttagactggccagttcttgttgtttagctaggttatgatatggtgcactatgatatcttctggttgcttcagaaaaaaaaaatttgggaatgctagaaatgagatgtgatggatttagtacgctcatacctttcatggttttgttaggactgaattgttgggtaaatggtgactattggacaatcacacgcaaacttgtactggaatatttgagatttgcttaaatatataggaaaacgttattttttggtcttttattccttttctgtttacctatccagccattccaggatgtaaatgagcttttcttcagtagtttttcctccctttttccatgaccacagcttagccatccccataagatatttcaactcatagtgcactgggagctatgggttctgcatttcatatgttgattcatgtctgttgccttggattttatagaagattgaggggaagatttatagttgaagaacaattagatgaattggattttgccgtactataatatttcttattttatggctgtatatgcactggtaaattttattactactttctgttggtagaccacatgctttttcttggtcttgactctgtcgatcttgagaaagtccctcgatttccctttttattcttcttatttgaaaaataaactttcttttgtttgtttaggtggctgttcaagacttgccagaagtgcccactat

SEQ ID NO: 7004 - DNA, 1274 bp, Populus trichocarpa
  Intron number 4 from transcript POPTR_0014s15330.1 (locus POPTR_0014s15330) derived from phytozome v7.0 (chr-ID scaf fold_14; pos 11416074 to 11417347 reverse strand)
ttacggtatgccaatttcttttgagtttgtcaatgctaactaatatctgcttcagttttcctttagagttatcaacttgtccttgcctgtgatgttcttgagtaaaactgctcgtggtatttgttgtattcctctttggatgtatagattttcagctttaaattcctccatgaatgagagcttacttacaggttctacgtgtgggttgtaatcacattctcaaactgcagcgcttgaaggtgctcttcaagtagttgaacacgtttaaaagtgggaattgtgtctcggattattaatattattacgtttgaactgataccttcaacgaattagctgttattaatcttcattctttaaatttgaagaggaaaacagaaactcttcttcaaaataaaatatgaggagaaacacatttactgagataaatacaacatacgaacaatgaaagcttgcatctgactccctcgtaattataataaagtttgcatctgaaagagggagctatatcttttgtctttcccaatttttttcctttgtattcttttcctcaagagtgcagtcaggccaagacaatatgttgccttaaatctaattcaggcaattaacaaaatttacaagtcaactgaaaaaggaaatctataaacaatggaccttgtttgtgtgcccattttgttgcttgcagtttgtcattgtacttaaaatataatctgtctgacacatctgaagttatctcctgagaaaatctcaaagcatggcctctgctcttttttcttgatttgtttctctttcattcctttcattttttgtttttttgttttcggaaaactcctccatatgcccatcttacaaaatggatcacaaagttatgaactaccttgtttaattatttatgaggttcttagcttggaaaaaaaagaaaaaaactgtctgagatttagccatatgttcttctaatatccccactgagctcagaggttagatatgtatatatgtgtagtagtatagaaatggtttactgctgactttacattgtttacagagctatttttccttgaaacactctgtcagcctatggatattgcatgcaagatgatagatagatcattgatgtatatacattattacactgatttttagagatacattattacactgatttttagagctacatttgatccagggtacctccaagaataaaatataaatctactcatgctgttattaattttgatattttaggctgccaaggctctggaggaaaagctgaaagcatc

SEQ ID NO: 7005 - DNA, 341 bp, Populus trichocarpa
  Intron number 2 from transcript POPTR_0004s21410.1 (locus POPTR_0004s21410) derived from phytozome v7.0 (chr-ID scaf fold_4; pos 20552416 to 20552756 reverse strand)
cctagtgatccatacctcagggagcacctacactggtatatcaatttctctaaataatctcttcacctatatgtatagaactcaagctaccaaagaattatttccattaatgataactgtaaaacaagtattaattgaattccaagtaacaacccaaaaatagttaaaaaagctgcctctatcatttccagatttctcacacaactcaagtagaaaaggtgtaatcatgtagaataataaaaatagtaagaaaaagtacagttaaaatcacatcctcactgctttaccttgatttgaccaatatcattacaggatagtaactgacatcccaggcaccacag

SEQ ID NO: 7006 - DNA, 3648 bp, Populus trichocarpa
  Intron number 4 from transcript POPTR_0018s07760.1 (locus POPTR_0018s07760) derived from phytozome v7.0 (chr-ID scaf fold_18; pos 8502065 to 8505712 reverse strand)
taccttggctggcgttccttgttgccctcttgtttgtaggtaccttattctgtgcaccaactttattagcattaatatgccattgttgttgaattattgtgtagacatatatgagtatgcaaagttgagagataagaaaacttttctttatcttttagaatctaagctagtttaaaatctatgaaaagatggcaaggaccacacccgaaaaatttctctcaaagagtacccatggcttgtgtctactcataaacttactaggctatatctccaattctcacccataacacacatagcacatactcatccatcacatatacagagtacttagatatgaaacacacacaaacaagccaaagatccttatttgtactagtgttggtcaagacttatggtcacttcttaatgttgatttctgaggcaccactggatgtgaatattttgtacagttcttagtgaaaggggtctctttgaactagttaattttcagcttcatggttggttgtgtatgctggcatggcttagtctagagaaccgcttatagttgaagttggttttttctctttgtagagttggttttgattatcaacactttcccttgacattgactcggttcttgcactaatggcaattgaaactctgcaaagtttggtatggttgaggccttctgtgaacatatcagttcctttaatggtacatgagtgtgatctccaccatgctgaatgttggtcccttactagcaaagtcagcactaattaaatcttccataatgcccaatccttgtttgtcaactccagaagtggtccttttccacttgctccaataccactttttcatactaaaacaattttggcatccaaattttgaaagatctccaactttttgattatgcaatcccattatgttgcacaatcagtcaacacttgttttggtagataatcctatatttcatgaaagaatggagcatgtggaactaaattttcattttgtaatagagttttactacattttgtaaaagcgacgttttctaggaaagtcaagagttgcaacaaattgtcatggaagtccaagtggctgaaatttttactagaggactctgtagtaacaatttgcaaaagtcctaattgtgacatggtatgccagaaagagtgaatattcttctaaaattgaaagggaaattctttcattaagatatggtttggccatggatttctcatgatgggtcttcagttttgcgcttgggtttgatggggaggccattcggccaatattgtgtttttccttggaatttagcttgtattccattcgaccatgatgggtgggtttttgggatgggatagttttagccagccttggtttgtgcatgatgatgagttcggtccaatctctttgatggttcattcgtccaaattaggtcagcccatgtatgagtctaatttgggcagcaaagtaggcttgttgggaccttgtatcaggtctgatttggtttggccatggatttctcatgacgggtcttcagttttgcgcttgggtttgatggggaggccattcagccaatattgtgtttttctttagaatttagcttgtattccattcgaccatgatgggtggggttttgggatgggatagttttagccagccttggtttgtgcatgatgatgagttcggtccaatctctttgatggttcattcgtccaaatcaggtcagtcaatattgtgtttttccttagaatatagcttgtgttccattcgaccatgatgggtggggttttgggatgggattgttttagccagccttggtttgtgcatgatgatgaattcggtccaatctctttgatggttcattcatctaaatcaggtcagcctatgtatgggtctaatttgggcagcaaagtaggcttgttggagcttgtatcaggtttgatttgggttaatattaatgagtatgggtttgggtcatatgaggttcaaagttatcttgggctaattaagatattgagatccttttcttgtaaggatcaacaaaatattcttctaaaattgaaagggaaattctttcattattgtccctattatttaggagaatatttagcaacaaagaaggaagcttcatagtcatgcaaggaaattaaatgggctgtcagatctgaatcctagacttggaaggattatttaatgctaaagatttgattctcctaattaagaaaggaaaatgatgggcgactacaaggggaattaatttctaagattgttttccatgctctgaaggaaaatcctagtcctacaaggaaagaagacttcaacaattaaattcctattcatatacaaggaaagaagacttcaacaattaaattcctattcatataagattttctagcatctaaatgactttaaaagttggctaagcgatcctagagtatctaggaaggtggatatcggccaagggttatttaagctagagaattaagatattttattttgtttttctttctattatatgcaacatcaacaagctactatccagacttgttgtttccattattatttctatgtttgagcttaattaatactttggattttagctaagattcaaggcttgtctggattagggtttgagcttaccagtaaaggttttggatcagtttttgtaagtgggtcaattcagtccacaagagtagatccattagggttaatttctcagaactatttaaacacgtgttaagtctaaatttcagcacctttgatgaataatacttttgaactttttagttttagtgtgagagagattcttgcattcttcggtttttgaacgaattgaatttgacttatcaaagattaactggcatcatgcgactttattccaatagtgctggtgtcttgggacatgtttttattttgtcacactcctatcagatctttttcggttttgcgggataagatctcaatcttgattgtgggttgcgtgactacgtgatcacgagtttcgcttcacatgtcaagagtcaataactgactctataatcgaagaagcaaacctgaatttgctatctaaagcgagccttcagccagccaagcaactgaaagtttatccaaccaggtcacatccatctttgactaaggcattgaccaattgcttcatagctagaaccaatcctagaaaggttgcatttgcatttcattgaaagaagtataaataggtcacctggcttcttttttgtagattgctccatttatgcagtaagatgagttctgtattatttttgtataataggcagaaagagtagagaaaagcgtagtgagcctatgagcattttgtttgtggtttagcacaatgctctaatataatagaagcgtttggtttcatgtccggtttcatgtcttaactctttgcacttctcgactacaaatacatttaaatttctcctttctaacttctagtggggactataatttgccatttatagttttttggtgcttcatttatgttctctcattgtgtaatttttctagttgggattcagttcatcagatattttatggacatctgcatggttggagggagtgcatcagagacaatgtgatgattactcagtatggtttgatatgtgcaactaaatatgatttttttaaataggtagtcctcaacgg

SEQ ID NO: 7007 - DNA, 470 bp, Populus trichocarpa
  Intron number 5 from transcript POPTR_0015s01200.1 (locus POPTR_0015s01200) derived from phytozome v7.0 (chr-ID scaf fold_15; pos 763862 to 764331)
tcaggtatgcatattctgataattagcacctactgcattctttttgtgtaggacagagtcaaaatgctgttacttttcatttgtaaaggtagtttttttgacagtatgctctatcctggttgaattacatatatgggaaatcttgctagttgtaacctatgtgattttagtagttttgaatgcaagttcatttcattaagaatgtatggttcgtgtacataagccaaatggtgtttgtctcttctttgaagaactcttgcaattgtgttttatggattttgtgcataaattatgggtttgaatgggtgatgggtcgtatctcaaagaaagttcataataaattaggttccttggtaataaagatctagttttgcctcagatcaactttgagtttaatgcatttaagttgaaatacatattaactaaatggactattctttcacccgctgcagacagtcacttgcaacttg

SEQ ID NO: 7008 - DNA, 947 bp, Populus trichocarpa
  Intron number 6 from transcript POPTR_0007s15080.1 (locus POPTR_0007s15080) derived from phytozome v7.0 (chr-ID scaf fold_7; pos 14724713 to 14725659 reverse strand)
accctccgctttgagccccgacgacaggtttgtctatcagtagattgtgaaactactaaagaaatatcatgctctttcattttagaatgcaaagttaaattagtagcatgagatttcttcttccatttgctttaattggttgtggttgtgagatgatggttgttttatttatttgccttgggccttgatctcttgatcccaggttggattttgattgactgagctgggtgagatgccattcataattattaagattgcccaaaactagataaaaaaattgttaaagcaaccatgaaacaagatttcgtggaacatcatgatgaactagctataactgttatgagtaactattacacagaaatcccttttccattgaggagaattcttcatttttaaaattcctctggaaacatgctgaaatacttgacaggttcgagaatttacattttggttttcgctacataattggttaagaagttgcttgagaattcagtctaaaagcttaagccataggccaacagatacacttacatacttcgtgcacgactagtatgtgttaacaatgtcatctttgctagttatggcttccttttcaagtcctatgacattgttatatttccttcacggaattgtttattagtatgactctgactctgagcattgttatcactatgatttggttttaccattacaataatttttttatagtgaatgttctagttctttttttttttttttttgcaagaattggaacattgctgttagattttctatttcttgcatggattgaaaaattgggttttccaaaaaagatgctgtctaaaggattttttatggtgtggtttacaagtgagcaccttgtggagttgcatttttttttgtccagctatgctgattctattcaatgcgcagaggcctgttgaaggacctgcaggagtgaagcaaga

SEQ ID NO: 7009 - DNA, 1386 bp, Populus trichocarpa
  Intron number 1 from transcript POPTR_0018s02350.1 (locus POPTR_0018s02350) derived from phytozome v7.0 (chr-ID scaf fold_18; pos 2109871 to 2111256 reverse strand)
cggtttgtttcttttcttcttacttctttcgtaggttagtgtgtactgtctttaatgctgaatgataattgtttttttcccttttcttttcgaggctaattaccgagtttgatgttttacagtttcatctggaagttaagatagttgaggttcaaacattttgatgtgttttgaaggatttttttttaatggttttaaggtgaattctgtgcattttattttttatatttagttttgaattctgggaaggagtttaattcccacgaaaataaattttattcgatattatcatgtaaaaggatcgggattgtggctgagttgttattcttaaggatgttttgatgatgtttttaaggctgccttagatgcatgggctagttaactgaggaaataaagggatggctttggtcagggatttctgagtggaggtaactatgttctgtggaaacaactaagaaaaaattatacaattttgttgtcctgtggctgttgttagtcacatggatttttccattagtgtttatatatatatatatatatttgtatatatatggtctagtgcttggcctgatgaaatcatggtcatgtctgagttgctctgagttagatggttctattttaaggtacatctctgttagagatgttttttcactgcattacttttaccagtgccctttctcttgtggatgaggggcacagcctgtcaaaattgagaattgaaaacttcttgggtttgagtagtttcgtacttccaccagctttttgctcttttttctggtttgggatggtttatgaaattgtaagcttgtttgggccttttcgtgggtgatcttcattgattcccggactccattctataatcatgtatttggtgctcttttttcttgatttcattggatttattttgtaggttaactgaacaagccttcatcagctgtcatgttaatccttcaactttaatgattatgatgatggaactggaaagtagtttattacggctgagaatataaatgcatatttctaaaaattgatttaaaaaataatgatgtatttgtggaacatagtgcaatgtaatacaatgcacaagagcgagtagaaattacagcttaggtgtttagctgcttgaggcctttaggcttcaaaacaactgatggagaataatgctttaaacatttggcagaatatatatctgattttttgaaacatctctcatgtccatgctcccacacatgtttacagtgaacatagatgctgtgatttggttgtcctctcatgattgtctttcttagcattgcaaatttcataaactttttgtctctttaatagttccgctttcttgcctcttattcagaaggaggattcctgtcaagcttgcggagagagtga

SEQ ID NO: 7010 - DNA, 3192 bp, Populus trichocarpa
  Intron number 1 from transcript POPTR_0010s11880.1 (locus POPTR_0010s11880) derived from phytozome v7.0 (chr-ID scaf fold_10; pos 12019444 to 12022635)
aaggtaagcttctttctttgtgctttcatggttttattgctttttcttgtattgattctctaatctgcttggtttattttggtttcatactctttatctttattattcgctgcagctcagtcctcttagctagcttattttaattttttttaattcttgaaacaatgatttgtaggcattagttgccattctattctacctgtttgcttttttctttctctctctgtttacctcgattcccctttcttttcaagttctttcttgtagttctccagttaagtttgcgtgtgcctttgctgggtatctttttttttttgcagtttttcagttatctctacttaatagtttaagttttttcgtttgaaatagtattcttcttcttcttcttcgtcttactatgtgacactagcttggttttcagtgattagtctgaacaggaagataggattatttgtactataatttaagtttgcaataaaataggtgttatttggttgaatttgcagggttagtgtactaattagtcaatagtttccttctacttcattgcaggtctgtttcttgaaacctgtataagaaaaggatggcatgtatgttgaaagatattctttccatttgattttaatctgttgctatcaaagtagaagcctctggataaaaatcttacccttagttgaaaacctctgatctcatctcaaccctctcttttaatgggggaatctctaccatgttgcttcccagctcgtggcagtcccttaactagcatattctgtgatacatttctactaaatacgctgtaggaccaaaaaacccttagcatgaggatgcaaaagcatcttgtattggatgaattggaatcctagaaatctctttccaaggatattgttgttgttttgctactagtaccacaacctgttgcatacatgtattccactacagcattgtacaccccccagtgggcagtggatgtatatagtatgcaaaagcaatcacctccctagctgttttattcttgcccagagctctttttttttattatagaagtcatcctcattgtagatctgattgtcaggatattatagaagtcatcctcattccccttcaatgtctagagatttgatatttggaaaaattttgaagttgatgatggtctactaagtgcaaggcttaatcatgatcaaagttaggagggcagtgttacataaattgtgtgatgtgtcgtttatttacaagaccccatttgctatattatattatttatagttttaaagcagaacctgcatctctcaatgcagggagctcaaaatgtccttgtaaagatggtaatgggtattcatgagtcgggtttctaccatatccattagccattggataaaaaatttagatattcatactatccatcgaatttcaggaatttatttgagactttgagtattcactatttaaatgatatttattattcaacataaaataaaagagtaatatatatttgagatatgtatacatatatattaaatggcgatattataaatctcacacatgtgtttgtgtgttatgttaacgttgggctatatatatgttgagttgagtttggatcacatttgtgaatattcttattcatattttattcgttacctatcgggtaaggcaactataaaaaattccatccatttggggtcatttccactaggttcgtgttaaattgtcatccctacttgtacattgtgaatgcacatcaaatgtccaatgactcactacatagtgtaacccacctcaaataacatttttttaataaaggaactcaaataatatgttactcaataaacaaatattttgttgattataattcattaacctatatctaagttctagaataatatatagtatcttaaatattgtacctaagcttagaagtagtagtagaagagcctgttttcaggttaacaatggcatgatgtattctagacagaataacaatctctctctacaatggaaaggataaagctgtaattccataaatggtttcctggtacgcaaagttcacttttgcccttatggatttatcaatgttccacttcgattcttatggtttaaattttttcaaccttacccttatagttcctgaaaagtgaaaagttgcaatgttaccattaaccattaaatagcctacttctgaatttgattttgagatttttagcagcttttttctagatgcttaatatgcatggggagttataaagggaaaaataataaaagacaatacaaagtatgaaaaaaagtgaacgtttccttggttatttaatattgggaaactttaaagtatggaggtagaagtagaaatattaatgaatccaaaagggtaaatatatagtttacccttcataatgcttttaagtcttagggagctctgaaaagaagacaaataatgatgtttgtatttacaatgccttttcatgtagataatcaatggatactatgaatagttgtacaaagtagataaatacaatctgcaatttaacagtcatatatatgattcagcatgagaggtacgtgtgggcccccattatttggtggtgccatcttaagttttgctcaataagaaaagtgttggtttttatcatggtgattccaaactggattgggattagtgggactaatttgttcccttttttaggaattggtatggttaaattactagatgctgtcactgtagaaaggagttaattttgcatttatatttctttttagtttacttatagattttgcctccattattaagcaaccatgtctactgttaatacttgtattctgaatgcgttgtgtatgggtcataaataaggcacacaatgcgttgatgatcatggatatctacctaactggtgtcaaatgagctacagtttccacactttgtgtctgagcgtatagaagctattttccattctattttccatgcctgacattatctcttgaatgtcaaaatgcgttcttcccttgtttgtttcagattttctctggccaaggattgatagtctttctgaacatagttttgcaatgtccgtgttcatatttcataatatagttacagaaacttttagtggtttgatgaagatgaaatcttttctatcaacaaagacaatttgcttgtctaaatcctactgttgaattgctttttctctctctctcatttaccag

SEQ ID NO: 7011 - DNA, 1609 bp, Populus trichocarpa
  Intron number 1 from transcript POPTR_0001s33990.2 (locus POPTR_0001s33990) derived from phytozome v7.0 (chr-ID scaf fold_1; pos 32139409 to 32141017 reverse strand)
tgcaaaccctctaatcaagacttttggagattttggtatgcttcttttctatgatttttcccaaatctttggtttatctgtaccagttgtgaactgggttgctgtttttttttagtaacgtctagatgataaaagtactgtttttttaagctctttttttttttttggtgatagtgcgatctgaaatgagtggtggtggggcttgtagagttaatctagatatatgaccatagactttgaagatgtcagaaagtacaaaaaagtttttatgtttttttttcctagctgtaattgtttgtgacatctttcaagattgtgccttttttttggtggttttgttgtttgtagtatgcgtaggattgtctgtgtgtttcattatatggttgaagattttggtttatttatttaaagggaggtgtattgtgttctctgttgctgtattggttctggtgatttatcttgatgggttttattttctcatgtaaaagaagataggtgctttgggactaatctaagatgatcatagaaaggaatgaagctatgcttactagattggattgcataaaaattgaagtttatatgactgcagggtgttatggcctaattaagttttttttattattattaaaatagaagttccattctgttgaattttcaaaatggagtgcattagctggtagcctgcaataatggaaatggtgtgttttatgcaaggaatttatattattagtgatatttgttcagtctggaggataaaagctgaggttctccatgaggagatttttttattccttattggttataacaagaggaacggcggagtacgagtaagattaatttccttgcttaaatctggtgatatattaatgttttaattattagtgccctttgaggtaagttatcccagtgagaaatcatttttaggcagatgagtttttatcaataacatatttaatatatttgacttattttttagtattgccatggcatcttgaaactatgcagtttggtgggaccatttttaatcactactttgaaatctttgtatcgtgtggaagatggtaaagaattttctgaaaggtttggagtgtgaatggatgtcacaatcggttcgaggtgttagttttgttataaatgccactgctgatatcttaaaatcagataaaataattttagggaaactgaggctggtagggaattgtacaggaacaccaagaaagatgtaaattgagataaacagaatttgatttggttcaagtgctcttcaatagtggttgtgttgctgattagttgagctctgtgtgttttgtcttcaccagctggaggcctggtaatgttttggtaaaactgtctgtcctatgttggttatttatgggtctacaagttcgtcttctatggaagtgtgacattattggatgttagataaataattggttctgtggtggactactttcataaattattgataagcattacagatctaagaatgatacaattatgttattctaatttaattgcaagttccagtgccttcctgacagttgaagttggtgcatgtgcattgtacttcgcaggtagtaaagaagaaacattttttgattctcgagcc

SEQ ID NO: 7012 - DNA, 1317 bp, Populus trichocarpa
  Intron number 1 from transcript POPTR_0010s12140.1 (locus POPTR_0010s12140) derived from phytozome v7.0 (chr-ID scaf fold_10; pos 12217705 to 12219021)
cctccctccttgactcagcacgcacatcttctggggtattttgtctctccataccacaattatatatctgtttatttatgtccttttgtttctgcatgtgtttatgtttatgttctaattaatcgaaactctaaaatggtcgtgcttgtttgtgtctgctatgcttagtgtgatattctcaggaccccctgtcactttacaacgttgggtttttctttcttttatggaactagttaagaaacggctttgctttactcttttttttttcttttccttcaggaaaaataaggtttgtttattaagtcctgcattaaacacttcttgattaaggaaccgatgacacactagaggggttttgctagaagcagctttagagttttcttgagtaaaattttggaattcttgcgattgaacaagacatcatgagtttggattcgatccattccaataagaatagcattgataagtttggatttcattaacatttagatgaatgtcacaccaatcttgattctgatatagtttctcacatacgcttgctaattggctccacaatcttctttgctgatttgagtgattttgtggccaagagttctcgctttttaccccattatattcacgtgtttatgataagtttttcttgattagattttttgagtagttttgcagcttcctccttctagccaaatgatcaaattcttatgaaggtggaggttatgctaattatggtaggtcggaaaaaaatattgtctgagatgacacgtccgtgcaaaacaacgggcctataaatgaatgtgtatagaatattgatgtggtgagggtggaaggtatagtaatgtgggaaaaaatgatttaggttaaatagggtagtgagttttaatttctcagaatcttttggaaaatatggccttggatggagcaaaaggattgaaaaaaataaaatcgacccatttagtttgagattatttctttgctccaagacttgagttatgtaatatgttgctcgaaatggtaggcaggcagttatgactattcctagccaataaactccttaaacatgatgaaagggggacttggactccaagattttagtactatctacagattctattagaagcaaggttgcaattgtgaaggttgtccaaatactattcaaatactttttctttgtttactacatatagcgcaatggttaattgatgtgccctctctgttgtagctgctcatgtagaatacacaagttctgagcttattttcctgttttgtttggttatatgatcaggtcaatattctctttccttgaacagccttgatatc

SEQ ID NO: 7013 - DNA, 2196 bp, Populus trichocarpa
  Intron number 6 from transcript POPTR_0018s12440.1 (locus POPTR_0018s12440) derived from phytozome v7.0 (chr-ID scaf fold_18; pos 12914196 to 12916391)
aaaggttagttacatacatacatacatatatatttctctttacaagtgtttagtgataagatgattttatttaattttttgtttgtaattttagaatatagtcttgaaatcacctacctaattggtactaaataatcaaaacagatgttatacatgaaaataataaaagtcccttacaataattactattttttcgtagaatattcttaataatttatacatggaatattagaagaactaaaaaagatatataagaaaagaacatttaatacatggaattaggatatctttaatagtctgtcattaaaataacatggacatggattatttttagatgaatataagaataaggattctatatttatttttggatatcaatgaaaaatagtatctacaaaagcgtttttttttttttttaatttaagctattgtataatagtaagcctttctcctattatctgtaattgaagacgagtctgcttagctcaatttaaatagattttctcattctcctccggtctatataaatctacctatccatatggtgataataaaaccccaaaacattaaagcgtaataatgtcctccaatcctcatgtgaaagctctcctttaaatttaaaacttacacattcttagacggtgcgtgtgaccaacaatttttcaatttgaccttgacaacctaattttttttttctccttcttgattctgcatctgacccttcaaagtttcaaaacagcccttcaattttatttttcagatttgatcatttgttttattttaaataattcatagaattgaatttttgtttaattttatcctctgatttttttatctgtcagatttagtcataattcttttgattgctatttttttaattacttttgtaattgaatttattttttaattgcatcacttaacattatgtcaagttcggtccttattcttttaattgatatttgttttgttttagatctttttttatgaaatttttttttcaattttatctttcaacattttgttgatcgagagtttgacttcatgattttttcaagtttgccttctaggagattattcttgccttaggactcgagtcacgagtttggaaggttaacccaggttgattcaggtctttttttacaattaattttatcaatttcatccttttatgcatgagattatcctgatcttatgtgtcaagtcacaagtttcaagttaacatcagttgacccaatacaattttgtttcgtttgatttatctgctgttgttgcttattttttcttatcatattattaaatcaatagagcttattaaatccaataaagtcaatgacctgactctcaaatttctcttgcttctttaaaaatgttatcatcatccaagaatcccttttttttacgtcataaaaaatttgatccttattcttttaattgatatttgttttgtttttagatcgtttttttattaaaattttccttttaaatttcatccatttgcattttattgatcgggattttgttgatcgaaaatttggcttcatgattttttaggtttgcctttatgaaataattaattctggtatgaggatctggtaacgagtttaaaaagttaactcgagttgacttgggtctttttttacaattgatttttttattccatccttctgttcatggggttacccagatgtcatatgtcgggtcgcaaatttcatgggttaacccatgttaactcaggccaattttgttttgttatatttatttgttgctattaaattaactgagcttattataaagtcagtgaactgactctcaaatttatctttattttatacgctttccttgcctaagaatcttttattatttaccttataaaaagtttgttcaacccgcaagttagagcaggacaccaatctagtttctactatatgttgaatataaaaagagcctccattcatcctatgttgctcgccttcacacatccattctgaattgatccttataggcttcaattccaaaacaatacgccctataattttgtactaataaactagttttggttaacttcttactacttacaaattgattctataagcgtgttgtagaatcttgtagtctgcattaaattgtatgctgaatttattttaacatggatacttttcaggcctttgtgagttaaaacaactccaggagcttgat

SEQ ID NO: 7014 - DNA, 1508 bp, Populus trichocarpa
  Intron number 3 from transcript POPTR_0002s13560.1 (locus POPTR_0002s13560) derived from phytozome v7.0 (chr-ID scaf fold_2; pos 10058039 to 10059546 reverse strand)
acctcaagattgtaagtttgattccttgcttatgtgcctagtttaacatattgtgtcggaaaaagtcgcttaaaaggaatattagcagcctagaaatatggatagttctagatctggtccaagatgaatgttgcagggtgtaaagtttataatatgtttactgcaatgccataacacagacgttgttgttatatttatagtaggagataattatatacaaacgggtaagggatacactatgaaagttgagatacacttgaagtgatcttagcatgatccttatcttcttctgcagtagtggataagctgagattaactgtattgttagcgggttggattaggtctctaatacgacccttcaagcacaacggtatgggaagaacgttgagattagaacgcagaacaccaaatcatgaggaggagagtggcttggtgaagatgtcagcgagttgatctttgctggagatgaacttgatggagagaagtttcttggttaccatatcacgtacaaagtggaagtcaatttccacatgtttcgttcttgcatgaaatactggatttgcagatagataggtggcgccgatgttgtcacaccataatactggaggttgagacatacgaatgctaatttcagaacataatgacctgagccaagataattctgcggtagtgtttgctagtgatttgtattcggcttcagtgcttgatcgggcaactgtttgctgtttgcgacagctccatgatattaagttcctgccaagaaaaatgcaataactcccagtggatcgtcgatcatcacgacttcctgcccagtcagcgtcagagaatgcctggagattagtggatgtggaagcataaaagtgaagtccatgttggattgtttgcttgagatatcgaagtagacgtttgatagactgccaatgaaggtcggttggtttgtgcataaactgtgatagtttatttacacaaaaggagatatctgggtgtgtgatgcagacatattgaagggcgccaacaacacttctgtacagagttggatccaagaggagatcaccttcaaaactggagagatgagtagaggaagccattggagagctgatcggctttgcatctgtcatttttgttcgtttgagaatgtccataatatatcgctgctgtgatagtaacaccatcaatggtggaagaaacagtgggcggggggggggggggagtagtgccatctacgtacccgagatgaggaacaatttgagggagccataagggatagttgtctctaatacagggcatttattgaaaccattgaattgggaatatggtgaagtagctccaacgtggggaactgcacagtaaataaagaaatgaaatcaaagaataagatacacaaggaaaaagtatataatgtctatcacatgaatgcaaatgttgatcagggatccatgtttatttaagcatcagcaatatataatggtcgttctcggtaattttcttgcaggtgaatttgatactca

SEQ ID NO: 7015 - DNA, 1855 bp, Populus trichocarpa
  Intron number 2 from transcript POPTR_0004s07350.1 (locus POPTR_0004s07350) derived from phytozome v7.0 (chr-ID scaf fold_4; pos 6066476 to 6068330)
aataccctgtcaccactgagcttcaggcaagccaccagtaccttcacacacgatatgttagctgctatttttttatttattttcttctcctacacagagattcaagtcttcaaaactaaataaatttagacagatcattaattacatctacctactgaagctataaaatgcattaaagtattggattctaataaagattatattctaaaataatttaatcttgacttgtataatgtggtagttatggacaagatggtttaattaacgttttaatctctaaaaatatcgaatttaaatatacgaagattggaagcaaacgaagcttgtaagcctgtgatgggtctccacgcatcccctagtttaacaagttaagaatattaaacaatcagaataaactaggttgccaagtacccttttaatcaatcttacaaaaagatataattgacttttaatggaatattaatatttaatgtttagaattgacattataaaatatattattaataaaaataatattttaaaacgatagaatcgtcatcattattcatccacaggtacaatgacataacaacttgaatgttgaaaattaattcgatttaaatcttattatttttattttatttgataaaaattaaatacagtataatataagtttgaattgaagttggattggacagtgcgatcgaactgaataaatttagtcttcattcttgccgattttgaagcctttactttatagttgcaggtccaaaattacttattgaactattggctgtgtgtagatgatgttcgagctgtccaatgatgtgacattctcctaattagatgttgacttttacagtatgccctaaaacaaaaggtcacgatccaactgcctgctataagagattaggaaacagggattcactttctgttttatcagcaaagaattaattgagattaaccttggaaattatgattattttgattctcccaaaaggagcaagacacacacacaccgacagcttagagaattcatgatttaaggactttttcatcttctatcatcacatccactagtcggtgagtcaggaagaagacgactacattgctgggcccattgagccagtgatgaatgaatggcacaagtgtgatgaatgatgaatcaaaattgatgtccttttgtcttctactctctctttttttcttttttcttttttctttttcaaatgacaaagacgaatacagatatgacagatctgtacacaattgagcttcaacaaagaacaggatatttgtcatatatattaaagattaaaatggtgttgcttttattaacaattgttttcaaaaaaataaataactaattgatggcttgattttgacttgcttttatcttgaattgattggtttctgattaacttgagtttttaactgagtcgttttaattttttttacttgaattactctaaattttaaatcaactatattcgagattgacttgccacgccgattatttaggttttataattagggaggatataaagctaggaaatgaaaatcatgaagaatctgtcttataaattaaagaaaaatcagtaattgatttctgatatttaattgttaagaaaaattaattacatgacaagttttagtgtttatcatagctagactaattaattacgatacttttcttcttatatatatagttaattatgatattcttaaatataaagtaaccattcaaccacaaataaaaattattgattaatgcatttgttagtctttaatttgatgaattttcaagacctttttttttttttttttgcaaaggagctgaaccatatgatgattgtttattctacatgcagaatcg

SEQ ID NO: 7016 - DNA, 1959 bp, Populus trichocarpa
  Intron number 10 from transcript POPTR_0015s06720.1 (locus POPTR_0015s06720) derived from phytozome v7.0 (chr-ID sca ffold_15; pos 7719933 to 7721891)
gtgtaaatctacctgctcacactgttgtgattaaggtttgtgctcattatcaggccatgtatgttcattggttttactgttgcctaaattcaatcctttctgcaaccgttttccatagctgcaaccatagacaaaatgaaatcaatctcaatgtatgtaaagtcaccgacccgtttggcattgtattagcttttgcttttcaaagtgcttttcaaattgcttttcacctaataaagcatcaaattgatgctttttagatgtttttcaatgatttttatgtgttagtgtcaaaatgcttttaaaaaatatcattttaatatattttcaattgaaaagcacttttgaaaaacaccctgcaccacaataccaaatacctgctgcttatttgaaattcttaacttaaaagacaattggtatcttattagttagagaaagtaagtgagcctttccttaaaaaaaagtagaaatcacacttggaagtaaaatttcatttcaaccaggtgaactaaaacctttgaattgatattaatgcaacatctcattcgacatgcggctcattaaagtaaatatcaaagtgacattgtttaataacagaaaatgcattgattgcagtgctatgcacttgaagttgttcttcatactggctagtttcaggaatacaatgcataagatagcgtttttacatagataaatctctgatatagttttcatttgcattcctctttctattaaccattctgatgttattctccaggggacccagttatatgatccaaaggctggtgggtggcgtgacctaggcatgcttgatgttatgcaggttagactcggaggaaatgtatctaatttctttattgcttattattggggtcttgtctttttacagttctcatgatttcattgtatacagatctttggaagggctgggagacctcagtttgacaagagtggtgaaggcatcataatcacgtcccatgagaaactggcatactatctaaggttgctgacatgtcaacttcctatagaaagtcaggtagttatttatagtttgacttcaggatgtccaagcataatattagactcatattattggtgtgctagagtttctaaacatgatttggagttgggttactatggagtaggtaacttgggtatcatcttcccttgtcaactctgaagaccatcttttcgtttgaagtttggattctttcactttcacttatggcaaggaacaacacagattattgaacagcttaatacaaaatatggactatgttttacttgtttggagtctattctcccatgtctgttacaagattttatgtgtagcttgtctgcaaaatgaagttgtgttctgtatgcatctacgctatttgatctgatattacatttgttgaattgtgatgaagattttcatatctcagtttctagtagattgtagtgactctgttaatgaatatggtttaggtatttaatactagatgatagttacactaacagtaaagccactatatttgcaatcattacaaacggttctagttgcaaacttagccacctaaataaattaaacctcttaatcaatatgctgggtaaatcctaggtatgcatgaagcatgcgggaaaaaaggtaacctcataatttggcaatttgcacggaaatattatatccttaatttgctgcagagttggatggtctggccatctgttgttgaagccatgatggaaatccattgagttcacaagttctgtctagcaggataatgcaaatggtttatgttgggttttgctatatggttttcagtgtggtgatggttgcttaaaatatcttatattctgattgtgcattgaaatatattccatttttgcactgattctatgtagttaaatggctggttcacatattggttgtgatttttcctttgtgtttgcagtttattagctctttaaaagataatttaa

SEQ ID NO: 7017 - DNA, 1853 bp, Populus trichocarpa
  Intron number 1 from transcript POPTR_0004s12420.3 (locus POPTR_0004s12420) derived from phytozome v7.0 (chr-ID scaf fold_4; pos 11518092 to 11519944 reverse strand)
agaatctctcttaaaattcccttcttcataaactggtaaggtgcgtaccgaacttctttctttctttcttttcctgattggtgttcaaagttgttctttttttttaattatagaattacatcaagcttggattttcatggatcagttgtttattttattttattttacttctttgaatgccaggaatgtttctttaaggataaaaaagaagtgggctttgtttgttttctctcaatctactattagttgttgaattttcttgctccttgttgtttgttgaatctactaaaggttaaagaactaagaatttagagttgtttttttttaatgtttttggggttaacgttagctgaaaattcgttacggtttttgttaggagtggatttagtctggcactgttgaatcgaaggcttaggaagcatttattcgagttttaatttgtgttatatgggtgattttgaggttgagtctgaagggagggtagtatttgatttatttcagattgttggtcagattgttggtctattatttcattctaaatatcatcgtttgaagggattgttctcttggcaaagatgaacaaacataaatgcatggttctgggaaacaaaaaatgtccccacacgccagctcgtgcgcgagtaagcacatatgcgttcaagttaacattcataagcaaacttggatgcaaaatgaggactggtgtggtagaaagttgttgcaattattgaatcagctctctctacattcacatcccttgcagcgctgaagttggtggaagataagaatttgtatttgttagatacactagaaaacaagttttatggttcaatcttcgcaactgcataactgtgatctttgtttgcaagtttgacttaataccttaattggtttcatgatccatcatgcagagattgaaagtatagggctcagttagggtagcaaaaggatgtttgcttgtgcatgaaggtgagttctcagctgttcacatatctaataaatggataacatctagatttgatggtctaagataagaatttttgggataattaacttctctgggtaatggttgatagtttggcattagaatttgcaaatatacatcttgttcagtttattggtatgtgtcatggtcactgtttgttgtacaaacttctgcttctgctttgtgaactgtagctgctagctagctggcattgcatgcagagaatgcaaattgatttaaggatgcagcttgctcaaataacattgaaggttaaccagtgaatgtatttgtctaaatgggaaacaatgaaagagcagcatgtttgctcaagtaatcaatcctgacaatttttatattggcaaacatgcgcttattttttgggtcattttagcctttcttttctagttttcacttgagattacaagagatggtgttctgtttagaagctctgacaccatgaagtcaatttttcatcatcctctttttcattttggattactaaccccttatcctgtttctttctaattagctttctcctttttggagattttagcttattatgatgaaaccatgatattatctgctttgacatacaagattaaaagctagatctctctattatacataatcagattgcagttcaagtagaaaatgtatgccaaactgaagctggcagcctaaattacatgtaatttagtttggttgtcattctgattcttatttttccttccaggtgaaatactcggaaattattagcaagagaagacaatccagtatgaatatatggttaatgtcactccttgtatggttcagcttctacaaccattgaaagtgatgttgtttgcatagtcatttgtcaccaatcaaa

SEQ ID NO: 7018 - DNA, 2818 bp, Populus trichocarpa
  Intron number 3 from transcript POPTR_0003s07660.1 (locus POPTR_0003s07660) derived from phytozome v7.0 (chr-ID scaf fold_3; pos 9189078 to 9191895)
actgggtatggtaatttcttatcctctccgtagatctccattttgattttgtgagtgctgatatatagctgctttatagtcggacagtaaattccctgtttctgcctttgaggaaacacataattgcaatcctcggagtaattattgtgtttttggtcacatctgtagtttttcctatcacatccattgatgattgcctttgacaaatgccccattcaagatggttaataaatctggtgtagttaaagtgtcattgagcagccagatgcaaagacatccatgttggcctaaaagaaacatgttagaaaatttaaataatcttagatagtctagaaacttcagctgcatttccatatagtctatgaattcgatgggttgacatgtctagaatcattcagttgttcttgttgaacatataatctggtaattattgtcatcaaagacataacagtatttctattctcatcatctgtgttatccattagctttcccccccccccccttttatttcgacatggacatatctactcagttaatagttttcatggatacttcaaacgacaaacagcttctatcctctttctttcactttgaatttcacccaggaaaatgttacgcgttctgcactggaaacaattggattctttcccgtaccataatgtcgtgtcattggtaattgtgaagagtattaggattttaattttattgtaaacccatatgttatgttaagaaggtggtgcgagcacggttcaacttgttttctaaaaatatttattttttaaaattaattttttcagtatttttagattattttaatgtggtgatgttaaaaattaatttaaaaaataaaaatatattattttgatgcattttcaagtgaaaaacatgttgaaaaataacctctatcgctgtcccaaacaccctctaagtatttagttattattctaggataaaaaaactaataatgaagacaaaaacatgtttgatttgagagacaaagacatgaatagacaaataaatatatcttttaagataattttgaagtgaattcctgtacttccagataagcaatatagtaggactctctataaacaatatttattattatttttaaccttaaaacatcattgtaaaaatctcttaactccaaacttgtataactaagatgtgtaaggataaaaataataattattataattttaaaacccgacctaatatataacccggagcaaggctcatgttataagttgggagggtcaactaggattgatcccattttttttaaatgactagaacaaagtccttttaattactattttttttttaaaaatcaatggaattttgacccatgttttatctcaagttgactggattactaatcaatctaaatttttgatcgggtcaatcttttatttattttttttaaactcggactgacccaggtctcgggtatattgagttccaggttgacttgttaagctgattcaggttttataactagggttattatactattattaattttagcatttaatataaactaaactaaaaaaataatatataattattttttaaaaagtatataaatttaataataataaatattaaaaataaatattttttttatattttttccaccatcaacctatagctctatcaaaacaattgtatcttccttttctattctgtttggtcatctgtcttttatgaagacaataacaaagctagtcttttatctcacccgaacacataattaaatgcgctagcaaacaataatgcatagaatcatcaaatatttactgtgaatatttcaaaagtgtgaccagaatacaataatcagtttggatgctgaacctaatatgtaagataaaaagctgtaaatgcaaatgtttaccccaagttgttgcataccaacgtcaaggctttggcttcacaaccaaccttagctgaataattataagtcttacttgagtgggtagttacgctagacatatgatgcaaacgaaaagttaaagatcacaacaaataaaaaatacataattttgatgaacgaaagagattatagatataaatatgaactttaaattcataggattagtctctttaaaaataataatagtaaagtctacctctgtaagaggtttataaaatcttcaataaactagaaatattatcttaattagaaaacaaaaacatgaaattacaaagaaaaaaagtataaaatccgaaagaaacatgataataacaagaaaaaccacaaaactgctaaaatcgaagatttgaacgagattttttatatctaaatatctaatggtctgcgtagcaacatagtgactactataggaaaaacgacatccaaaaactctagtaaaaatttgagcgcgatacaatgatcagataaaaaattatgaatcttttgagttttcattctagtttggcatgaccagatcttttcttggacctataactattccactggtccataaatatattttttagatcatccacgtaatttgtctatgacaaacctacatctgactactcagaatcactcgttatcgcaaaccaactacattaacttggttcaactttcacttgtcctcctaacatgaattttactcatttaaatgtctacaaatgcgcactcgtgcagcttgatacatgttttgaaatatgaattttgttcttgcgattttctttcaattactttgagaatgctggaatgtttgttctcgaatattgttcaactactgtcattatgttttgttaacctagttttcctatgttctaaaccatacagggaccttacgcattgact

SEQ ID NO: 7019 - DNA, 2239 bp, Populus trichocarpa
  Intron number 1 from transcript POPTR_0002s04280.1 (locus POPTR_0002s04280) derived from phytozome v7.0 (chr-ID scaf fold_2; pos 2689107 to 2691345)
agattttcaggtgagtcattagattgtttgtcctgttattgctgtgaagtttttttgtattgttagtgtttgttctgtctttgaagtaagagttgacagctatctgatcgaagtattaactacctcattggtatttatagttagggattctgctgtgtaatgtttcttttagatgttatttgattgttctctgtcggattctgttatgctacgtagaagtaacaacaattcagtttcattcaatgaactagagaacattttaaattaagcagagtagattgtacaagtaggcatgtaaactattgcagcaactcaagggccatgggacctttttttttttttttgggggggggggattgagcagctttgtccttccaaccagccaggaaaacttattcatgctttattggtcctatggttaatcgccgctcatgcattctagttttccagaatcgggtctctgaggccagctggcacaggtttggggtggacaaaactgcacaaattttatacatggttattagattgccaaatacgctagcattaatcgataacatactataaacatgtgttttttcttgtgtttatatcatccgttgtctttatgtgtttctttacttcaactgtcaagagatttgataaaaaaaaatgcaacaaactcatttccccttgttttccataacagattgcataaaacaagatgaatactaaataggatcaatcaagaatcttcatgaattaatgacatggcgcacataaacaagagtaggttatatgttatattgttcctttttttctttgatatgctttcgcttttcgagttgtttttattagtaattgcagttggtattaatattattggattataataagtcttggtcactgattactgctgggatgcttagctaggcaatgtggaggctattgcatatggttctgtaaatggctgtctattgtgagtattctagtccttttagcgtcttatatcttgagtttttttaaatagtcagggttaatgtttggtaggattttcttaaaattcaaaaacagtagttaagaaattaagaacatcacccatactgaaatatcatcccactgaagaagcctcgcaattcaaatgagcccatcaaagctaatttgaaaaccattccttccaatttcaacttaaccttagatattttagactctctccactctcattattcaaatgaaacatcaaatgacatattccttgttttcttttcccagaaaaagaaaattttcccctgttccttgggcaatgagagagaaacatttgttctggtgtcaggatttgcatttgaaactcatttgcattgaattctttgaatgtaaaattattatgagtgggaggtcagttgaagtgtttaccactgtcttccatataggagatgatgcagattaatatgtgttgtgtttggctataaatattgatctttgcactctctgctcaccattcaatgatctgatttgtgtttccattacagccctctgttaagtttcaaaacatggtcgagcctagtaaccatccctttctctttttttggcatggagggtaaatttttttgcatatgtatatggactattgtgtatgcacacttgtacatatatatatatatatatatatatatatatatatatattttgacatatttgtgtatatgtcttattgattaaatactttcttaggagttttggaacttgactggttattattaacttatcctttcaaagctattcaaattttaaaatggaatgattagaacaactgcagcatctgttttcaggtgtttccaaatgtgatacgaccatgttcattgaaaagtacagattcttatgctgatttgcacttatattattgtgatattggaatctgattattaataacagtggaatgcttaatttgaagttctctatatgttgagattaccatatttatacaatcaacttggtagtgtgactcttttttttttggtaggtacaggtataaagaaaatgctggtaaacaaatatgggctgtgttttttatgtctctgtaacagtagattatttgagggtttttgttatatgatcacatagaatggcacacaaggatccttgtagccaatccgaactagtttgagattgaggcttggctgttgttgtcattgttacgaattaatttatttgattttttggatgtttccttggtggtgctaattcatgtgttctcattgcagat

SEQ ID NO: 7020 - DNA, 694 bp, Populus trichocarpa
  Intron number 2 from transcript POPTR_0009s07840.1 (locus POPTR_0009s07840) derived from phytozome v7.0 (chr-ID scaf fold_9; pos 7276178 to 7276871 reverse strand)
tctcctcatacccaggtattcattttcttggaaaatttatacgattttgttaccattctgttatcagtagttttataatgtctaagtaatctaccattgataatatttatgatttcttgttaaatataaaatattgttgtcaaaggttgtgtgttattattgatgggattcgatcattgcgtgtttttttttttttttgaagagaaattctgcgcagtctctgctgatagagatgttttattgttaccacatgcgatcgggtatcaatgttagaccgtagaggcatatgtaatacattcactatcatactctgcatagcattactcttttttggaaaaaaatgatttcaagttaaaacctatttaaggaaaggaaaggaaggaaggaagaaacttatggtgtaagttgaatctctgccattctccatggagaactagttaggtaaataaagagctgcagatttattacctaaagttgcttctgctctatttcctctttgcttatgagccatgactcatttgttccccttcggaattgaaccctccatgacctgtcactcaagctcttattttgctcttctcatgtatgctcttttgatgtgcttgctcatatacaattctagtatgtgtttttcatggttgtaaatgttttgattacagctttcatcccatttttttggggagctccttgattc

SEQ ID NO: 7021 - DNA, 646 bp, Populus trichocarpa
  Intron number 3 from transcript POPTR_0003s16760.1 (locus POPTR_0003s16760) derived from phytozome v7.0 (chr-ID scaf fold_3; pos 16289466 to 16290111)
gctcaggtttgcatgtcatctttatggttctttataagttctcctgtgttgaaattcaatttataacatttttatatgctttcatttttttaatcatattcagttgtaaaatagtgttgttggtaatgattatgaatgcattttaaagtaactaaactaaatcttgtttaaaatgtaattttcatgctatggacttgttttttttttctccttttccatttggtagcaaaagtaaaaatctcaaagtgacaggataaggtggcgggcaagagtagcaatgctcattttgctgtgcttccatttatgtaatagtttactttgaacactttctttccagacatttgtttggacaaccgaagaaacatcacaactcgtactctctaaatgacttattctgtaggaatgaaatttccttcagcattctttatttattttttaatgtgaatatctgaatgttaaacagttgctctttggaaccaatttgattgtttgagtttaatttcttcaaattgtcttttgtaattatatttgctcatcatttcaggaaaatgaattataaattgctttatgttggaagtgtctgttagagattgtgaatactgaattacatgttttgcaggttaacagccttcgacaggagctgcaa

SEQ ID NO: 7022 - DNA, 3233 bp, Populus trichocarpa
  Intron number 1 from transcript POPTR_0006s22750.1 (locus POPTR_0006s22750) derived from phytozome v7.0 (chr-ID scaf fold_6; pos 21670800 to 21674032)
atacccaaaagcttcttgatgtaagtggccgctttgtcttcacgttatcacatttatctgcccatgattgtttgtttgcgatgctttcatataatatatatttcactcaaatgtttgaatcgttttttttatattatttgaatttgactgaaaataaatttgattaaatgtgatgtactccatctaggaaataggaatcgaatcttttaaaaaacaaatatcacaacgaaaacctttattacaaaaataattttttttcctaaaattctattcttaaaatagggattataattgcttccattgattaaatattagtaggctgtccaaatgcaattaatccatttatttctgtttattaaaactataaggttatgtttgtttttataatctgcttttaaaaggttttgatttttttattaatttttttttaaatttttttttaataggcagataataaaaataaattttaaaaactaaaaaaattattttaatatatctataaattaaaaatatctcttcgctcacatcaaatattttaatagtcaattcttctttgttttagagtttttttatatataaaaaatgtttttttagaaatatactaaaataatattttttatttttaaaatttatttttatattaatattaaaataaaaaaattaattcaaaataaaaaacatttttttttcaaaaatactgttaaatccttttatatatatatatatatatatatatattattacatgcatgaaattattaattgcttttaataaagtgggcccagttagccgtagaaattagacaaaatgatctgtgtaggccctctcgcattcaaggcaacagagagtggctcgtgtctctaggcttaagttctcaacttgaaaaggatgtatggataggactcagccttaaggcagcccttacgtaatatccttgtgcaattacgaaattagagattgtgcaattacgaaattagagacccgactgattatcttgtttttagattatttgatattaaaaataatttttaaaaaataaaataatattatttaatgcatttttaaataaaaaacattttaaaaagcaattccaccgaatcctcgaataccctacattatgcatggcacattaagttcctatccgagtcctaggttgggacaccttcatttggctgctaaaaatgaatggcagtaaggcataatctgatcgatatcattgtcctctgatctgtctttgtttggggagctactacatgaaattggtttagttgtttacctccagatgcaatttgtggcaggggtgcgactgtgtggttggttagaaacaaaaaactgaactgaaccgccatcatttggtctggtaacttgattttcattagtttttcttaaaaaaatcataaaaaatgaaaattctaaatcaagaaacatttgtatttattcttacaagcccccaattcaggtttttgacccggaatttgcccttgatcgatccttaaattagattttaaaactatgatgataatcatttttatctttgagtgttttaaataaacaattttggaattgaaagttttttacaataataatattttaggaataaaaaataataaatattatctcttgagacatgttctttttgtacctcttgttttcaaagtacaaaaactcactccaaaattatctcgagataaatttatttttatgtttttgtcttttttttaattaaatatatttttgtttctactatttctattctttcaaattggcccttatcagggctatttaaataagattaggaaattaaagtggtaggaataatttgaagtctcaagtttagtctttggcggctcaacaaccacctcgaattgatcaccaaattttcttcttctcttttttctaaccgcaccctcatttcttgtaattgcaatttctattcaataaaactcactcaattcagttctttcaataaagaatttacaatttctataactcaattccacaattacaaattcagattgttacacccaattccacagttacagattcaagactgttacattgcttgggtcaaaaacatattgaaacttaatagagatatagctagaacttccttaagcatctgcattggaatggactctccgcttttctttggcatgcatgtggcatccttattcctttaggtcttctaatttaaagcttggccctcagagagtgtatgatgctggcttaggtcaaatgagaaaatgtttaatgttatttggaaggagaactgctgttgggaaattagtctaatgatttgatggaaatttaatgtggtttatttcttaacaaggaagcctgttaggggtcccttgcctggatgaaaccgttttgtcttattagctacccctaatctattccaagatattgtcttgtggctttggttctgtctcttccaaagacagacagttgctgtggagtctgaaggagattattcttgcatcttctgcagacaagctattgaatttagagaccacttgtcttatgattgttatctttcctgaaggatttggaggttcattttaacaccatgtttggttcttgcacatgttgattcttagaatgatcagttccggcaacttatttctacattgaagaggaaaacaattcaagtgtttaattcttaagttagcatgggcagatcaagtcaagtgtggttagttagtatggaatgatgaatccataaccatctttctcatactgagaagcattttcaaagggagaactatttttgctgcaagattaagactgtatagccttggatgtaaaaataatgctgaaagcatatgcttctgtaataaattggcaatacccgacagtcgcagccatctttaagaatagaggtgaacgcgatcaaattttatagtgttctgtttttgttggcagctagcaacccaatttgttttgtatactttctttagatggaataaagttttcttctccatccaaaggcaatgtggttttcgtagtccttcaattctcgagaacgatttaaataaaagattctggacataagctggacagtttagatgtgatagatctagtcttatattggtgatgcatatcagctcttgaaatggaaaaggcctaaccactcttaaatcacctaaggcagagctgcaagctagtaccaaagctttagaagttaccctcgcgtgaccactggaattatgactcttattttacagggttgc

SEQ ID NO: 7023 - DNA, 1039 bp, Populus trichocarpa
  Intron number 1 from transcript POPTR_0010s21120.1 (locus POPTR_0010s21120) derived from phytozome v7.0 (chr-ID scaf fold_10; pos 18533512 to 18534550)
tctctgatcttcaccaccttggcgacaagatttcggtaatttttattcacatgtttcaccaatttactccctcctcacactagaattgcatagaatcattcataattgtttagaattcattgaagtttatagatgaaagatatatatattattattttcatataaaacgaaatcgagctcaattcataaagaattggattgttttaagtttatttatcttcttcttttgcctgtgttgtattcgtggaagtctaagagatcgtttctatttatttattttttaaaaaatttgttattttttcttagttctgttaggttatactacgaggaagagagataagtttcattggttctgtttaccttcggaaaacggaggaatgaattggagtaatttttatgttataatttctcactaaaattgagttgaattttgcaatttgtgaggaagagaaaatttagatttgacaattgtagatatttgtctctcgagaaatgattcagctcacgaattcgtgagaatagtaaatggtgccatttttatgtgtccgtgtctatatagcataactcttgtctctctcttctcggatcaccacaaagttctagttttgtggtataatttctgtgattgcttgtaaaattaatcaaattggaatttttgtaccaaaaaaaaaaacagaaatctcaattacatcctgtgagatcataaactgaagtgcacgtgacgaatagctaatctcatgtctgtctgtgtgaatctcctctggtatgtaccgtgatggctgtctctggaatctgcaattttatttaaatggcaactcttgtgttttgtttccccagtatggtttgtttcaataggtgcagttgatgacttcctcgcgaatcttggaattgtatttaaattacaacatgcagtctatctaccagactatattgatgcattttaactcctgttcttgttgaagattttactatttgatcatatagaatttcgctgattatttgctgctcttgcagttttacaagcgcactgtagcccaat

SEQ ID NO: 7024 - DNA, 2160 bp, Populus trichocarpa
  Intron number 1 from transcript POPTR_0006s24360.1 (locus POPTR_0006s24360) derived from phytozome v7.0 (chr-ID scaf fold_6; pos 22984346 to 22986505 reverse strand)
attacccttctgttgcacttaatttctccctcaaggtgagtaaagttgggttctttttggtttttggtttgtgggtaaggtgtttgatgaaatgtgtcagtgggaatattgggtggtttgtttttatagtattttgggtgtttttggtatttgatgatggttcttgatgtgtgtgtgtgtatgtgaaatgtttgatatatgagtacatgaatattgcaatgattgatttcacttcgtattaagtggaatgttgtcttttatgattgtaaaggatggttctttattttagttggtgtttgtcatggtgtaattttaacaatgtagaatcttgaagttagaaagaaataggaggattattttaacatgggctgataggaatgttgccttttatgattgtaaaggatggttctttattttagttggtgtttgtcatgttgtaattttaacaacgtagaatcttgaagttagaaagaaataggaagattattaacttgggctgataggatttgatgggaaaggatctttggaactgattgctgcctgtaggggaatgaggattttagattttagggaaaatgttgataacaggattttggtacagttgaatttggagaaattttaagcaattttctagaagaagggtcttgctaattttaaaaataaaaggagaacgaaattcatgcataacttgtcaattgggaattggaaatcaaaatgttccccaactagagagttcctggctatacattgacttcatagattcattatgtcatctaaaatagttggatagattttgagattttggtgaattaactttggatgtataaattgtgagaagatcctggagtgagcttttgcaaggaatgaaagaaacgctgtttggagagataaggtggcatgagctttaataacaggtgcactggtatgtgcaagacggtagaaatgaagatccaagaactactatgttgcaaaaaaggagagcaaaaggagtttaattacaaataaactttagatattaacaggtgtattgaatgcattgaaggctgaataaaacctcttactgatattttttggttggcttttgaccttttcttttccacaaatgtaaatttgtaaaggcttggtcatgttcttgcaatcttacggtaacgctaagtttgcctaagctttttcttaggacattcagacagcttaactgcatacgacacactatttttttttgttgattgcaagatgttacaaataggactggtctgtcttagctggctgagatctactcagaacttttaagatatggaaaatgcttccccaaccagagagttcctggctatgcattgacttcatagattcattatgtcatgtaaaataggtggataaattttgaaattttggtgaattaactttggatttataaattgtgagaagatcctggagtgagctttagcaaggaatgaaagaaacactgtttagagagataaggtggcatgggatttaattacaggtccattggtttgtgcaagacggtagaaacgaagatccaagaactactatgttgcacaaaaggagagcgaaaagagtttaattaaggacaaacaaactttagatattaacaggtgtattgaatgcattgaaggctgaataaaacctcttattgatgtttttaggttggcttttgaccttttcttttccacaaatgtaaatttttaaaggcttggtcatgctcttgcaacctcatggtgacactaagtttgcctaagctttttattaggacatgcagatagctaaactgcataccactcactaattttttgttgattgcaagatgttataaataggattggtatattttagctggctgagttctactcagaacttctaagatgtggaaaatgactttttccttgaaatattattttggtagctggtctctttgagatatacaatgtcattatccatggcatgagaaaatttaataatgcaatagaagataataatagggattctaacttatttggctgcataaaaggaagtgatcttttgctttgattattgatatcaaagtttcaagtgaattaggatcatctccatttcgtgttatgctaccatgacctcatggttgttaatttcttttgcaggatctttataaaaacatcttgcata

SEQ ID NO: 7025 - DNA, 3065 bp, Populus trichocarpa
  Intron number 16 from transcript POPTR_0010s11130.1 (locus POPTR_0010s11130) derived from phytozome v7.0 (chr-ID sca ffold_10; pos 11474254 to 11477318 reverse strand)
tagaattgcacggcggcaactacacgactttattggtaaattgggtacatttctaatagacaagatttacttgatttaatactttttttataaaaaaaaattagttttctatttaaagttttccttgaatgcagtctgtggagcgtgttatattttctattaatatagttgtctgcaggattagaaactattaaccaatgtgcagttgcaatgcattgtaaatgtgttaagtgcctggttcttgtgtgccgctctttccagaagaaaattgaaccttacatggccattatatttgctataatttctttttctttctttttttttttggttgatttttcatgcatcacagtttacatcattttgtaatggctattgcacacaatctaacttttccagcaattttctttaatgagatgtcttatttcaatttcgaggaatcttatatttaagttgcatttaaagatactgcaaccatgcgtagtagccttgaccaaggctaagtatgatctagaaacttaatgtatcatggtgattcaatactttttgcatgaacagattgatgacaacatggaagatagatttctactgttagtttgtgtatatttcagttgggttggtccaggtatgacaacagagtttgagctggtccctgtagtggaagaattgtttaaatttgtcatgactgttcaattactcagtgcatgaacagactgattacaacttggaaagtagtggaagaatttgtttatcatcatctgatgtctgtggctaaatttttttttatttgatttagaacaaatctgattaggaagagagatatagagtgcttaattatagctgatagttatcagttacaaggtctgaaggtagaatggcatggagagggagataacaatcgcagatttttcttatcacagtctagtgtgagaatagcttggcagtgaatcttttggggggaaatgaaggaattctgatggggaatgaaggacaacagtgggaattagtatttgtttattcactattatttaggaatattagtatttattatttaatattcaaattaggattctagttttcttatggaattaagacttattaggttctcttattttgtttggtttggtgcgtataaataaataaataaaatactaattcccaatgttgtctttaattccccatcaatcactcatttaaattcacagaactacctccagtagacagaatcttagtccgtagctggacatacatggaatacagttaaaagccagtcagtatacaagtttgtaaaggtatgttgcagtgatacaagtctattttctatgttaatggtgaaattgttctaatccctgtacagttttttcccaaatacatcttactaagacagtcttagtgctgccatggcggaggtaatacttgtgaggttatgaaggttttcacatgctgtcacaagattgtttaaagtgccttacaatgttgatttgtggtctgcctggaatttgcaacttaaatatttgcgtaagagtttacatgtctgaagatgtattagatgcattttcatggagttgaagttagtcttatggctcattcattggcagattctgtttaagtcaaaattgagttctgcctggatcctttgctgattgttttatgaaatacttgccaaccttaaagcatgtcccagtttttcttaaaaaaaaaagaagctagaattaattggaaactgggattttcattggcaaatggtgtgtttcaaagaagaatttagaatacatttaagttaatcttgtagctctttcttaggtaaatgtacttggaaaatttctacattttactcctactttgctttctagttttcctgcagtcaatcatgcgcccaaaattcatagacttccattccacaaagtaaaaactgaagttgtagttcatgttgagattgttgcttattctaatggtagattttagaggtttcttctcatgtcatgcagttgtctcttttccaatgcaacctggattggagaggtttatttttgtggattctgactattggtttatctgcagtctaactctttgaaatcaagttcctttgggtaaaggaaacaactagtaatagtcaaaggaaatttaggatatttactataggaagataaataaaaatagattagaattaaaaattttggctccttaactggttttattttattgttctactactgctggtttctctgcagtcaactctttgaaatcaagttcctttgagctaaagaaaataattaggaacaatcaaaggaattttaggatatttaccctagggagaataataaaatagaaactagaatcgaagtttaacttctgctccttgactttggtttctattttattgttctattcctagttaggtgtagaaacctacttgttctgaatgaatagtcgttcctaatccagttggttttggtttggagtctcttgaagaaaaccctgttacccataccagtcaggttgctattgatcattagcttttgaacattgagtctcataattgctgccaaaacctctatggtccattctcctctcttctcgcattaactctctctgctcccttaatttttttttccatcttggtactgcactcagccatttccaggatgaattggaaagtcaactttataggagctctgacatgctctgcgatacctggatcatgataaatgataatcttggttttggaatgataaatagtaggtggtcatactcaaacataattcctgcatgattttgggttgggtagaagaatgttgttttgtacttctgttgttataatgtaattgggaagatattttcttttggaataaacatcttcgtacccctctaaaaatattttgaatgttaataacctgagttaaatgtatgctcagtggcttcttgtggagtgatacatttattttgttttgaaatggcatatttgttttctatgtatctatagtgtaaaattttgtgagaagattgacttttcccatttatttatatttttaggtggcagtgatattgcttctatagtcattaacgaa

SEQ ID NO: 7026 - DNA, 807 bp, Populus trichocarpa
  Intron number 4 from transcript POPTR_0008s05020.1 (locus POPTR_0008s05020) derived from phytozome v7.0 (chr-ID scaf fold_8; pos 2919297 to 2920103)
ctgaagctgctagcattgctgaacaggttccccccctttaaacttctattacacaatcgtgtgaagatgcatgtttctattagtcaccatggtgggcattgtaattgcttatatttttttattgtttctctgcaattgggcagaatcataatcctgaaaaattagaaataaggattatatatcatgtttctattactcaccatggtgggcattgtaattgcttatattttttattgtttctctgcaattgagcagaatcataatcctgaaaaattaggaataaggagttatatatccatggggatatgactggcaaatgaagatatgtgtttccggtgccgtactcttaatgctgttaatatattttgttgatgatttacttgagagagggttttattaaactgaagtgtacctctgcaaatgcttcttcgctttgtatttctattgttgtatatgttggctgtctgtacctttaatttagatttaattttttgatggaccatattgttgggaggggtagtcaaactattttgagaggctcttcaagcactaaacagattgtcagttatgcatgaatagaaagcatattcttgcctgtctgggctttgtagtgtcagcatgtgcccgtgcaatgtaggtgtaacccttttttagaccgttctttggattacagatagaaaattaaaatatcgcaagttctaaatttatttgtgataccactattgtggtgattcatcacatgctattgatactgaatactagtaattttataaactgtgcaggcagtctcttatagtaggaccttgt

SEQ ID NO: 7027 - DNA, 690 bp, Populus trichocarpa
  Intron number 4 from transcript POPTR_0005s15970.1 (locus POPTR_0005s15970) derived from phytozome v7.0 (chr-ID scaf fold_5; pos 12626984 to 12627673 reverse strand)
actatccgctatatcttgacctaccttccaatgtctctctctccccctctctctcacttacagatacacacaaatacacaaagatattgcatctccattatttttatatttaaagtagagatcattcctaatcctaagccatctagcttgttttgcagtaaggcgtacgtttgtttcattaaaatttatgaggatttgatgtggttggatgaacataaatgtatcttcattggtcattactcatcatggaacttgatcaggatattgttattctaaatatgactcttatggtattcccatattacaagattaattgaacgaaaaagattctcgatattgattggaaaagtagaattgtttatgaagttattagtgtttggtagattcaatttccatgtaagttgaaccttggggtttttgtgatgaaactccactgtgttagaattatccagaattagaggttctgcttgtggtaactggtactctgtctgtccccttccttttaataaactgaaaatatagtgcaagaataccacaacttgtctctgtcaccttcaagatgcataaattaataaattataatgtttcgacaacacttggactctgtgttttcaactttggaatacaaataaagctcattaacttattccttatttgtaatatctgctcttctaggtcggttcgttcttg

SEQ ID NO: 7028 - DNA, 954 bp, Populus trichocarpa
  Intron number 4 from transcript POPTR_0012s14600.1 (locus POPTR_0012s14600) derived from phytozome v7.0 (chr-ID scaf fold_12; pos 14430408 to 14431361 reverse strand)
ggaagtctcgtctcaaagctctaatctttattcaggtacattagcatattgatttggtaattttaatgagtttgatagtgttaatttatttaaagacaattgaattgatcatttttatttttatttttattttcttgcttattgtttgatgaataagtgcagaactgttaatctcattgagttattggcagggaaaggatttttttttttcctttgtgtatttgaatacaatgtactgcttgacttgacttgacctgatttattggtaaatttgatcgaaaagatattaagtatctcaaaaatcacacaagcttggtttagtggcaaagggatgagctggagttgagtggtggatgcatgtctaaggtttgaattctagcatttgctaaagatttgtgttagccacctaccgagtctttgaaccataattcactttctatgggttagtggggctttcatgggactggagtgtaccaatataaggagggggttctagtaaaaggaaagtcattgtagtaatctgttccacatggaaagtgagagttaaacttggtttatcatttaaggactccaagtttcagatgctagctgaagttgattctggttcgttaggttttgttcgaatatagttttagatttacttgagctgtccattcgataactttgtgatttttgaagttactgtattctgtagattagttgattttcatagatttcaaacctgttgttgtagcatcaatatttctagaccttctaggtattcatttaagatttttgtgctttacacttattagaattacaattgtagttctagaatcccttttttttttaattttttattaagcatttttatccttaatgaagttgattagattcacatgtaggatcatctgtttttcattgatgtgattttcttcgtaatgcagggtatctttcaattgatagaattattat

SEQ ID NO: 7029 - DNA, 1790 bp, Populus trichocarpa
  Intron number 1 from transcript POPTR_0007s07660.1 (locus POPTR_0007s07660) derived from phytozome v7.0 (chr-ID scaf fold_7; pos 6026724 to 6028513)
caggtttacaacaaattcccaacttttttttataaatatatttctgtggtttttgggacttttagtgggttttgtgaatggatttgtcataaaattgcataattatggtgcgtttgagaatccctcatttttttaagccctaatatttgtttttgttgtttgtgtttggtaaaatcatgttgtttttgtgttttcgggtgttattagtgggtttctcgcatatgtggtgggtttcccgcatgtgggtatttttctttgttttgtgatgtcccatgattttggatttatatttctagttgggtttggtttcaattaagctcaaatagtgaaatttagctgttgagtttatgggggaaaattaggaaaagtttggaaaattgatcaataaaaggtattactctggattttggttcattctgagtatgtgtaaagggagactttattttagcagtgtgcgactttctattattactcggaattttggttcattttgagtctgtgtaaagggagaccctgtttttagcagtgtatgctaactgtttgtgaatgcttgggtgcattttaatgagtgtttttttattttgatatgtaactttaagctaatttgactcatgagacgctgctgaattgctaatttgctgatttacatcttaataaaattggattcctacgtgtagtttagaaagaaaatgtctttataagtgtgtgaatgtttgcaatccttgatgtttgattaatgactctaatcttgtgaaccaccttaattatagaatgcttttggactattgaacaatatgttatttgaagattttcattttatttttagtattatcatttttttgtggtttttgttaaatttgtagtttctgtgaaggccattgaggttgtttgagacacattgaaaaaaaatgttttgaatttgaatgttatattgatggcaaaaactgggttcatagtagatcttgtgttttatctcgtgaaagtgtaactgggttcatagtagatcctgtgttttatcccgttaaagtgcaagtgggaattaaatttgttgatccttgttaaccttcagttggagaaagttagtaaaagcatttccagtcttattgccctccccttttaaactttgttcttgccttacatttgtttagcaacagtctacaattttgaactgtttacaaaaatctaattgtcgttggctcttccattcctttctacaatacccgagactaagtggagaatgcatgtcattgtatgccctctagattcttgtttgcaaattaccttgttggtttattattgtctcgactttttaaccttaattaaaaagagcttgcttcttgactggtgcttttggattggtttggttctgaacctctgttaaatgtacctttcccatttgactgtttttaggtgtttcatttgtgtggaagtgtgtaatgaatttagaatcaacagatacttgttgcagatgtcctagtgaatgtggtattgtgcaaagtgagaagttttgcctatgtggaatctcagttgttagaggttaccatgccccggttggtcattatgaatgattaaagatataccttttatgaaaggatctccccaacttttttataattctgtaggttgacaacacttgcttgtaactgcttccactatatatatatatatatatatagtgcttctggatgttgaaatttgatgatgttgagttagttaagttgttttctttattggggagatagcatttccagttattgcctcattaaacattttcatctcttctttttcag

SEQ ID NO: 7030 - DNA, 2014 bp, Populus trichocarpa
  Intron number 4 from transcript POPTR_0006s29570.1 (locus POPTR_0006s29570) derived from phytozome v7.0 (chr-ID scaf fold_6; pos 26890142 to 26892155)
agacaaattactatacgacacagcagctaattcaggtaacaataataaattgttgctgtatttgtattgttatgttctccttggggtttaccttgggatgttcttaaacctttgggaagatggggatatgggcaatcttccaccttttgtgcttcttcaattgaaaaacaactggaaagtctgtcaaatttctccttcacggaaaatgagagttagatctttttattgagtaatgcttggttcactaacacaatttctaatgctattttactagcctaggtggtagtctctgcattgtctaggattaaaacgttcatcacatcagtttccattgcagcttttaattatataaaaatttcatgattagctgggatttggaaaattaaggatttattggaataaaggtggattcagtccttgttttagaagctgaggttgtcgtcgtaccaatgaattgcaactttaggcgctctagcaagaatggaattgtagaaaggaaaaggaagaaaatatcgaaaagagagttaaatatttgacgtttgtttgcagtccttagtctcaattatcagaatcataaggattacatggaataggcactccttttgtagtcgcaaaaaacctttgtagttctaaaccactcaggaaatagaaatagaaaatcatgaataagtgaaactactaatattctagtatcctaaataaacttgattctcatgtatttaatctagaactctggctagcattacaagaaaagcttgttgtttttcttttatatttttttagaattaagaaatgtaatgtgaaggaataattcttaaatttctctctctgggcacatcaaagtggagattgaaatcttaagaacctctattagtaaaatcaccaaatttcatttgcttgacattccaatttcaacaatctgctttctttttctgagagaacaaacaaatgacacattaatattcattcattgcatgcttacttgcctgcatcaataaagctatagggataatgaggaaatgcgaaggaagattaattagctagattctggctggatataataagaattgcttagtcatgctgtaacaacgagactctcttatgtattaatccccaaaagtccgtaggtgttacgtcccaaacacagtactaagatagttactctcagcaaaatcacaaaggtcgcaacacctatggtcattgttctgaatgtaggaaaaaaaacataacaacaacggcagcaatagttctaaatttctaatattgtgtgctgcttgagggtcgagagttccaggatcaaaccataggtcactaattatttttagatgatggagcaacaattgctttgtttgctatataagttaataaatattgtttctaagttttctgggatcccttgcatcgtgtttctgagtaattgcaatgcagataaggagcgtatctcgaagaagcaaatgagtgaaacaaaactgttctaaaagaacttgaattgaattgtcagaggagacaagggttgatgttttgacaactcaggatgcttgtactagcacaatcctgctttccttaggtgttacattgaccagactttcgctgcttaatcccttctccagtgcctccatatctaatttgttgaactgctttattatgataccatttaatagtgatggactcctgcccatgtgagaacagaccattttggctacttgggattttggttttatcctaaagtgtctcgcatggttgggtcctaattgctctgtatatataactcagtgagtctctaactctcctatgctttccaacctggatactagattgtctgttgccttgggggtgttgctggagttttgggggctggaaatgttatactttagaaggcattttattaacaagctttataaacaacatcttgaataacgtacaacattattttgggtatctgcaaattgatagctggtatggaccttttcttttccctaattacattggtgcaaacccttttgtatgcagagat

SEQ ID NO: 7031 - DNA, 1916 bp, Populus trichocarpa
  Intron number 1 from transcript POPTR_0005s26610.1 (locus POPTR_0005s26610) derived from phytozome v7.0 (chr-ID scaf fold_5; pos 24552050 to 24553965)
gaactcaggttcactctctgatctctatctctttctttatacatctatgatctaaaatcttaagttgtttaattaaatttataaagattcatgcagcaaactgtggttcattcttcacatgctcatggttttccaagcaaatatttctgtcaactttttctctttctttgtttttatttttttgggccatataattttaaacatttctcttcttaagtttatctgatgatccgagttcttaattttgagcatagaaaaaatccgggaagggaaacttaagtgcctggattatctggtatctgcagatcgagtttatctagtcatttcgggttgtgaaaacaatattttatcaattaaaaaacgaaaaataaatcccctttgagctaatatatattttatttggaaggaaaaaggaactttctgcaaccattattttgattgattttctattcatgatcttaaaaaatagatatccatttctttctcgttgaaacccaagatcaattactaattttttaatgaaattaaattaaagaatttattgatcagaaagaaacagattaagatcgagtcaacgtcccctacaaaattaaaatgtaaattaacaaaccaaatcataattatttagatcgacgaatgatattttacatgtcttctcaaatccttctgtccaaataaataaataaataaattcaaagtagtttctgtgatggattgaatttttttttccttttcgcgtgctattacgtggtttagacgagtctgtgtaaccttcacaaattatttaaattatagtagctaagacttaagagcatgaatgacgtaactgcagctagagtttcaaatagcaatcagcaaaatagtaatatcatctgagtttgtttctttaataaaattattttatctcactgaatctttttttttttgtttctttgctgggtctcatgtatatgtttaaactttaatggtttggatcccacctcgtcaccaaactaattaagtctatggccgcatgtttattatgaattaacacggtactctattttactttgtggaaggaagctaaggtaaattctatttgattttcttccattccaaacaagaaaaaggaggagtaaaatgcaaataaacatcagtgaataattactcattcttgatcaccataaaattttgactctccagtctatgaacttatcctttctagtgtatggtagggcgcggggaacgaagcatactgagcagttatcggaaaaattatcattatctctggtgcggtttagggtggcctacttacaataaatatactttacggaaccctaaattgacatgtagtgaaacaacaaggagatggctagataaaatagtagaattattaaacactaaaccttgcagctcattggattaactaattaattaaccatgtattaccgtaagtgtaattaaaattcttgattctctattattcttatcttgtcggcaatccaacgacgttaaggcggtcgataatgttcttgtttttgttgtttttgtggggcgggggaagagggtatcattttctgggacagggctgtgtttattcacaagccaaacatgaagttgggcttccacacaatggttgtccgtaaacaaccaagctgattggacatgtgtcagtttcacaacgtaatgatcccttcttccttgcattaaagcaataggtgcagcaacgtggctcaacttattggagaatggattctttgttatcattgcgtattggatgattttctcatcattttcttggaataaaatggatgcctctcatcattttcttggcccagctataacacaagctgcattaaattgctagctaactcagtcttagaatatctggcttctttttaggtgaaagtttctgatcttgaaggcaaggtgcttgg

SEQ ID NO: 7032 - DNA, 684 bp, Populus trichocarpa
  Intron number 9 from transcript POPTR_0005s04170.1 (locus POPTR_0005s04170) derived from phytozome v7.0 (chr-ID scaf fold_5; pos 2794685 to 2795368 reverse strand)
ttaaagccagtaagttgtctcttgcatattattcacagcttgacttgtgctatgtttgatgcatacataagagatgacatgaaacgattcttttcttttcaaaatctacatttctgtctcactttcgcctatgagacatcctagtcttgttaatttagtctaatttaatctcatttgctcattgttaagtgcctcaatttagtatttctgatatagaaaatgaactatgaagatggctaagtgatgaatttgcttggttttgcctagatttttcaactatcattggtactacaacggcaggcattatgcaggtattttcctggtctttttttcttaaattttatgtggggagcaagtttaatggctttgtgtgcgtagatcttagaatgtagatgatttttttgcagatcccagcgtctattgcaggtgtactcttgttggatatatctggaagaagaagacttcttttggttagaaattcagattataatgatttcgttttaaaaagtttgaagttttaaaaagtttgaaatgatcatatcatttgtaatgaaagtgtacgaatatttgcaggtttctgccattggaacgtgtttaagtttagtcctcgttgggttgtcattcctcttgcaggtttaatcaaatttagatttgtgtttctaccatactgttgcaaatacatct

SEQ ID NO: 7033 - DNA, 1767 bp, Populus trichocarpa
  Intron number 1 from transcript POPTR_0001s03890.1 (locus POPTR_0001s03890) derived from phytozome v7.0 (chr-ID scaf fold_1; pos 3123840 to 3125606 reverse strand)
cttgacaccaaggttttctttttcccatctgggcttttcatttcttctaccttattacttgtttcttgtctgattctgctgttttctatttattttcgaaactggtttttatttttctgatcttgtgattattttcatttctgatccctttttttttgggagtctgtgtttaattgtttgtttgattctgtgcgaaaaggttgtgtatgtctgtttcttccttgttatatctctccttttgtacccttgcaccatcattcatatcctttcctttcttgtaattttgggtgccaaagtttggagcttttggtccatttggatttggattttgtctttttctattctcaaatctgttttggtgtttttggttttcccgaatttgagttaagagaacattttgacctgtttatttcagtactgaaccgaaaacatgaaagaaatatcacacctgattttactgtgtgttgatatctcttagttttgctccaataaagctctctttatacatagaatagggtgtgactatatatttctgacccattcttacacctttggctcaatagaaaactatggaagatagatgctttttattttgatcacagaaatgaacaaactaaattacgccaattgggtcttaactcagtatacttcctgcgctacagctttcaagtacggactgaaaaatgactgaatcatgtctgtagcagcctttttcatcagttactttatctttttttggctatggtgtttctctaaagtttgcggggcttgttcatgtgctaattaaatggtggagatcatttcatatttttctcaacaatatttgtagcgaagggatattattctgtcaatcattttctctctcggatcttaaaagagtgtgccatattttagtagcaagcagattgtgcttcctctgtcaacgctagggtaaaaattggttcaagattcatataatcaaccccaactagtttgggacaagggctttgttgttgttgttttgcgaaaaacttcttttaactatggaagttgttattccattctagtcaacgcctgactatcaaaaataacccatggcatatgactgataatacttggtttttttggggttatatcctctatgaagctgctaattatgcatcactaatcaatttcttgtttgtgatacgcaatataaagtggaacttcataatgcaactgtttttggcaactttgttcatcctaaattataagtggaggttaggctcttactagtaattgtctttagtagtacaccagtgaaaatcaaatagaatgaagctaaatagagcatgaagcatcatccataaagagcaaatgttcttttgcatgtaatcagccattctaaactcgttttcattattcaaactcttcacatctaagaaagaaattgggggcaggggccagacagaatgctgttattaaagatagaatacaggtttagtgaaaatgcatccaaatcctaaatgaaccagtgtggacatattgcactaatggttttatatttttctcaaagatagtcgaaaactttgattttattttatcagtaacactttgtgctaacttacttatttattcatttgtatgttcacctcgtgctaactaaagctgcttatcatttagccatttgtagggtcaagttttagttccaagtcaggctctttgtttaaaattaataggtttaaaaacagcacttattttgttcattttgttcacagggaccggagattcgtactggtttcctgaagg

SEQ ID NO: 7034 - DNA, 1740 bp, Populus trichocarpa
  Intron number 1 from transcript POPTR_0006s03670.1 (locus POPTR_0006s03670) derived from phytozome v7.0 (chr-ID scaf fold_6; pos 2441558 to 2443297)
acaaggtttgttgttgtttatttgaatattccattttgacaattgagattgatgtgttacattatctttgaactcatgtctacttatgatgttttgggtttgattaatcattggataataatttctgcaaattatgtagctctatgtggaaagtgttagtatgggattatgaaatagtatgtgttgataaaaaagaaggctgctaatacttaattgtgatagtctcttgctgatattatgtaagatgtttgtgtgtaggatgctgtaatactgtgttgttgtaattacgtgtcttgctgatatttttgtatttctgtgtgatactccgtcaatcttgaatatatgggaaatgcgatgtccccgcctgttgactacgccaacaggagaattcaaaacaagaaaccaaaataatcctgatttggtttcaggggtgatttcaagttttgataatgctttaagccaattagataggagtaactactctatctacactgcgacgatcttgtccatttacttgtgttaaatagaaatcaaatgttaagagtgttatagatatgtcatcaatttgaaatttggcaagcatgaagtgaacacgttctaaatacattaaaaccaagtcctgggaagggagatgctatactgtaatggctggtggaacaaatgttaaagcacctgggaagagtgttatggctggtggaacaaatggtgcacataggtaatttccaaaggaagtagaatagatttgcaatgaaaattcttggggaccaagaaatttacttggggagggggtgtcaagaaattggctggcaggtgcttttagttccatataaatagggtgtacattatattatcaaacgtttgcagagggtttgtgagtatcaaagcatttacttcaggcatttattcttaatactttaacatgtttctttcagtgggtttttgatgagtgaggtgtttaggaaattgaaggattttgtagcctatatgtttcttgtcttaatggtagagaatagacactaatgtagttgagaggtttggctccaaaaactttgtatttaatatcaacggttaggaatgatagcaaactcaagttctagaaatatttacatcgccttttgttctttcattaaaaaaaagagagagagaaagaaagaaagagagaaaaagttaggagcagatgcaagcaagacaaaacagagaaattaagaagtcatgaaggtctgtaggttaagggggaaaggaagatattataagtggaatgggtagttcacataaaagacattatactttaatgactaggatgttatttacataggtgtcatgatgaattgtgtgaatatgattttatttttcaactctctcttgctactcgcttataaacatttctttttcaccaaaatcagcacattgaattttattcttacgcttgatcataaaacaaaaaaaattatgtgaatagctaaaattcttaattcttaaaagagcaatgaatttatttctttgaaagaaaaatgtagctttcaaaccccacagcatgtcagagtatcatacgttttgaaactaaatacaactgttggcagagcataaattcaactaacagtacaagttaccgagaattacaagttcttgtatgtatgcacgcatgctatctcacaaaaaaaggccaagtagttcaggcttctatgcctgtctggttgagcttagaataagtgattgacctttgtgccatataactgcaga

SEQ ID NO: 7035 - DNA, 530 bp, Populus trichocarpa
  Intron number 8 from transcript POPTR_0007s14950.2 (locus POPTR_0007s14950) derived from phytozome v7.0 (chr-ID scaf fold_7; pos 14625592 to 14626121)
acaaagagtgagtaaactcatcctttcacactcctatctccaaaagataaattgtgaagcagactgatttttttcttcttgttgactaactttacagtaaaaaatttcagtttcttactttaagaaagctgtacttcaattttgttgccaaaattccttgcatttatccggaactgaggcctgaaaatatacagaatacaaaggaaaatacggatgtatggaaacaaatatcttaatgatctttatctactgtgcaatacaaatcctgaaaataataaattccagcctgaaattagtagaaatgatttcgaagcatgtacacacacataccaatacagacatgcatacattcatcaatttgtttgcttatactaaagcataatatgcatttatcatcattcattcgaatctacgacaaaacaatgcagctgtcgagtaaattcaactgaatatttattctctctgtacattttttgattgagaaatctctatgaacatctcaacaaatatctctctcatacaaaatgcag

SEQ ID NO: 7036 - DNA, 1175 bp, Populus trichocarpa
  Intron number 2 from transcript POPTR_0001s35140.1 (locus POPTR_0001s35140) derived from phytozome v7.0 (chr-ID scaf fold_1; pos 33398145 to 33399319 reverse strand)
gcataaccatttgaggccagacatcaaggtttctccgcccttttcatccattttctcctctctcatctcttggtagttatagatataaatatattaccttccttatacatggccaattaatagcaatataactacatttatgcacctactaaattcacatagtatataaatactcttcttatagataaaacgctgaatttaccttcgattttatagaattatcgagaaaaaagctgttatatttataaaatacaatctctccatcttgctttaaggtccttgttgatatagcatacaatttcaaatttggttcgctattaaagttgtgacaacgcattgacatgcatagtaactgagtgtcatgagttgtcaacacataataactcgtcgaagcaaatcttacatcaacgataatgagtaatgctactgttacttttttatttatttaaaaaggttgaaattaccttccatttttggagaaataatgagaaaaaaggtggtatatttatgaaagacaattctaacgttaattttattttaagtgtcttgccaccaacatcccacgagaataaatcataaaatctcatatgtggtctcctaaggaagtagtgacaacgcatcgacatgcatgatgactgagcgtcaagctggattagaacttactgaaacaaatcttatctggaggataacgagtgatgctcttgccaccctttaaaataaacatatatatatatatatgttaaaaccatcttaaattctagataattacataaaaaataggtggtatattaatagagaaatgatgcgtgatatagcttctgttttagtcttcaaaaaatagaacatatcggttaagaaaattgttatgaaatctcaactttagatgactaccatcacatgcatggttaattagcttctctacttgctttgatttctccatttgaatatatgtttgtagctataaccctagcttggttctatggtatttgatcgattacatgtatgtggccatgcttgtgcttgaatgaagctctctatgattttaattgctatcaggacagaaaggcataaacattccttccaatacttgacattgcgttgttttccttctaagcaccacagtatgcataatagtaatgtcatatcaatatataattcatccaacatgcagaaag

SEQ ID NO: 7037 - DNA, 4810 bp, Populus trichocarpa
  Intron number 14 from transcript POPTR_0008s14030.1 (locus POPTR_0008s14030) derived from phytozome v7.0 (chr-ID sca ffold_8; pos 9256393 to 9261202)
gataagttatcagctaccaaggtgaggtttacattaatgtctataaaagaaacttcaatttgaatccgatattctgaaatcagtgatgtttgtgattttgatctatatacaacattgatatacctatctcatggaggacgaagcaataattctaggattattgcctcaattattaagtattttttttttatcaattattaggaatctttgtgaatgtcatattaaagtcatcataggcaattcaaattatttcctattagttggagcaaaattcattttttcaatttaaaaatttctattccttttttgtttgggtatttggtttctatgtaagagcacctattgttatgcttgaggaaaatttattttgattattgatagttgattagagagaatggagactgaagtcatcccaattgttcttctagctttccatttcctttattttcttccttctacaattctctttgcttctatttaaggaccacattgaataaataaatgccaatatataaagtttaggtaaagtgagatggcagaaataggaactccaatctgattggtttcaaaattctgcgaacatgtaaaaagtagcaaaattgtgttgatttgcttcctatacctaattacagaccaataacacaaaaatactcaagcagctttttatacccttttcttggaaaggaaacgaaatggctgctgtcaaatcaaaagcttgcatttgagaggaaaatgctgcaaatcatgtgtttctacaacttgttgattgtccttatcaaggattctacctttggaaatacgcataaaaaaagctacttcatctaccaagtcttggatttgggcaaaaaagacatggtcttcagatttagatgccccagacgacttgttttgagctcgtgcatcaatcttccttgattgacgaggacttgccctcaagtccaaatcttcgcaatcctcatgatatgaagagatattagcaacactggaggtggtgaaactccacaacaagaagtttcttctaaaatgttgcaaccaatagcttgtccattcttgttttttaatttcatccattatttgccaattttgtttttatctcatccatagttgattctattgatgtaaccttgactttgaagaattgaaattcttctggaaccatttcaaactgagcaaagttcaagatgatgactaggaatatggtatatgctagaaacaaagttcaagaggggagggaaggaatcacttagttctgatgacaatttaatgtaggaaactttggatttgccccattaaagatttgtggtaaatcgagtgtttagagtatataggtttgaaataaggttgtaaagagctccaaagacgaggctttattttgagaattggagtcttattctttaatttattatttctatttattaagttgctatcctaatcaaattaggattagttatgataagtctagtttgttattcttatttagtcctagtccaattaggagttttatcttttgatataggatatagctgtggttttgtgtcccacaaaggatttaggtttaaataattaggatttgagtctggaattagggttagtgtttgatgtgtgtggaattgcaattgattaaggatttgttttatgagtatttgggatttttattttaggtgtgaatgttgtctcagtgggggaagaggtgaattggactgaaattaaaatttcaaacctgtaaaacaaaaaacttttgaacaaaatataagtgtaaagatatagatgcaactgggatacccgtagtcacataaacagttcaaacagacagacaaagagaggttaactagcataccagtagatagcatgagtggtaacttaataaaaattaggctcaacaatatgtcaaacttgcttgaaagacaattagaagattacatgaataaacaaacaaagcagcacaaaaataaatagagtcaagggtagagaagatgaaacacgagaatttatatttatagtggttctgctaaaactttcaagtacattcacttcccaagggtcctccttgagaattgctggtacattcacttcccaagggtcctccttgagaattgctggtacattcacttcccaagggtcctccttgagaattgctggattgtagtcagaaattcctcagtcacaacttaatcttgcagacttctatccctagcatatctaatgtaatcacaatcatgtaagatatctacacctttctttctcactactagaaagggacagtaaaattgatgtttgctcaatcgaaagcacaaggttttaagttgatctttctaaagaatctgctctatttgcttcgaatttctctgtttatgtacagccattttttatttgaattttgtagaagatataggcttccaaaaatatgatcattgatgttcttgaatgatataaatcttgatgattttgtttagtatttaatatggttccaacaaaaaagtagaccgtgaatgtagcaatttatttcttcagaatcctttctcacaacagtaaaaagaacttggaacgtctccccccccccaagtctgacttctggtttccatgaatcttctgcttgagataatctttccaaacatggagtaaatattttctagaacagttagtgcttgtaattattcaagagaaatctccagctttgaataaattccaaccatagaaaaacaaacacatatagcttgcgtgatatagatgaaaagagtagaaattcttcccttatcctgataagatcaaataaatcaggcaagctatccacaaaagccaagaatgccatgtataagctcaatactcaccgttccattgtcaattttttacatagtataggcgatgtaggcaccaaaagatccttgtagttctaacctaagtaggaaatagaacatcaaataagaaaagaaaaattttaagtatttgaaaactcctaattaacatttgaacgaatatactaagattcctagatggtaatatctctaagtaagatgaattccttaatgaaataggctttcaagaaataccaaaaaaaaaaatcaaattaaaatattttatcaatattttctattttggttgcatcatctctataaatggagatgtgttctcttatttttgctgtagttgagctatggaataaaagttttagagttattttgaatccttggtgcctagaggtttcctccttctcttattcttcttcttgtttttctcttcttttttcttgtttaaaagcgctgctactacagcaccccaaaaaatcctagctgccacaagtttttggtgggacacaagtcaaaacttgcccttcatcaataccactcccatgttaaaacctttagtactagacaaataccttgttaaattctactgatatgcttgttattcctgggatttaacctggtttaaggtcactagattggaactgatttcctcatgtccaactttgttgcccctagaccagatctaaactgttccattgccatcataaattttgttaacaccagttccctgaccactttccagcgactttttacttttattctctgccaataccttgttgcccttgaaggtcagcaaggaattcaacctttctggcctatgttaccactctacttgaatgaaccagcttaatggctgggttgagtcttcttatgggccttagcgaaaagcagataagatctatgttagaaactgtggagacaataaagtaaggttgaagaaatgcttcaataaagttcagaaagctgtcgggcaaatagaagtctcataaatttatcacgatgattgtgaagaaaagcagccagtaacaacaccacaattgcagaaacagctaactctcttgaaaatgaagaacagactgttgagaaatgctctcttggaaaggctgcagaaagtctggagatgattaacctaattttatgactaaaatgaagaacagatcaaggccagcacagcatagaagtcaaattaagactaaaattgaggctggatttttccgaatctctaattctatgattcataattaatctgagttttgaaatgcaaggatgattaacctcttcaataaagaagtatatcaagtccatgctttgagtttaacacccataagccatcacaagtggttttactactttgagatttttaaacttgaggatgaattttttccttttcctgatcaggggataagataaagaagcaagccttctaggattgttattagattgtttaattttatatattattcagagttttagttattatggatttcataatttcataattttctggtgttccgtgtatttccttttaaggcagtcttgattgggagttcaaattttttgtccatcacctaggaatttagcttcttattttgttagtattttaccagggcatttctgtatgtaaatgagtacctattattatgtttgggacaacttgacttgatgtttgatgaacagagtttataattcttcttctggctgcattattttttttcttattttcccctcttttctcttcacttccctccatttctattcccttcctgaatcactatttatatttttcttttacagcatttgtgttgagaattatgcaagtcatggatgcatccagtattgctgaaaaaaaccaagtagacactcttatgttttgatgaaaaaataacttgatctgtaaattagtgaaaatactacccaatctatcttgtttttgtacaagtttactttttcttgtcatttgtgacgtatctatcttctgcagaagcgtatattgaacttcacaaagt

SEQ ID NO: 7038 - DNA, 1598 bp, Populus trichocarpa
  Intron number 1 from transcript POPTR_0002s08580.1 (locus POPTR_0002s08580) derived from phytozome v7.0 (chr-ID scaf fold_2; pos 6000735 to 6002332 reverse strand)
aacatcccgaacaccccgtcactgttactgttcgggtacgtatacgctgttagatttcgtaattctattattttgattaggttttgctcggtattgattaattggtagtcatcttatcagctttgattattcttttttttttatgttgctttttgagctttatatctccatctcagatgtagtggttggatgtctaggattgaattttatgatctccttttgatgtttgtaatagcaagatttttttttttagattttttaatgcacagcctggattagataaatgtccaaatgaacaactttattatgtctagatttattgaatttccattggaacgcctatttaatgctatattaacatcacgttgatttttatagaagtaatttgtttttgtagtgaaagaaattctgtaatatttttctgctaattattttctagttaagttggttctagtgcttcgatcttcttcttgtttaaaaacattgcttcgattgttaaattaattccacaacaccaagtttacattatagcaatgatcaacggcaaatggttaagtttgtagatagtaatttattgctgaagacaatctctttgtcacatgagaatcttgccagggatttaaataataaaaaaaagggaattaatgggatggcaaaacagtgcaggcttttatgaagtatgatgacgagggaacctgttttagcatttcatctctttcgtctctttacattcgtgttcttgcatttagttgtgtttggctctttatgggctttctatgaagtggttacggcaaaacttcttttgtagctaagcatgatgattctaaggggtttttgcatccattaggtagaataaatcctgacatgagagtgtttggggtttgtgttaagggagtgagattttttattctcccttttttttctcgaaaaccatatgattgatatttgcggtcctgctaaagctaagattacttttgagacatgattcctgtaatttttctttgaaaacaatttgtgggctgcggcataattttatcagtgtaaatattgggttatgtctgaagattattcaagtatcatatcttcaggaaatatccctttctcacaagtggccaattaaatcaaatcattttctattttggattttttagtttccagggcatgtcaaagtggtatgatctactatggaaataaatggtgtttgatccttatgtcataatcagtctgaccaacaaaaggcaggatgacaatgttttcttggatagctgtttatatgatctttttttctttgccaattatttttaggtcagatattcagctattttaagcctgaccttcttcctcccacgtaaagaacacaaatgtgcaaacagttgtaatttcactactaagaaaacagaactaaatggaaaacaactatgatgtatcctgaatcttgtttttatggttggcatgtcaataacactaatttctcccttcattcaatcatgtacaagattctatcttaagcaacaagtatgtgccgatgaatagttgggagatgaattgttttctttgctcaacttttaattgtctattttgttaggtaacatccccat

SEQ ID NO: 7039 - DNA, 1522 bp, Populus trichocarpa
  Intron number 16 from transcript POPTR_0018s03930.1 (locus POPTR_0018s03930) derived from phytozome v7.0 (chr-ID sca ffold_18; pos 3366517 to 3368038)
tgtcgtttggctggctttgtggtggaataattgaggtacaatcccatgctcaagtgtttgaacatgaaagaaccacgaagctggtgtctgtatttgtttttgaatttctttatgatttgtttttgttaaaagctgactgagaagttgatggcactcctctcgtgagaagggaaaatcaggcaaagcttccttactattattttgaggagctacatgatttgctttcgatcttgtttgtccacctgcagtagcggtctttcttcttcggcaatagtcataggtatgtccttttccattgcaatatgtgcatttgagatgagctctgcagttctttgtgttgtgattattcatgttgcatttttcacaaaatttagcttctcttctgtagagttaaaatcacgggtcatcttctttactgcaaaagcagatgcttctggtggtgtcgtcgactttccagtaaaagcctctgcctgcttttcatgacgcaaaaccattgcataggctttgttcaggtttggaaggggatccatgcctattatattgcttcgagtctgtgcatagctttcattaagccccatcaggaacttcatggtcttttgtgtctccatgaaaaccttaatcgcggtagctgcctcacaattgcaaggggggaacgcacagagggcatccttctcatcccacaggcttttgagttttgtgaaaaaggacgtgactgagtttgtactttgctcacaatcatgaatgacattttctatatagaacaatgaaacagtgttagtttgagaaaatctctctttcagttccagccaaatacctcttgcgtccttgcaatggatgacactgcctgagatatctttcgatattgctcccagcagccaggttttcacaagaatgtcacagcggtcccattgttgttgctcatcaggattataagtcggtctcttgagagttccatctacaaatcccttcttgtttttgatagtaagtgccatgctcattgactgtacccatgttgtgtaattgtcttccatcagtgattgtgaaacgaggacagcgcctggttgatctgagtgatggagaaaaagtggatgattggagttctcccatggttctgaggtcttgaaagagtttgagctcttgttctgttcaagaagcttttggtcttcgtcaccagccatgaggtatttgtttgtgtggattcctggattgtatggatttctagtttttcagaaccaatgctctgataccataaagagaatgataatattgtattctgtatattgaatagtgcaaagaagcacgacatatatatacaaagtttacatacaatcagatccactattctaggagatattctaggagctattataggattaacattggtgaatcgtaatcccattgattacagtatatcacctaattatgtgggattctttccttcaatagaatgtctgatctgcatctgttttcggagggagcttgatttgtcctgcattttaataatgtgctttaatgaaacagc

SEQ ID NO: 7040 - DNA, 4695 bp, Populus trichocarpa
  Intron number 9 from transcript POPTR_0015s05090.1 (locus POPTR_0015s05090) derived from phytozome v7.0 (chr-ID scaf fold_15; pos 5406643 to 5411337 reverse strand)
agacatcgacgcttgccggtagaactaagaaggtgtgctattaattttaacttctcatctctctctatatatatctgttttttttttatatatatatttttatctttttttgtaatcctttctccgtcgctccatcacacaaacacacttctatcatatattattgacttgaaggattagtgttgaaatttaatgtaattcaatacaatttcaaagctatactgcaagtgagttagtagctcaactagcaatagtcaagtagtaaggagttaactaggagaagatgacatccctggtctgaatactatcactttcattttctaacccacatataagtatgcagttgactaggaaccttgagttgatgagctgtttttcatggtttgactcttagatttggtcatccacttgtgggttgcaaggttgtactgttcaaagtgcacaatgactgaaacttgttagcaatatcatcaattatcagaaagtacaaatattaaactattgaaaagatattggtaaatccttgtctagtccattcaagaccttaatccattcactttgaagaaaagatcacataatttttttttgttagaccagagatccttttttttatgtgaaaacaaaattcatgtgttatgttttttgaaggcttattttctcatcaaaagaagatgtgttttataactgatggaaattatacaaccttttcactccacaacctttcaggaaaaataactaatgtgaggaatagaatttatttatacaaaaaaaagctaaagctaaagggattttcactgtgcacatatacacatttcactattcattacaatagtgtaaatttcttttttaaagcacaataagatgactacattgcccttgaagacaatttttgaagctagcatataagggtttttttgtcttcttactttttaaaatatagtaaaatgataactttactcttagaagcaaaaattttaaagtttgcattcatgggttttttagtctttttcctttttctttttttttattattatcaagtagagtaatggcaatttgaccttttagtaaacattaaatattatttaaataaaaaaaagttattggtgcataagagcttcccgtacaattcgagtgatgcgtgcaacgtttctcgatagtaaaaaatatcatttcatcgtgtcgttggaatcactaccatgtcctttttctttttagccagcgcgtgtttatggtggtagggtggtttattgttagcggagcattttttattttttttcttcttttctctcatcctttgaaaaatttcgtagttgtccttttcgttattaatatttcaacttacatccttattttttttatttttaatttttgttcttgatctttatgtaaaagatttatttatttttaattttatccttcaatttcaatttatgaaatattactttttctttttttccaatttggtcattattcttttgatttctattttttttcttgacctttttgtacaatttttattggtttttaatttcattcttcaattcgaatttattgtatattattttttttcaatttggtcttcattcttttgattttccttgtccttttgtcataattatttttctttttaatttcacccttcaataaaaaaaatttagttgccctctaatttgttttttatttcgatttttatcctgatttttttatttgttattgtttgtttaggatccttttctatgattgatttgtttttctgatttaacacttcaacgtttgatttgttgtggattaagcttcatggttttttttatgtatgatgctttcggtctaataaatcaggttataagtttaaaaagttaacacgagttgacatatttttttttgttttttttactttttttctttttctatttcatcgttcgacattagtttatatatatataaagatgactttatggtttttttattttatttttttctattgggatctcggtctaagacttgagccgtggatttggtagattgacccgggttgactcacattttattatctaagttacatctttatcatgctaatttagattgattcaggttgatttttttttaatctaatttcatcattccatatttaattggattaaaactgaactatatcatttgtctcctattggaaaaaaggttttttcctaggttatcatgatcgcttttttctttgtctgtttgttgttattgtctattttttatctaattaaaataaaaccagattatttgaccagtcaatattataaccggagtagtagatttttcttctttctttaaaatacgcttacaacacctaaacatgtttttatgaaaaaaaagataataaggccctgcagcgttgtgcgagcccacatctagtttattatctaaatatgaaatgaataataggccacaaaaataacattttcatttaaaattaaaatgtaactaacattcttcaacttggctcatttaccatttaatatgtcttgattcaaagttggtatatccttaaaattcttcccatggatacaatgtcctttgtacccaagcaaaagagtttaaattgaatgaatcgtaacggtaagtcccttggagcaggtgttaccttccatgtattacaatgtaactcttttttgaatgaaaaccatatgttgtacatatctttatgattgaactttcaaatattcatttagagtcacaaataaaattcaaatatgcattgttattctctaaactgcatgcgtataaccaaataagagaagacaaatataaaattaatgtagatttttaaatcgataaaatgcgatacaaacacaaagtatctcaatcgtataaagactacatgatagaactaagtctcgtatgcccaacatgccccgtataagaaataagtgataaacctttttgtcaatagattagcaatcatcaatctagtattaatgtgttcaacaatcactttgtttgctttgacatgtttttgaatagctagatacttaatgtcgatgtgctcactatgacttccgcttttattattcttggccagaaacactgcaacagaactatgcaataaatcttcagtggcttgggaattgtttcaacaactttaagcctcaaaataaaacttctaaaccatatagcttgtgatgtcatttcaaagcatgatacaaactttgccttagtgatagaagtagcaaccaaagattattttgcacttctccaagaaatggcccctccaactaataagaagacattcttgagtcaaggtagccaacaaagtcaaaatttgaatatccaatcacttctagatgaatcacttatatataagcttgtagtccttagtaccttgaaggtatcacatgatttattttttttagctatcttatgatccaaacttgggttacttttgatgtctgcccaacattctaactacatatgcaatgttaggtcttatacaaacctaacatacattaaacttccaattgcgaaagcatatggaatgtactttatttgttccctctccatatcatttcttggatttgattcaatctgaacttgtcacctttacaatagccttattaagatttctctctaaaactttcatatgaaatttctctaaaattttattgatataggcttattgagacactcctaatgtccatcgggatttgtctctctcaagctttatgtctatgatataagaagtttttcctttattttttcatatcaaattgcatcaagagaaattgcttaatctcataagtaaactcaaatcacttgaagcaagtagaatatcatctacatataggactaagaaaattattttactcccactaaccttatggtaaatacattgatccatgatattctttgtataatcaaataaaaaaataacattatggaattttaaataccattgaggggaggcttgtttagcccatatatagatttcttactagaacattggaggaatcaaaatttgtaacgcataaagtttgaacaattgcaaataaacaacaagcttacaaaatatgcaatgaagctaaacatggagtatccacccatgcaaattaatccaaacaaataaatcaacatgtcattataatctttcatgtgggcttacattataacacaagtgatttatattactttatgatggaactgtcattttatctctaaaagaatttttctaagcctgtaggaaactgggttatatatatataaaaaccaaaaacactgttgaaaaacaatatgcattacaatactaaatacgtagttaatagatagcttagataaattatgcacaggacaattaaaactaaaacgtaagcatcaaaactctatcattcaactcctttgtatagtgtcgccaaactcaaatcaaaacccttgtttatgtacatacaaccttactcaaatgaaatgggattcatgacatttattcgtttgaaccatttagcagtgtcctagcaaatattctttcattatgacttgcatgttgctgtccctttttattttccatctataatatttccctttgtttttgtggtgcacttctaacgatttacttctatgtatggttgcattccttggaatatgtttcgtagatctaataacagctgaaactactctcatgtaggagagtggtagaagctggacggtaccattgggctg

SEQ ID NO: 7041 - DNA, 1899 bp, Populus trichocarpa
  Intron number 4 from transcript POPTR_0001s37130.1 (locus POPTR_0001s37130) derived from phytozome v7.0 (chr-ID scaf fold_1; pos 35952804 to 35954702)
ttgtactggtcttgctctgagttttccaggtattcagcttcttacttgacacgttaaatttttaatttgctaagacctgaattctgtctcaactgaaaaaatatattagctatttgtattcatggtgtccctgagctttaaattttatggtcttgtgcacattcatcaatgacaatctgttctatcatattttcccatgatgtgcataaacatctccttgtatacacaacattattgccatttgtgcaagcaaaatactgtcatctttggattgttttagcaataacttgttaattgctagtaaaatattttttccatgggtgtggggtaggtgggagggggtgtgggctgtcttttcatagcaagtgaatcttacctacaatgctagcgattgcattcctcagaacttgattcactgttttgacacttctcttaaatctttttcagctatcattttgtttctgagcatatcatttcatatgccatttggagacttcacgtcttttatattctgctgatgactatctttatcagctatgatttttcttttctaagcgtatatttcattttctatttgatggcaaaatctggatttttcacatcttttatttttctagtgacttccaaatcatcttggttctcacctattttgaaaaaaggtattccccctccatcttttcgtaggaactttgttttttctacattgaaatttatcctcaagaaatattttcaacaatccaaatatatgaagctttccgaacttccaaaatttcacaaatgatattatcatttccatattcagtactgttgtaactacagacacacagtccgcaaaaagaacaagttctttatgtaacttatggttgttttcaaattcttaaaaatggagactgctgaatagagatctgggataaactgctagttaaagttggctgccataaattgttaatgcttcttaatagtgacatttttttcacttccctatttctttttagctttctcttcttttcccttgtttctttaaacttctatcttttatatctattcttctcagttgatcaactccttcacatcagcctctttgttttttattgtcaatcactggcagtttttttttcatggaacagcaaaaggcttggttgttggatttgctacataacagaaaaggcaaaacaaagagaaataccatcacatgattgcatatttatcctctatcaaatacaaataatactgtttgccaaatcgcctgtaaaagtggcaatgtttttccttcgcaaagactctgtttctgatttgatcttttgaattcaattttctaattgttgtttctcttgtttactgtcaatttatatttccttttcatcctattctgttccaatttgtaatccaattctttcgataataaaatgtattcacaatataaagcaggctatttttgttgtaagtttgcaatgaattcacacatgatgccactagtagtctcttcttccaactctaattcacaatataaactagaagaaaagatggcacttgtcagagatgaggtaaacatgtcaataaaggttcaaagagtggatgctgactcaaactgaagatgataaaaagaggttgaatgttaaaattagtcttgccttttggttgatgtgtaattttaaaccaaaaggagttcaatagaaacgttactctaaaatcaattcgatgatggagagtgcattctcatatgcatacgtgctcttcctagctggacccaaaaaaaaaggggctatgatgtacatgacggatgggcagattctggtactgtcttttttcctcgtgcagatgtcaataggtttgagttttgcaagtttctcttatggatttacaggtgcacctcaggcacttctgcagagttgccttact

SEQ ID NO: 7042 - DNA, 1194 bp, Populus trichocarpa
  Intron number 8 from transcript POPTR_0006s27100.1 (locus POPTR_0006s27100) derived from phytozome v7.0 (chr-ID scaf fold_6; pos 25110882 to 25112075 reverse strand)
gaaagggacagttgttgctcctccagataagtttggtaaatcatttgattgatattgcacaccacagacaactttaccattgtttaaatattattttattatcttctcctctagcatgaattagttgaatattatgtcacatggttccagtattagatctgtcttattagtagatccaaggctctccaaaaattgagaaaagtcgtttgtagcttaatgctactcaaattttaaggatatgcttgatagagggctctaaggcagtgaaaaaatcactagtaaacgttttcaccgtattctttagttttgcaagccaaacattcaatagataataataaaaatgggcaacattttgtcccaaaccgtcatcccaagggtactgtggccctcccattttcatttatcaatgtcgtgaattccaccaatattgtttgttttaatctgtgagtcccatcattatccttcatttacattcttaactttccacatccaccaaatatcatccctcataaaaaagttatacactattatgtttgtgccatgacatttactcctgtgatttttcagcccccattttctcaccttgaatcaaatgaagctttatatgagtggacttaaaagggaaaggatctgagtggacttaaaagggaaaggatccatgtagcatttcaactagtttttggtagaggtcaagaattgctttgttacattgtcaccactaaaagaaacgaacttgctatctttgaactcccatctagtttaagttttaggccaaattgtaaaaagactggactttattttgaagtccccttgaactaaaaaaaaatccccagaattgaagcctcaaagcaaaatgtcattgcaatgtgatccaattgttagaaaaatgtggtattttgtcaattttgacctccttcaacttttaaaaagggccccacataacccataatcggaggatgtcaaaatcaacagaaacttacattttactaatggtcggaccaaactgcaatagggtcttagtacaaggcttaaatttttgtggtttttcagttcagaggagctttaagaattgctaaacttcagggtttttttttatatatatataatttggcccaatttttatgattgtcttactattttaatatgccagtaaactcagtgttgtagtgtttattgcaggcgaaacactgcaag

SEQ ID NO: 7043 - DNA, 1941 bp, Populus trichocarpa
  Intron number 12 from transcript POPTR_0011s14850.1 (locus POPTR_0011s14850) derived from phytozome v7.0 (chr-ID sca ffold_11; pos 17098899 to 17100839 reverse strand)
aggataatccttggggtgtcgcaccattcaaaaaggtacttgttccttttctgttttgcaatgcctgttattttccatgctagggtagatagagtagatgatacaatccttgtaagcatgtttcatggtttacctgttgatagaacaacaaatactagctatttaacgtgggttataattttttttttaaaaaaatacttggtatgcaggttgcttcgacgtgttattttacataaaaaattcaaagtgtaaattgaaaaacctatgcaagaaaaatcaagatattctataacataaaatgagacatacatctgattgtgtttattgaacttatttatttaaataaataaaagataccacactctaaaatatccatgacttaaaagataaatacaaatgaaactgactaaatagactcatgccataaaaaatattacgcaaggccgaacacatcagtaatatatctgattgtgtttattgatttattttaaaaaataaactttatttgtataaaaaaaattatagatgaattagaataatacatcgaaaaatgaaatagaaacaaaacaactagaaaaaacttatattcaaaaaaggcatgcaaaaattgtgatctaggtcatgagactaagataaatccattgaaaaaacttgaagataatcacaaaaccaatattaaaaaaaaattaatgcagaacaataagatcgtacgaagttgaattctcaacaaattaaatgtcgaaagatgaaaccaaggaaaaaaattaattactcaaaatgattgaaaaaataagggtgagaaaaacattaattagaaggatacaaattttcaattgggagggttgaattgaaaaatagctttaataaaagggaaaaaaaccaaaagaatgaggatcaaattgaaaaaaataaaacaatagaaaatttgattgaaggataaaattgaaacaaaaaagcttctacaaaactacaagggataaaataagaaattaaaaaaaatgaggaccgaaatgaaaaaccaaacacatgaaaaattgcaattgaaggactaaattgaaaagaataaaaacttgtataaatgaaaagggaactaactaaaaaattaatagaatgaggacttaaattgaaaagtaagaaacaaagaagacaggtggtgtacattacctgtcaagagagagaagggaaaaaaaatcaaacgatcaccggcgacaattcgaccatcgtaagttgtcatacgccactccaaatagaagaggacacggcggaaggctagttacttctactgggtggagtcacatgcgcggacgccacccacacgttggggcttgtcgagcatgttctagcagctttaagcattaaaaaattcaaaaaaaaatcgcgaataccaaaatgctcttcatgaccccgacagttatacaaaatgctcgtatgaaagtataaaattaccccaaatgctaagcttatgttttgtctcttctaaggttaaagaagtaattgtattgtatattaaaaattgaaaactttaaaatacccttatccagtagcgcaataatttttaactacggggcaagtttatatttttactgttaagaagcttatgcaaactcttcgtcaatagttctatattttgttgattttaaatgaaaaatagtatttttactatgcaaataaaaaggcatctacaccctcacccaaaacacattttagttctatattttgtggtcaatagttaacaaaggtaattttattatagccaagacacattttaccgtgatttgggccacagcaaaacacccacccacgccatttagttttttaggtaatttgattgccgaactcatttaagacttgctagattttgctatatatttccttgtggagtgactaagatcggcattgatttcaggttgtcagcttaccctcgaggattgatccgcatca

SEQ ID NO: 7044 - DNA, 806 bp, Populus trichocarpa
  Intron number 1 from transcript POPTR_0012s06400.1 (locus POPTR_0012s06400) derived from phytozome v7.0 (chr-ID scaf fold_12; pos 6767231 to 6768036)
tcatctcctcttttacaattaactgaagtgatcaggtacttaacaatttaaatcaagcacagcccatctgataaaaaacaaacctttatgtgtttttgtcattgaatcaatgcacatgcaatggaactctattagattttgtataattcagttgaatcaagcttctaacactgcgaattacctcttatcttgctttgattctctgtttttaatcatgattggtatagaaatgagggaattcaattgtttacaatggattcttgaaagattgttactttctggtccatgctgggtgaattttgaattgtaatcctttttgggttgtagtgttatattggttggttgtgtttggttgctgagaaagatgataatttgaaaatattttgagcttttgtattggatgtattgtttattagctaaattgtcgtttaagattgttgcataaaattttgttgaagttgataaccttcatttttttgtgttttttaaagataaattggattaatggaaagtatagggttttggtggattcgttttgtagtttcaattctgattcgaaaactaataatggtgaattgatgaactatgatctagttttaaaagggtttgtgctgatcttgattttgagaagggtaagcttagattttgctcgatttgtttcatttagggttctggttcctggggttgaggcttgataatgaatctgttgtctggttttctatttttttcgagcaggaatgtagttggattggctgtgtcatcagatagtgaatttgaattttttttaaagacttagattgggaata

SEQ ID NO: 7045 - DNA, 2017 bp, Populus trichocarpa
  Intron number 2 from transcript POPTR_0008s14360.2 (locus POPTR_0008s14360) derived from phytozome v7.0 (chr-ID scaf fold_8; pos 9520405 to 9522421)
gtgcccgacaccaactcttttggtcacacttttaggtcttcatctaattatttccttttcttttaattagtgagataaatatttttattttcatgccatttcgcgaggcacccaggcagtggtgtcagctttttattgctatatataatcattttcattattccggatgggatttggttcatgatgaggaggataaatggattttaaactagacaataaaattgtttttattcctctcaacgacaaaaacttgattcatctaaatagatttttcgaatgtttcctatgagctgtcacttgaggaccttcgaaggagtaaagtacatggtcgacgcccttagcttcgtagtttttaatggttaattattctggtaatgcgaattaaaactatattttctattatttaataaattctgacaggaaattttgttattcaagaccgaactaatcatcgagccaaccaggtgactggttagatcataggttagtgccagctcgagacatggctaccagattcgattcacagtccccgatcaaatcacctgattatagatcaacgtgtcggaacaacatgttaacttataatatgtcgattattatattataactaaactcttttatgtatgatgacaaaaaaaacttagtcaagaaaaaacgccaaggcgatttgattttttctttttctttttttttttcaaagtcaattcttgacctagttaatagataagttcaagtcaattaatttcttattctatccagatccaaacctgaatcagatcgacttaatgaattttatatcaatccatcaacaagctgagtgtgacaaccagtctctatatgaagttaatcagtaataaatagcaatttaaatgttttataaattagatcaattcctaatacaaaatcatttacatttaaatcccaccctgtaggccggtagactttggtttggtttgggttgtattgaagaaaaataaataaaataaataaggagagctgatttaaggtaaatcaattcggtggtggatctgattgaaattaaaaaataattgattgatttatttaaaataatattgatttattttaaaaaataaatcccataacctgttatattcagcatgatttatactataaaagatgttttaaaaggaatagaaggtttttaaagtaaattaattttctttattttatacacgcacgcactttctttattctagtatttaagatttaaaaattatgggtaggccaagttttattgttccctaacaaataataatcataacaatactatttttattaaattaaatattttattttttatgctggaaatggaatatattgttattgtattttttaaacaaggcaatgataattccctcaaagctagtactgtatccacagaataactattgcttttttattttggctttattggaagacttcactccaagtagtggatgaagaccacggtaaataattaattttagtgaaaaatttctcaaaataaaatcatttatgcgataatttaatttttctaaaaaaaataaaaaaaatcttgcttcactattaatggactgttgtaataaataacataccataaagatatgatgagttgatgggccgatccgcatgtatgctgagtccaaattaaagtctagttgatccaactagacaggcctaagccgacaagccttcctctcttcccatgatcaggctccgtacaacccatcaaacaataaaacttttatttaattaactattcatttaaatttcaaatatttattgcagctactaatataagaggtttgcctcctggtaacgagagaagaagaagaagaagaagaaaacgacgtcgcttctttttattttttgttattagaaaacaacgtcgctttgttttttacaagtcttaacttttttttttcttttttttttttgttttcctagtattaattgtagtgtctcttcctttattatttataatgtctaataacttgtgaattatgaaacagggatt

SEQ ID NO: 7046 - DNA, 4878 bp, Populus trichocarpa
  Intron number 19 from transcript POPTR_0013s08280.1 (locus POPTR_0013s08280) derived from phytozome v7.0 (chr-ID sca ffold_13; pos 7330959 to 7335836)
tggcttcaatcactggcttcattctggggtcacctgtacgtatatcctctaccaaaacactagttgtcgtctttattgtatttttgtacctgtagaatgtatatggcccacccatctgtatcaaaaccagtgtagcatgttaacaaatatggctgcttagcagatgaggattcaatgttcgtggtttttaatctattataaatgttgcttgttatgatttgatgtgaacaatcacaagtatgagtttggtgtcttcgctttttgatttttgatttttatatttgcttgtccaccaactttaatatatttggcatgaggtttattggagtcactctgttaaacctttctactgagaattttaggtgtatcttgggatgctttacatcattttctgggttgaagatttgactcagcaaaatctggataatgggagcttagactgttgtggatattgctggttttctaagtctttaatttatgagtctagctcacttccaacatgctttgcagtgaataggcgttaattggaaagctctatgggatttagagatggaaacaatgtaatgttgtctgaattggaaatgacatctgaataagagagttagttagaagataaaagaactttagaaaaaaagaaaggaaaattgaagagaggtagcctggattacattattcaaacatgaaaataatgttatttccttgacctcctttcaagttgacatacttgagattggaggtcaaaaaggtccttacagtgatcattgagattcatgagtgtgactttgttggatggtggtttttctatgaatcaacggtggaaatttatcatgaaaccaggcttgtgctaagggggttggttgcttggtttatcgtgattgcattgttcaaacttctcgtcggttctatttcttctttgcctcttcaagataaatattcagataagattaataaacaaaacctattcaaagaagcgccatttctgactcagaggtggatttttcagtgaaacttgccactgggctttctcatgcaacttggaatattggttttaataattaagacattattggaaaatggtattgagcatatgttgaaccctgaagcaagaaaaatggatgggggatataaaattcattgttgaaaggttcttgatgttgaaactctctaagttgtagttgtgattgatcgtggaatgtatgaagattttcctgcatggttacactatttggcaggttttcctcagccaacatttaaatgactgagaattggtgtttaatttaccgtcctccttaagagcttaggtttaggtatggtctgagatttaaaggcagttttgttctggatatttcagattcttttcagacttgtctttctctttgatgcttctttcaatgagtgtttccaataattttttacatgaatgtggaagaaatgtacacttggtcagaactgatgttcactacatcgttctaccaatgtgagtcctccagaagtgtattgttttgctgtgagatatgtgttctgaataaggggagagagcactccattttgattttggctgcattagcttgtataggtgatgatatttgtgctcttcagggtaccacagtttcttcatgattttcgatagcgtgcatagctaatatgaaccccatatgtagcctggaaccttttaaaggaaaatcaaattctgtggaggcaacacttggaaatttgtcagggctctcaaggttgcctgactattcagtaatacattgaatggggttcacgggagtacacaaaaattctcttttctttttgttgattatagtgcatgtgcatagtttgctggggatcttcaacatgcaaaatacttttaaattcttgagaaagaatgtctcatatgaacatgtcatgttcagaaatatttgttctggaaatttttgaggttgcacgattgtcttgattcccttttcttttgtgaagttctgggaattatgatatgtagtttagtgtttcttcttcttcttttctttctttctttctccttttaatttcttttgtgttgtctttgcacaatgatccaactaggttggtggggaatactctctggggtttactggcatggctaatagttcagttgcaacttggagattgatgcctattctaattctgtgctttgcgtattcactggataattgtcaaggaccattttcataaagttggagtttcacatacctaatatgccccttgctattgtttaatattggattgaaccgatttcagagagggggatgggagtgggaaggcaatgctgctttggctgttttatggtagacttgtagtctaggtttcaactctggcgaatggaaaattttcttatttcctgagagctgctagaaaggatgtggtgaatgctaatgaagtgtcattgctacctttatacatcttagccataggagcatggagtttgcagagaaaaaatgaaacctcttgaacactgaggacagttaatctgtttatggtcagacttgtcaattgctttttggtgcttctctaatgattgctggttcaggtcactgactgggatccttatcctcttcaatcattttttctgtgccaaatcaatgaactttttgagggatttaagtatttctcttcattatttcatcattgtcctttaccccccacttttgatggtttgtctctttatcctgtttgagcattatattgacaaagctcttcttctcgatgttattgccgcctttatatggataatcttataagcacaaaattattcagggctactgaaaattttcattctcatgtactcatgggcaatatcattttttcctattgcatgcgacccttcttatccattcatatacataaaatacccagacacagacatctaaatcaacatgttccaaatttgtatgtatagaatgtactcaattcattgttcaatgtacacttatcaagtgtatttctgtccctagaattctgttttaattgccaagccctcatccaaggtgtgtattcccttcattcttcactctttctttttattcttgcatatatcctatgcaatccagaagtcccaattctttcaccgagtagcatttcatgagtttggattaggtctggttgaagtaactagtgtggcctctgggtttgataagtcataaagctgatgaatgaagaagtgctggaaggtggatgtgatatcaatggatatacctaagatgcttttgctgtcctgaagactggtttaatgatgtcattcatatctatggctgatgcctggttttgttgcaataccttatgaactgaaatttcactacagtctgaaagtaggcaagcttgtttgggggttagatttagcagatagaggaactgggggaggcaggaggcatatgatttggttaactatgagattaatctgtaagattatgaggtgaagtcccttgagattttggtgacagaatcagagagtttgaaccagagaactaatgatgaggtctgcaggataaataacgattttctataaacttatgtatatgtgtgtggatcaataggagatctgatttcggccatgttgatttggtaatctattttttagtctaaggttgtatcatatttagtgtaggagatgcatttattcacagtagatgtttccttaattaacctgtggtggttccattgctgttttgctcttcattactgtttgcctaggcttcctcagcatgctgttctattataatgaaatattactcgagcatgaaagttaattggtgggtttggtctttactagattgtcatgagaaccaattacaagaatcctgttgatctataatgctcttatcagttaggtgtgtatcacatgttagtgtttgaatgttgtgacagaacagtgacctgggtgataatggttttgttgattatactcctgtatgccgaatgagccatgtcttcgtgcttcaaaacaccaagtgcaactatgtaagaaaatattgaggagtaatgaacataaagatattgagtcatgtctgaacatctgtacagcctccatgtttgcatgtagtgcttgttgtatgtgtatagaagtgtgcaccattagatgcatgagctcgcatgtgtgtccagctatgacattgaataatatattttcttgccaggtgctcttcttatcctgtgtttgggtaaataagagtttgactcttagtgtttcagattgctctagagtggctccttgttaaaatttcaacagataccttctgaagtgctgactgttgatttccctttttagtagcttttgaatttatttgaactgctatgtaacacactaagtttgaaaatagtttcattaagaaattagagaccaattccacctgaatatggcccacaacctcacctatgtttaatgaaaatcatcaaagcctttcataatttataagatgattgcctttgcttgtttccttattcactctttttcttcacttaaaatgcagtaagtttaattggtggaattattttagtttgggttttctcttgttgagatcacttatgtggctgcttgtgtctgcccaatatggtctcttatttattaactgctacgtgtttaagagatgcttaatttgttgtatgatgcataatttctgtacttgttcataatatgttatgaagttctggtgttttcgtagtcatttgatgaaatgcccatcatttcctctcatgagatctactgatgatggaattattttttctttgtagttatataaattatattgttgatgaacttctaactttatgtaaagaactaccactttttttttattgatgacttgaaattgaatgaagagagttttgtttattcccaggtgtaagaagtacccatct

SEQ ID NO: 7047 - DNA, 649 bp, Populus trichocarpa
  Intron number 1 from transcript POPTR_0004s05170.1 (locus POPTR_0004s05170) derived from phytozome v7.0 (chr-ID scaf fold_4; pos 3914506 to 3915154 reverse strand)
atctggtggatcacgtgtacaacaaggtaagaactaaatcctcttatgtctaaacattcaaatttctcgatggtgatcatatgatgaatagcactacaagatgattttgttgtttcagtctgccataaatatttgttttgttatcttgtgtataacccctttattcataaaagaaccttttgaaatttacttttgattccctttttttcataaaagaatcttttttagcactacaaggttgctattcagagatttgaccagaagttattgtttgataataatataacttgctgctgcaaatcaaagcttagactaaatgattaattaataagctggataatttaaaccagacaaagcctcaaagtcaaaattgtccagcacaacaaaatcaggaataatagaaaatggaggggaaagattattgtagagaacatgcaaaacccctttctattttatgctttattaatacttattctccaagacttttccaatcattgtttgtagtttgacttggtcctctaaaggagtaaaggtacaaggcctacgaaattattttatctagattagattctgtgtttttgttcggttttaatatatttctaacagattgttgcttatcatttgtgctaaaaaattttgaagacattcg

SEQ ID NO: 7048 - DNA, 1061 bp, Populus trichocarpa
  Intron number 2 from transcript POPTR_0004s03360.1 (locus POPTR_0004s03360) derived from phytozome v7.0 (chr-ID scaf fold_4; pos 2294097 to 2295157 reverse strand)
tcttgcttggttttggtataggttttgccaatcaggtactaaatatttctttttctgttttgatgattcttgttttcatttttagttgcttttgagtatgaggttattttatttggatctggagatgggtatattttggggttatttattcttctttttctattttaagtatatgaagaagaaaaacaataaaatgtgcttcaatttttattctttctgtgcataatttcatagttttcaatggaatcgttctgggttttgagtttcaaagcatctcatctttgttttcttggatataaaaaattgattgatttatttttttaccttagtagatctattcttttgctttgatggttttaagttttaggtcagataagggggcactctttttgttattttcttggagagagaacaagtgggtttcttggaaaatgacaaaatcacgttcttatacccagctgtttctgatccggacatgagctcctagtcctttaaagttgaataggatttaatgtcgtgtttggttcctgagaaaaagaaaaagaaaaaaaaggtgatccaaattttccgctactatagtctatagcaagacaagtcaaagaattcgactgaatgattaggaataagataaagggagtgactttgttattttatcattttttggaagtcatggttgccttgtttttctttagcatgacatctctggcgcctgttttttccacaaaaagttcacttgctgatggtagctttgaatagaaaaattgtaagttgatagctgcttaattgttaattaaacttaattaagtatggaaaactgcattttctgctctcttttttgtttatttgtttgattgatttgtgtgtttaaagtagtatttgttcttaatccaagaaatatgaacaacaagacaagaatgtatggtcccaagaaagacaaaagttctgttcaatatctccgatttgattatttactaattggtttaattagagaaggtgattagagatttaattattttcatttttgtttgtgattacagtctgtgccactctacctctctgag

SEQ ID NO: 7049 - DNA, 1704 bp, Populus trichocarpa
  Intron number 8 from transcript POPTR_0012s10420.2 (locus POPTR_0012s10420) derived from phytozome v7.0 (chr-ID scaf fold_12; pos 11199759 to 11201462)
caagtccccatcaaaggcttctgcaaaagatcaaggtgcagtattttcattctattcttgatgtttaaagtttttggttttaatttgtgattgtctggagcttttgagcaagtgatttactcttttgcattgtggctccttaaccctctcttatgctatttattaattttgcagttatcattgtcaataaaatacagattactttacatctatcaattttttattgattttatagttatcattgttctctaaacatcaactttctttcttctagttgcttttgcactcttcataacagacagaactttattggattcatctcatttttttgtgcacttttttttggtgatcagaaatttgtcaaataggaagtttgagatcagtggaagtttatcactgttggagggcattgaaacatgctaattgaagacaacaatgattttttataggagattaggctaggatagagcaataattatcaagtgacaatagaggttgtgttttaaatgaatatccaagaaatatgtggtgggattgtatttgagatccatagataacatggctgggcagggagtgttaattttgagagaaaaaatattaccttaggttatttgctacctctggtggatggggattaatgtttcctcccatgcttggagtgaaatgttacccatctgatttgttaaatggtttgtcctaccaaacataattagaggtagtttacatgggtaatttttctcccctttcacctccttcataacaccttaaatgtatctatatcaatatgctttttgaagattatacatataataaaaaagccaaggaaaaaaccaggcccaactttgtctttcttaaaagaattgagtgggcaaacttagtggttaagcataaaggacatcttatgttgcagagtttagagaaaggacaaaactatacagcagcaatttttactgagaaatgatgcatgtctactctttcaattgtagagaaaataggatggagtaacagatgttattcggagaaataatacgaagagtgaaatgatgtcattgtgggaggtagcaagatgtggggagagaaagcgactaaattgacattcatggagtgcttgtttctttggaatggagaaagattgtctgtataatagttatctataacatcttccttggatttaatttttgttgtgcttggtaggggtttttgttaagccagaaacaaggctacaatggataatggtccattggcaatttgctgattgtgtgtgtttggcattgtggtagcttttgcggttaaaaaaggtaggtttaaaaaaaaacacttttagttgcagtttaaaaaatgtgttcggttaaaactgttttaagatggatttttacatgtaaaataaatgaaaatcaagctattttaacttttacaaatccaaggtttggaacacaattatgtgcagggcacaatgcaaaaagcaaaagctatctggctaatgaaatggttttatatccgtgattggacaaaaagcagaagctatcacaataccaaatggtttcgtaaatatcatgttttgcttttaatttacttgtcaaattgattttgtacttacatgatctccatttgttttaaagttatttcagagtttgttcccttgccaaatgattttatgttggaaaattaggtaaagccaagtctaacaaaaaggccaaggcagaa

SEQ ID NO: 7050 - DNA, 864 bp, Populus trichocarpa
  Intron number 16 from transcript POPTR_0008s10680.1 (locus POPTR_0008s10680) derived from phytozome v7.0 (chr-ID sca ffold_8; pos 6692590 to 6693453 reverse strand)
ttcggcaggaaggaatcccgctactaggactgtcggtttgtgttttatgaactgtttacaatgcatctatctttcaatatccttggacattcagactaacacatgcaacgatgtcttgcacaaacctaattacctgaaagatgagatttatcactatcctgataagtgaaaaaatctcttgtttgtttggcctttaggctttatgaacaaaaatcaattatcctttaattgcattgctcacagaactaaattcaatatacaatttcattttcttgattttgaaatttagttttataacgtgtcatgtaaaaactacatttacaaagttgatttgtagtgtgaaagaaaatcgaaataagccttgtttgcatgccttttaagataagagaattggttgttttcttgaccttgaaaattgttgatttaatatttgggtgatattgttcagcaatttatggatacttgaatgaccaaccagttgtataacatgccttgctaatctatacatgaaataatttgtcaaggccaatttcagtgttgttcttgtttgaagagtttacatcagctccaactaggaaacctccttcacccttgggatcaaattttcctagtgcctctaataacggcagattttgccttagggtgatgctctgctatttgcttgttttttaataactctgtcagtacctcttatgctggcatctgattttattcatagtatattgcattttcccatgactttttgctcgtaagttctttgctgtattgcattttgtattctgaatttttaatacctattcaattgtaagtgcatgtgttctatttgccaatcaactaaatttattttacttacaggttaaagga

SEQ ID NO: 7051 - DNA, 2247 bp, Populus trichocarpa
  Intron number 6 from transcript POPTR_0005s22070.1 (locus POPTR_0005s22070) derived from phytozome v7.0 (chr-ID scaf fold_5; pos 21071259 to 21073505 reverse strand)
gacaggacatgtaagtttgaattgtctgctgaattcttgtttggattgtattagcaccatatataagcaatgtaagctgtaataactacagccataagttcatgagaaaaaaaaaaggattgctgatttgatgtcaagaaatgagatgccatcaggtcttcacgtgaccaaaatcagaattaaacagaagtcatgattaacaacgaagaatcttaaagggaaatcttttttggaatgggttaagaaatggtttaaaactattaattttgtagaaaatgtatggagggcatagcatcgtcaactctgtaaaccaaaatttaaccctgtttggaactgagcatttttatttatttattgagttattttggtgtgctctcaaagaattgtttcaatgtcaattctgcttggtcttgcttgcatctttgcttgtggtatgtgttggtattgatggttagtaagaggtggtgaggggtatgtgtagcttggatgcttctgagctgcttaatgcatggtttgtgctgcaagaaggcatttgaaagagaagaaaggacttgttaagttacaatcagcatctctggtgacttccttttttatggccatagttttaaataatggccattatattatgtaacggctcttatttaactgaatcagagcactccattactgtttttcagtgttatagtactgttattggcgattcacaaagtaatagctgttattggctgttatattgaaaatacagccctataacagtccacttacaaaattgattttttactatattttgtatttcaagttcatattttcatatttttcatctttttttatagttatataggatgttgtttatatgacttttatctactggaagtgttattattgtatatatttagcaaaattattagaaaagcatgtattattaaagttcgctaagaattgctaatgaattcacgataaccgtgaccgatataaaccacataaaactatgtttatggctctgtattgctcctctcttttctaatttctttcttctttttttaattactttaggctattgtcatttttgtttttagtgttactcttgaacaatttttggctgtttttaaatcttgcatattgtacctatcagggaaaaaaaaaagagaatcttgtgcgtgtctttattctttcttgttttacattatttggtttaatatatgaaaagtgcagaagcacaagatttcagaaaacaaaaggggtttaaaattattaggttcttgttgtgtgtcttatcttcttttgtcatgtgcttgattttctctcccaagtcactttattcttttcttttttcctaaaattccttcttagctttcttttctcactaactcccaaatctctataatgatagaaaagtgcttaaccaggatgttccacaatgtttccaagcttttgtttgcaaccatagaaaataatcaactaagcttctggaaagtttcatgctaggaatagaaggctttgttgtcttcttctttttcaagctgatggagtggcatttagtagtttctcaagaagattggatatccttccattcatgatgtttgttccatggtgttgtgttaaatgctgagttctgggacaagatatttctgttccccacagaacatagcatctagagtttaaaattttagggtctcttagttgtgtgatttgtgattgcaatcatgcttacacttttttctcaaattgtttgctatttatatttaggatatacatctcaagatggttgcccattagtttcatgatatgttattttaaaatagttgctatcgatatttaggatctacagcctaggatggtttgccattggttttgttagtgtgtttatgtgcttttctctgtactgatgcttattattaacatacgatgtatttttgtatggtgagttggtgaccaagatttactagaaatttgaactgtgtatggacccattcagtttccatggaacgcgttctttttattatgctttcatttgtaagttatgctttccttgggacgtgttcttgtcatgctttcatttgtaagtaaaaccttttggatttttcttattttagaaccctaaatccttgatttaaatttagtgcttgtacactcttcctttcttacatttcaatgatatatagactaatccaaaacgtttattaatgagcttcttcaatgcccattccttttattttaattgcagatacttccagggtatcccagagg

SEQ ID NO: 7052 - DNA, 1320 bp, Populus trichocarpa
  Intron number 7 from transcript POPTR_0008s14960.1 (locus POPTR_0008s14960) derived from phytozome v7.0 (chr-ID scaf fold_8; pos 9972768 to 9974087)
ttgtcacttggaaacatcaaggatcttcgagaactgtaagtctttttaacacaagaacatatgcaagtcccatgttatcattctatgctttagtttcatgcctcggctccttatccacatatttgcagtctatgctgttcacaccttgggcgtttgttgttcaatatgcttttggttgtttcctgctcctaattgttatgctaaatggacagaacttaatggaagagtgtatgatttgaatgttaagaaatcctttactgttccatcgtagatctagaactcagcacaattggaaatgtgacactgttcattgaataatttgaaatttgtattattgcatacactgaacctttggtggtctatctcgttagattcttataataaggaagtggcatctgcatgtttatcccaacccttcctttgcataggcacatagcacacaatctcttctacgcaataaaagtaccaacgtgggattcacgtaggttactgcactgttaagtaaaatggatgagtagaatctagaagcactcatctttgaaattggtaaaggaccatttctgacttgatggatacccttgttcatacaaattaagacattttacctggtccagtttttagctcaacactgatgatcttagataggaatttatgaaacatacataaaaatattttgttttgtccataacaaagctgtgataagtatgccgaggagttgatatatatggtttagtttccaggtcatgatacccaatctttttcatggttggaccgctgtcattgattcattgcagatggctttctcacctttataataagaatgatctcttatgaaaaaatatttgtagttcacagccccgtaagtttctatggagtactgctggattgaaatggaatcggaagaactactatttgacatatttcaccatccaagctttctcatgaagtttggatatcaaacttgtgttgcatttttctgatttagtggtatctagtcaattatctttcctgttattgtcactaccattacgtgctactaattcttccaacttaaatcgccatgtagtaaaaaatctggatggttaaccatttcatagcagagtcattgacttattcttcattcttcgcgaggttcagatatgtttttatttatctgctgcagatgacaacataaacattttgctgtagagttttcttggtcatatgtaatctttttattcaattgcttttttggtaattctaattttattctcgatttacttgacaaggtccctttgtctttcaggttcttacagaacaataatctgagtggccaaatcc

SEQ ID NO: 7053 - DNA, 1725 bp, Populus trichocarpa
  Intron number 6 from transcript POPTR_0001s22090.3 (locus POPTR_0001s22090) derived from phytozome v7.0 (chr-ID scaf fold_1; pos 20709647 to 20711371)
gcaggtaaaataattactcttttagtaaattaatccgcatgacaattatttcttcactttatttccattcttccttccataattgcttgaggttttttatataatttaagataacgtaatatttgatttctattatatgtagtttgctaaattcttcattaaaattatgaaccactattcttcacgctggtagtatagcaaccactatttttgcatcagcaccaccatctatttgcgccgtccatccttattgctaataattaatcattataaccactcttctgccaccaccaccacacctttgaacaccattgcaattactatcttgccactattatcacctatcattatcattatcgtaacaatcttcatcacccaacacagcattattatcactataaatattatcatttatatattcatatataccaatcacaatcataattattattacttttcagctattgttattatcatgagtaacatcacttctctcaccttattattataattccaacaactataaatgaaaataaatattttgtttttctaaaaaaatatttttttattattttcaaaaggtgtaaaaataacttttttattaagaaaatgtcttacaaaatagtttctagaaaaatattttttttataaaacaaacacagctctagatagtaaaaaatataatttcaattaatatggttcatttttaattaatatcaattactgttaggacattaatattttttttgttattttatttatcatttttaatcatcctgtcttcaatttattcttcttattttattgataattttctcttaaaaaaaactattttcacacacacacacacacatatatatataatcaacagtttaaacaagtgactgatatttcaatcagatatgaatatcatttcatggtaattagtggttccactagttttataacatgcacttaagaaaattgatgccacatgtcacgctttgaatagcaacaacatttaaaagagttgagtgacaattaatagtagtggtagtgtagactttgttaatattatattagtccatggttttacattcacgagagagatctacaaaaaaaaaaaaaacaagaagaaagaaaattagaattcaaaagttatttgaacatttttttctagactcaggaatagattattgggtaattagctctacttatctttatattctagatttaatctttctttattatattcttatatttattcttatattttaaatctttctttattatatttttctagtagatattttcataaaaaataatggaaatacaaatactcgagacgctcaaactcacctggtttattacaaaaataaatttgaaaaagaaattgaattgtcatatagtgttaaaattcatttgttcatagttatttatgctaatacattatgttaactttgagttcataacaaaaagaatatattaaaaattacatataaaatataaggaaaaatttaacttatttcctagtttttttaattctctctctctctctctctcttctctatatatctatttttattccatgattaattaataattagtgttgaagtaatatatatatatatatatatatatatatatatatatatatatatatatatataatgaatcgatgagaccctcttaatttatatactcttacaagtttaatcttaaaaattgaatgttgtgtgtttagaa

SEQ ID NO: 7054 - DNA, 2542 bp, Populus trichocarpa
  Intron number 8 from transcript POPTR_0015s09090.1 (locus POPTR_0015s09090) derived from phytozome v7.0 (chr-ID scaf fold_15; pos 10410483 to 10413024)
atttgtacttggggtaatttctggcataccattgcccaagtcatttcaatattatttataattgtagtgtgcaattaaggttagtggccttgctgtagggaaaattggaaaaattaattaaaaagggacgacagtaagtacattatgaaaacacagtactctcgagctaattaaccttgctgttgactgctcaacttttacaaaattacccctataaaaagcaaaatttcagaactaccccctgataatttagatcccaaatcctacaatattagctaggaaagtatttttttgggagccggttccagttcaggtcaagccagccaaatagacatgcttgctttagcattagatttctcccttgtctaaaacaatcacataaagatatatgaaatctttttttttttggtttctagagtactttgggactatagcatagtgaaaaaaaaaaacaagaagatataataatgtagtgcaaaaaatatttagaaaaataacatggtttagagagtcacagatgtcatctgcgatttgcgagttgcaagtgtcatctgcgcctttcaaattgtaaaattgctggacacaagattcaataaagagagaagagagaggagagagaaaaaaaggaaagaaaaaaagactttggaggcacatcgaaactcctatgacgacaccaccggtatcgttagaaagatattgacgagatgaatccaacaacaccaagaaaggtcatcaacgatgatcggagtgggtcagacgagcagcctaaaagcaagtgagcctcgacacctttggacggtttgtgtggcacattccgttcatcgtttatgatcttctttggtgttgttggatttgtcttgttgagatttttttatggtattggtggtgtcatcatcagggtttcggtgtgcctccgggttctctattttttttttacttttctctctcttttatctcttcataaataacgaggagagaggagaaagaataaaaaaaagaaagaaaataaccatagaggcacactaaagctccgatgacgacaccacttgtaccttaaaaaaaatctcgataagacaaacccaacgacatcaaataaggttaataacagtgaacaacgtgggccacacgagccgcccaaaggtgtcagggctcacctacctttgggccgctcgtgtggcccactccggtcaccattggtgaccttccttggtgttgttggattaattttgttgagatcttttcaatagtactggtgatgtcgtcatcggagtttcgatgtgtctttagagtttttttctttccttttttttctctctcctctctcctttatttattgaatcttgtgtccaacaattttgcaatttgagagtcgtagatgacacttgcgactcgagaaatacaaatgtcatttgtgactctctaaactatgttatttctttaaataccttttgcactgttattttatcaatattttttctactttgctaaaattttaaaaaactcttggtttctgcatcaaaagccttaaacacatctaactgctctactgaatttatgtaaaccacttcaactcatttacttcgaactgaatagctagcaaaatgacaatttacttccatgtgcttatttctttcattgaaattggatttgaggagacatacgtggctgctttattttcagaaaacatctgcattggcttgtcatataagaatctcttgtaatatggaggattttctactaggttatctataaattagaaaatagatttagtattaatcaactcctaggggtcactcttaattaagatatatgatttgattctgttcttgattcagagaatactctcttgcaggagagacctgaccaatatcatttacatgctctataagccatagctatatgctctccctctgcacttcaacttgtcacaacacaatcagcataggagaatataggagaatcctacgttgttcaatggattatttcttgaacagtagcccttacccaggagcttgagaaattttaaaatctgtaaaccttcccaatgagattgtagaggactttgcatgagttgactaagcactcaaagacaaatgttatatcaggtctagttattttcaagtaaataagtttcccaattaacattcaataattctaggattatcaactcagcatctttttccccagacttcacattgggatctattggggttacagttggtttggctccctaaagtactgtctcttataacaaattggcaacatacttccattgagaaaagcaatactttactatggtgtgtgcatgtgtcattcatttcagcgttagattctttgttgtacttgcttaacttgtatagattggatatagcgtttccttctattgtgatttgtgattctattcaattactgctctatctagtggtccattgccttaaaccttaatttcttacgtgaatccatttttctcccatttagagaatatatgctaacaatattattcacagaaataagcagtttgcagtagttgaaaatcctggtt

SEQ ID NO: 7055 - DNA, 1434 bp, Populus trichocarpa
  Intron number 1 from transcript POPTR_0005s22580.1 (locus POPTR_0005s22580) derived from phytozome v7.0 (chr-ID scaf fold_5; pos 21495724 to 21497157 reverse strand)
tctcctaattggagagaccttatcaattctagttggtcagtattatttattattatcaccaccgcttcccgtttcatcttttctttatttgttttgtatcaacggtttcttttttcttttgggtatcaatcaatagtaagtgggtcttgatcagttttagatttgaatagtcagaaacagagaacatgacataaattggcaactgggtttaagttactgatgtggtgacttccttatttttagtggtaacttccttatttatgttgcctgattataagttcaagttttggacgtgatgtttgtgtcctagttgtcatggatgataattcattctggatatttttggtaggttttgtcaaccaggtggatcgttggttgcatttaatttactggatttaagggcctgaaatctttttgttgatttttttttgtttcatttaactgggggtatagattgtgaattcttttctttttaatcggagattgtgaattcttcaatcacataatgaatgttgagacttcaccatcactgggattctacaacaatacccaaaaaattgataatcatttatttgtgaccaaattaccgggagtctttaatttttgctggaatttgggattttgggtatgtttttgaatgaggagattgtagctatttagttggggtattttattttaattactttcagaatttcctttgcctgagaatgtagttgtctgggacagaataagttttctaatagtagaggtcattgcatcttggacttctagagactaattggttgattaatttcttccggagatcattgatgggctactaaacttcgcagatttttgctttgttcttatggtgtttatttaacagtgaactaaacaattgttttttgtaatttctttgaacaatagtacaaggcagagcggcgagcaagtgaaagactaggatttctgagagcttgttcaatcttggattcctagccctttttgagtgatagaatacattagaaaaggagcacggccctagctatttgtaccatgtgatcattgtatttcatatcaatgatgattttgtgatcaatcagtgatttctggttttgtgaggcagtattatgccctgatctgcttatccacaaagtgccaaatttttctttgttgcgaagaagattggtaaatggtttaaatttcttatttgttatgaccggatcatcattttattgtatctcatttgcctcttttcattttatttttcttcttgacttatggttaaaactcatcattgacatacaacttaagtaggtacatacttattagtggttttcaatcagtggggatacttacctacagaaattttcctgcaatataatgttagaatatctgaattttcagcaatatccttggtgatttgattctcacagatgatttgtgtatacaggaaga

SEQ ID NO: 7056 - DNA, 1329 bp, Populus trichocarpa
  Intron number 18 from transcript POPTR_0001s31270.1 (locus POPTR_0001s31270) derived from phytozome v7.0 (chr-ID sca ffold_1; pos 29603785 to 29605113)
ttcaaagtacccattcaagtgaggattctttctctttcaatgagtaatgctacagcagtgctactcattataaaataaccaatctacagttgttttttctttttccaccataaatttgcttcacactactgatcaaattgtacatgtatttctgatgcaagaaatgcattaagaatatttaatggccaacacagttaaatgtgcaagatttcgactgcatgcttcatgacttcaatttgagcaaaaccacatgtcaccatgttagtgatgcctggtgtcattaaatatgttagttttcatgtatcatgttattgtttctttcttcaaatcatgttgttgtcaactaattagttactgttaaactctgctaacattggttttatatctcatgctttctatacttttgaagcatcaacacatgaaaagctgggtgtctgcacgataagcttgttaaaagtactaaatggaatgtcacggatcctatcttccctaaaatctcaaatggtccaatgaaccttgggctaagctttccattccttccaaatctcacaattcctttggccggttgagaccttaggaaaactcaataactcacttggaactctaagctacaacgacatttatctgaataacttttttttagtctacttttagctgtttgctgtttgtagccataactctggtaacaatggttctatttctcatgatttctatttcttgttaaaacttgatacttaattttaataaaatagaatatgaatatagaaagaattcataatcatccggttaggatcgatctaatccagcccattatgcatacgattcaacatgccaagtagtaaacaacttattagaaacacaagacagccaatcagaaatgtcaccaaatcccccgctctcgggggatgccctcagcgccgagggacatgtactagggtgtatgtgcgactcgttcagatttcagattgtgggttgggacaaaagaaagaatttttccactatccgtgatcagtaccgatgaataggatagaatggaagactccccttcactattctaattgtttccctcattaattagtttcttttcctgtcaataatatttgaacttataacctgttacagtgagatctaggtagaaattttaggacttgcattggttcttccgttagttttcttttccccaacaatattttaacatctgctacataattccagagacataaatgcatgatagtttggcatactcaacactatccattctgattctcaaagaaaaataaaataaaaaacatcatccagaatggtacttaacatcctttcgtttcaggc

SEQ ID NO: 7057 - DNA, 667 bp, Populus trichocarpa
  Intron number 1 from transcript POPTR_0007s05310.1 (locus POPTR_0007s05310) derived from phytozome v7.0 (chr-ID scaf fold_7; pos 3416624 to 3417290 reverse strand)
gcaggtcaagaccaagatggaaagtttagttactgatatcgtttcaaccattcatggtcaatataaaaagctgtgatattatgtttacatctacatatatgtatttagtttgcagaattccgcttgtattatggccgcatatgaaaggaaaatttcttgatgtaatattttcaaaaagaaaaaacgtcaaagagaaacacttctaggctctagctacatctctgtgtctatactcattaaaaataattattaacaattaaaatcacgcaaaattaaactacttacgatcattattggaaaagaaattctgggttgatgtacaaatattatggtgttattgttaaggaagttttaaaatattctgccttcttcgtttgaattcatactagaagaaccaggtccatttctatgtctgctatttgtcttcaggttccatataatcatgactgcaatcgtgaaaaggttgatgcacccaccgcctaacggtggcagtgtcttgcggcttgcataaagcttttcttgttcgataaattcttcgctttccaggctccagcagggaaattatgagagtttagtagataattcagtgagttgattgtgatctcaagtaaaaaatttgcaacatgtcgcagctctttccaatcacaaaatttcaaccgcatcaggt

SEQ ID NO: 7058 - DNA, 1200 bp, Populus trichocarpa
  Intron number 4 from transcript POPTR_0015s12440.1 (locus POPTR_0015s12440) derived from phytozome v7.0 (chr-ID scaf fold_15; pos 12687409 to 12688608 reverse strand)
gctttggcagttgcggacattgtactgataaacatgtgagttattttattttatgctaagcattatagtgttggatgccttttctgcctgataaatttagtggatgcctggacccctggctgtatttgttggtggctttagactgtcaggctagttagactgctatattgttatcaatatattgcccagtgcctggtcaggagtgacatggttgaaacggctctgcctggttatggtcatcacattctttttttttttaaaatccagaattggtgtgaagtttttttttatatgaatgcatgtgtatagtgcacagccaggattaaatttaactttactttgttccgacttcgtttcaattttcgatcttgttcttttttatgtgcctttaccctgtagtggttaaaaaagtgtgtgaaacaccatggctaacagtgcagtgaactgtttgatattggtagtttactactttaacatgtgttttagtgatttgggcatctctttgcaagctgaacatactattcttttgatgttcctattctttggtataagtgctgggtgggaggggttaaatgtcacagaccaaacagatgaagctggaggtgaaagggatatggccttaacaaaagtgaaaagtgcatactgcatttaaccacctttagctagtgttgaagattaacgcgttttgctgattagattacacacaaaaatagtccagtttgtgccgggcatcggttaggtctaaaatctgggaaaactactttgcttggctccgcagtctgtaggtgttctgagataatctgctcagctgttacctggcttgttgctgatttgtatattacaattcaataatatggtgggattctggtctattaaacatctttctgattctcatttgatgcttgagtgatgaggaaaatttgtccaatttaaatacaagataaccttggacaattgtaatgagttcaatttatcattagggataagtgattatgtcctgcaaaaaaaggaaaaatagatgttgattcagaaatattctttgtaggattaaaatattttcatattttaacagtggatgaattagacactgcaaattagagatgcagctaaagattgacaaggcacaaacatacagttttctgtttattgggatctgctcctaattaagtagatgctgaaatattacttgtaggtggtgcc

SEQ ID NO: 7059 - DNA, 4635 bp, Populus trichocarpa
  Intron number 1 from transcript POPTR_0008s19070.1 (locus POPTR_0008s19070) derived from phytozome v7.0 (chr-ID scaf fold_8; pos 13048772 to 13053406)
tctcttctttggctgctgctggtacttggttgcaggtgcactttgcgtacaaacatcttcttccctttaattcctttagatatattacgttttgtatgagatttgaattcatacgaggtatatacgatataattcaatcaaggagttatgtctttcgttcatgagttagtgatatgttttcatcaatcaaattaaatgcttaggcatgcaaattctgcattctttgaaggtatagaatgaataacgatgagttattaatgttgctgatcatgttctaaaaaatccaattagtttagaaataaggttttcgggttggatgatcagttaatcaattgatcctaacaatctcatccacatccattcttcttaatcaaggtggttgatagcttatacttattgcttggtagaccaaggtggcttgtgactaactaattaatacatgtaaaaggtcacctttggtggaggtagaaactcttcgatgcttaaataaatatctttttagagaaaaaatacaataatattttaaaaagagatattttgaaaatatatatgtagtaaagaatgaaaattgtgaatatttgttctgaagatattgtggtgtatttacagctcacgagttttattcttttatgaagatgagagtttgaaatgtaattttaccctagaaattgatactcgtaaatctttcttgatctgacgtttttatggcaaggatatactaatataaacttcgtttatcagtagccctccagtatttgcgatataataatatgcaaagactttaattaatttccctgttcaggtagagttgtgagttttgctcgtataaaaaagagggtaagacgagaaaaatgtagagaaatatgcatttggactaaaaaaaattctttcatatacaaaagaccaagaatctgttcttagaaaatttttaaaagattgagggtaccatacccatcatctatataaattcttaagtggttatacggaatccaatgaggatgaacctatacttagaaacttctaggtgattataggttcttggtaagtgggagcttgtagctttctcagcattgtcatggggcttaaacgcccttcactaaagagtgatcatcattattattttttatagtacaagagagcccctccccactgaaagtggtgagtacatgatattactatttatactagggagaccaattatgtttacctcttagaaattgatgcatataacactgagaatactacatctatcccttaaagattaatgcatataacactaagaagattatttctatccctttcttaggagatgttttgaggggtcttcagctatcacctagagagaataaatagtcattttgaataggtcattcatatttaagaaacttatatttttattaaggattatacatcatgagatgatctgagtgataggtataagagatattcttaggaggaaacatgtcttggaggtggcattaagattgctttgaataccctgattactttacttggaagatcatttacgttagttgtccttgtaaaaatgaggaggtccatgtcatagcaaactgacctctttaacatgtatgtgatttttcatgaattgcttcactttgaacaagcttctatttggtaaggcataaagtttccttcaaaaagcatgtttccttactcctttaatcaaggcttctaaggctactaacttaatcaattcttgcaacttaaaacatttcctcgttgaatctcctcaaatatacccgtgtggtctcgtcctcttattagataacactaaaaagctttgtagagtttttcttggcggttatgttggtgttaaatcatgtcattagcttgacgcagaggctactgaacccttcaatagagtttggctctatgttgttataccaagcacgtatagatcatctgaaggttatagagaatatcttgcacattgagtcaccatcttggatgatcaattccaagctactatgtatattttgcatatgctcccttggataagccaagccatcatagttgtccaaactcattttcatagaaaagtattcctcagtgagtcgagtgtttgatatgtgtttggattagggagaaatcctctattgatggggggctataaacattcccctaggtatgcgcatccataaattgtctcctagtactttgtcttttgggcttttgggagcccggagagcttggcatagaatgacagttatagtgaccggtgtctatcctataataactagggggagtatgttcgtagtatttattctgtgcatgtgtatgataatgtcgtaaatgatcccttaaggaacttttatgaatgtcattttgtatattctcctttaagtagtgtaatcatctacgggctcctagtgtagttggtggccctagcgttaaggcatgatgtgttgttgtaggtgttaagacttgctagggtggcaaggtctaatttttccctcggattgtcaacacaacttgggtgaggagttgcacctgactagtgagttgttgaagctcttgctgggtaggaatgtccacggcaataagttgatttgccccatgtcctagcctagatggacattggttgtgtgccgcgaaattccctatgaatgctaaaagcaagttttagaaagaaaccgatggctttttttatcaatctttctatagactgtacaactgatgatgtcctaaaaaaatccaagtagccaaggaatagaacttctgggttagataatcggttaatcaatttgtcctagcaatcgtatccattctctttagccaaaatgattggtgtttggtaggtcaaaatggcttatgactagtacctgcaaaaaatcacatttggtggaggtgaggactctccgatgcttaaataagtatctttttagagatagaaaatacaataatattctagagagaaatgatttgaaaatatatatgcaacagagaatgaagattgtgaacctttgttttgaaggtatcatgatgtattttatagcccacaagtcttgtctttttgtgaagataagggtttgaagtgtaattttaccttgataacatttaatgagtgataaatatcccttacatctgtattaatatttgatggaaatatagtgggtccctgcaggatttttatatacctaaaaggtatagagagattagggttcaagatgtcaaatgtagttaagcctatagaagctgagcttttcctctaagttaaacccaaaggagatgggtctttcctttggtgagcctaaaggaggctaggtccatcctttgagtgagttcaaaggaagagggtcatcctcttgggcgtgcccagggagaatggcttggtgattcccttaggagtgacgaaagaggatgatcattcccttaggcgtgtccagagaggatgcttatttttttaggcgtgccaggggaggatgcttatttccttgagcatgtccaaggcttgacacactgccatgcccaatcgtggcttcattgaagcgtgtttgtgttatagaaaatttatacccataaatctttcttgatctaatgttttttttggtaaagatatattgataaaaacttcatcaagtgactctaactttcatagccatgccataacatatctggtccttttttataacagaaatcaactaaacacacaagtatatacttgtgatgtcgatgctagaattttgattcgactgttcttgctttcagcttaagtaactatatataataacaaaccgatgtgaaacaaaaggggagacaacaacaagtaatggttgcgcgaccagtcaattccataagaatatggggatggttgttgtgcaaaacttcttgattcgtagaactctatagtgtgtcaccgcatccatatgggatgcaggaaacatcagaaggtctctgtatctccgaaatcggataccttatgacctgtgtgaaccaatgaaattactcaaactatttgagacaaaaaagggactcacagggaaacggtttctatcagcgttccgtatgaggatatatataatgatgagtattaagtgatgctttaacaaggctttgcaggctcttcataaaacagctaaaggactaggatggggcaaaaattcttgggagtctgtttaatctaacaaaacagatgttgggatcttatgtttataactttgctgacttctttttatgctctagaacaatcaaattcagaattgcagctccctttcatgcataggcattacattctcatactgctaatatcaagaaaatcttcaaatgccacattttgtggcctattttgtagttgttggtgactttcaagatctttcaaatgcgtacatatacggtaacaggtgaaacaatactggtttccaagattatcaagcagatagctataatctggtaagagcataaatttcttgaagaaactgtatgtattggcactcctcataccatatctagctagacagcaaccaattaaaatagcaaaattcgccttacagcgcaagttgcttgaaacatcaattttagatttctgttaattttgctgcctgaaactgaatcttcttattctctaatatatttagtgaatttttcatctatgatttgtccaggttgcatcatatt

SEQ ID NO: 7060 - DNA, 878 bp, Populus trichocarpa
  Intron number 1 from transcript POPTR_0010s23990.1 (locus POPTR_0010s23990) derived from phytozome v7.0 (chr-ID scaf fold_10; pos 20405400 to 20406277 reverse strand)
tgactagtaagtcattttttgtaattgactgcactgcatgctttgcatttcttgttttgtgttttctgatcggcccagatggagaaagtgtagatatgtttgtgtttgagtgtaaatttaagttctttaagttttatattgtgtggacttgttgaattttgagattttggttggtctggatgatgggtttttccttttcttttgttttaagctgaggttgatactgtaaagttcgtttcttttctttggtgtagctctgtgctaagattgtcatatttgtttatgatttttgcatttttaatttgctaaagcttctatttttagttcgtgttttttttttccggtggaagttcttgatgctcttgtgaatttttccaccctctttttgctgattattactaaattactggtcttgaattcaatttttatgatttatagattttccaatttgagagagattcattaataggagttaggaggattctataaaatttaaaggagaattgtagaagataaaagttgtttaatttgccttttttctttcagcttgcataaagtttaaagcttattagttttagagaaaatggaattttcagattcatgattagagaaagaagaaaaaattccgagaagccattgagtgtgtgagtgattcaatcctttgtttttttgtctgtagaaaatagtgttttcaattaatttttgagttagtgtttactaaaagttaatttgtttttcttaccatctattaattgaattgatccatcaggatttattggtagatattatctataaaaccaattgatttggtgtgagttttggcttttgtcccttattcttattgattttttctctcgcagacttgctggggtaaagag

SEQ ID NO: 7061 - DNA, 1144 bp, Populus trichocarpa
  Intron number 1 from transcript POPTR_0004s08060.1 (locus POPTR_0004s08060) derived from phytozome v7.0 (chr-ID scaf fold_4; pos 6581812 to 6582955)
gaggcagtcctttaagagctctccttgttatctctgtaagtgtgtagtttcagcctttttttttgttgctttgcattgattggttgtactctgtactctgtgctttgacttgcttgttcgttactgaattttgagtgagaattgcgagaaataaactttttttagtagaacatactattttgagtttttttttttaataatattatatatgtagttatgtgggactcaccattccaacattaagcgtttaagttgaaaaaagttaaaaaatttcatccattttagagattttatttttaattttctgagtagattttgattttttttttcacgggggaattgatgtggtagcactcttgctgaagatttattgattctatattacattttttttgtggaattttaaagatattggatatattacattttctcgtttttgtggaattttaaagatattggatattacaaaatcagttaaaatcttatgactaatttgtagaaaataaaaattcctgcaacattttttttcctatttaataatttagctgatattgattgtattggacatagacctagtcagcttagtgcaataagtgtcggtaatgagaagaatatttttaagttacttggattggtcgaataagtagtaaggaccacagttctgaattctatttgatcttgatacttttcaatctggtaactagaactgtgcaccacattgtttctgagtgttgatgggattcgactaaccacatggcgttatatgatttagtggagtatgttgtctgtacaagtcaagctctgcctgctcgccttatcactgttgattggaatttggaggaaattaataaagtgagcttttttattagcagaaaagctaattgaggcactggcattatgagtgatgatttcttagtacaaggctgtgatttttcattcctttttcccactttgcgtatttcgtttgtttttttcaagattattgcagttgcatcgtattaagtttgcagtgcagcttattttcttgagtacttaaattttgtattgctgcctttcatattttgtcttcaggacttctcatgattctgtctattttcaaactgttacaggttgggactattgctcttctttccttgacaggagt

SEQ ID NO: 7062 - DNA, 1534 bp, Populus trichocarpa
  Intron number 2 from transcript POPTR_0002s08600.1 (locus POPTR_0002s08600) derived from phytozome v7.0 (chr-ID scaf fold_2; pos 6012669 to 6014202)
acgtacgaggtaaatcatgatgggtatttttcttcaatctcagaagttttaggtggcattttcaattcattcattgcttgtttcccttttttatcaacgagatggaggccattttgttatttgaattggtgttaacatgacgcgttgagctcattaattgaagtaatctctagtggtccttgcttatctcgtgaaatggtagggaatctgggaatgtttcagagagtttggttgttttgaaactctgccccgattatttgagatttgaagtttaccagtcaaaagcattccttattagagcattatttgacaggattcatattttctttcacataaacattgccctaaaagctgaattttggatcccaaagagcaatttagggcctaaagttgtctcaccatgtccatattgtcatcttgtggctattctgaccatcataagctgtttcttgcgtgctttaacatattgccaaagtttggtcgtggtcgtgggtgatgacaatattaatgcttgtcactgcaaaccagattaaacatgattttattacttgccatgctctctcatggatacaggcacttaaatggaatgcacaatcttctggtctccacgtgctacacacacaaggtttttcttcagaaaatttcttcatagttgcttagatgactagtcctcacgctatatatgcttctcaatgctttagtatcaagaacaagttagatatacctatttttttttatggatttttcaaaatttaaattgtgcattgcaaaagctgtattagcaataagggtattttcaatgttatccatgtactttgtgccactgcaaatgatgcatcgacttttacaattgaagatcgagagtatctttaaacatggaaatgtctcttcttaaaacaaaggacactcgatcccagataagacctaggattgatatggtttatttttgcatgaaataatcttggctcccctttatgaaatcaatgttgatttttaactgctttgaattcttttatttgctcctccatcaaaaggtttggtatgggatggtccactgaccagctaaactatgtcatctagacatacaaagggaatggaaccatccatatcaatggtctgttatgttatttattaaatcagcaatagatattcttggttactgtctctttgacattcaaacatcaactgctggagaaatttgtctcgaatttgtgaaggaatggtacttgaattcaatgttatgatctggattaccttgttctctttttcttcatcttaattgatatggtggttaaaagcctgagaatattgattgagaagtctcacttgtagttaaaagccacataattacaggatttgatcatttctgctaacgactattccaatgcaagtgagaagtttagaatgtcatgatttattgctcttggtgatggtattgcttttggctctcaacaagtaaaggttgcattagagaaatctgtctggttacttgtttatatgatagataattgagaaaggacccttgagagattat

SEQ ID NO: 7063 - DNA, 1045 bp, Populus trichocarpa
  Intron number 1 from transcript POPTR_0019s12850.1 (locus POPTR_0019s12850) derived from phytozome v7.0 (chr-ID scaf fold_19; pos 13803439 to 13804483)
gccactccctgattcaccgacaaaccaaacagacggtatgttttctatttcaattctgttgaatgctataataatcgtcattaatgaatggcaatttacttggtgattgtcttactagtacaatgaggaccggccttctgttaatttttgtgattatagtttgaaaaaataggtttaagaaaagttataatttgtagttttttcttaacatagtgatgtagacataagccaaagacaacaattaaacaaaaaacaaaaaaattatttatgggcaaaaagtactacaaatatgaacctcaaatttgtaagtttattctttgtaaataataataataataataaaaaatctgtcttctttgaataaaccaacctctatgcacagtgaaacaagattgctaatccttctactgcaatgttaaacaagaatggagataacaaatcaccttgataaattccacgtgtgaccttgaactctctagtagagagacatgcatatattaaacttctcgatttagcccccaaacccatatatcccataatttcgtcaagataattccaggatacagaatcaaaagctttatggaaatccactttgaagatcataccttgccccttcaagctttgcaaatcatgaaccattttattggctatcattaaaccatcaacaatctaacattcaaaggcagtttaattatcactaataagatcctgcctaacatgtttgagtctactggaaagaatcattgcaagaactttatagagaccatgaatcaaaccaatttgcctatggtctgaaaattcaattggaatcttataaaatcatacaaatgataattgtttcatagccaccatacaaatgataaagcctaatggctaactgagatagttttttttatattcatcataaaaaaattattatcgtcacaaaaatacaggctcgagatttttttttatatagaggcctttaacctgtatatagcgattctctattgtaaatctaaagctatgcatttctcaccctttttaacctaaattatcatagttg

SEQ ID NO: 7064 - DNA, 1003 bp, Populus trichocarpa
  Intron number 1 from transcript POPTR_0008s10140.1 (locus POPTR_0008s10140) derived from phytozome v7.0 (chr-ID scaf fold_8; pos 6364103 to 6365105)
cagtgaactaaactgtatgttgtcgcctgcagttcatatcattttcttttcggttactaactgaaaaaaaaacgttactattgttctctttgacattggaaacccttgaccactctgattctcatttatctttaagaaaagaaaaacaaagagcacactagccctaattatgtgcttgtagatatagaaatttctgaatattttccagtttggttaaatttctgaatattgaaagctacgaagccatcatccaatagcaatctatttgccatggtgttcaccattctattctgccttgtgattctatttcaacgtaatgcttgtgcaagattttcttacagtattactgctttagtctttaacccatggtttagatacaaatgttatgtgggctaacttatgctttaatacatgcctttgatttgggctgtagagtttttctttatggttgaatttcccaatcattctaaagtaaacttttgacttccttgaacgggaacgtgtgaatttttcccctactgtccattttcggcatctgctattcctgttacagctcccatccatgtagtttccttgtatacacatgtttacttgcgaaaggttggtgggcttctgaattttgattctgatatactgtatcttatgctgaaatggttttctgcatcttgccagtgtgtataatgttggctacatgtaacagggttatagttttcaaaacgactttgaatgacgttcatgtattgtccatctattttctttttcctgcttcctctaatttttcagacatccttagtttttttggggcatttgggaaaaaatgatttaatttcaggatttctctcactctctctctatcctttttctcctgtttcattatttgttttatgatcttttcatgtgttgtccatcaaaacaattaaaaatactttaaaaaataactattatgggatcccttcatcctttgaaagtggcctgggattatcagcagattgtagcccgggag

SEQ ID NO: 7065 - DNA, 2406 bp, Populus trichocarpa
  Intron number 2 from transcript POPTR_0496s00195.1 (locus POPTR_0496s00195) derived from phytozome v7.0 (chr-ID scaf fold_496; pos 1420 to 3825)
aacctaaccttgcacaaggtcctctttcaaacaaggtttgacctaatcttcatatttctttatatatgaatttgtatatgttaatttccttggaaatacaccattaactggactcttagtaggattgattggagcttagttcttaacaaggggcataatagaaaagctgaaaaaataaagaatagaattctttgattgtatttgtatttcgggacaaaccaaattggaaaccttgacaatatggtggttagagggagtattaaattaggatgatggtgggaaaagcgatatatcattttcgtatgttgctaaagctctgttctcaacacattggtaccatactgtaaaattgctggtacaaaactgttatttttaaattgcaaaaaattgaaaaacttgagaagaaaataaatatcgaggtctaataacatctatctaaatctaattaattatttatttattctgaacacttctaattttcttgaattttggctctgtgaatttgatgatttgcaatagagatagatgtgtgaaacttttaagaaataaagattcagcagcagcataaaggttgtatgtttctttcttttgttgaatttcacagaagctgtagaaaggtcatctagttttgttgtttatttagctgttcatgttgtcatctttattttgcatgatctgttatttgtagcgcaaaaactctcacgagttgatgatggagaatgaagaaagacctctaggataatacttggtcgcttagtttatatgattattcaaggtttagtagtttttaagagctttgttgtttcttatttcactataagatttaacagttttactgacaaaatttttccgtcggtgtaagacacatattccatcggtaattatattaccgacggaatcgttcgtcggtaatgttttttccgtcggtaaatccgttggtatattattaccgacggatttactgatagaacaaacgtgtcggtaataatattttttattactgacgtatataccgatggaatttccgacggaaattctgtcggtaattatataaaaacatttttttaaaaaattattttataaaattataaaataattaaattaacataaatcaacactctataatatatactcaaaatgcttggaaaaaagaataagaaaatcaactcaaacaaatttgcaacaaataaataaaatgaaaaaataaattcaactaaaaaaattcatatgaaaaaaatgaagttgcaattgctaaaaatttaaaaatttctataaataaatcaactaaaaattgatctcatatgaaaaaaaatatctcacaacaacatttatacaattattaagaacaaaaaaaattaaaaataaaataaaaaacaaatatagtgaaacaaatcatgaaagaagaagaagaaaaaaatcttatcttaatgtagttgcaagtgaagctaaggagagagaaaaaatcataaagcatattaattaaaaaaaaaactaagaagacaaaagaagaaagaagaaaaagacataccccgagcatggagggaaagagaaggagatgaggagagaaaagaagagaaagaaataaatattgatgttttttacatatagtgaagaagaagaagtagtagaagaagaagaataataagaaatgagtttatctcttatgaaataagaggatccagactttttattggggcgcgttagcgacggatttatcgacggataattgaatattaatattttttaattattccgtcggtaatttcaacggtaatatttaatttaaattttcaatttcataaaacgttttcagaaaccgccaacaattaccctaagtcttgtttgtttactgaaaagtaattttttttggaaagtaaattctgaaaaagtgaatttcaaaaaaataaattatttttcgatgtttagtagtgtaatgaaaaataagttggaaaacattttccagtgtttagttatgttatagaaaatgagctggaaaataacttattaatgttttatttttttcaagtttattaaaataatgaggaacaaatccaaaaaattaaaaagttgaataagaatgaaattgaaaaaaaatataatttcataaatcatcaaaaaaatatatagcaatcaaaagtttgaggactagatttgatataatcagcaaataatatgagatttttaattttttcacaactttcgaaaagtgttttccgtccaaaaaaagaaaaatatttttctaaaaaccaagttaaattttcttttaactgtaaaatattttatattaatcaacttttttaatgataaacaaacacaataaaatttaaaaagtaatttttaaaaatttacttttcacgggaaaaaaagaagaaaagataacatgtctgtgataagaatatcctcagg

SEQ ID NO: 7066 - DNA, 1921 bp, Populus trichocarpa
  Intron number 2 from transcript POPTR_0006s21640.1 (locus POPTR_0006s21640) derived from phytozome v7.0 (chr-ID scaf fold_6; pos 20674224 to 20676144)
taaagggaatatcactcaattcactatatttcccggtaaatcgttctccttttcatggtttagaaatttgcatagatgtctttctgattgttttgttactttttttttttggtaattcttgtcattagttacgaatttgcagcttcaaaaggcattgtgaaactttgtattgtgctctgtataacctctggactacagcagtttgcactatttcttaacacttttttgccacaaaatgattgttttatgatcgaggctcgagacaatggaagttgtttctgcccaaatgaggatttataatttagccagtaattaagggtcaaataggatataagagtagcttttcagttttcattcacagtagtggatgtccccccaaaaggctggaagcatgcagtggcaagtttaaggttggaagcatgtttgaatcaaattagataaactagagtgttaagtgatatggtagatcgatccatattattactaagaagggcacttgttggtttgtgggaaatacaaaaatttatgatttcccagaatataaaacaatagttacaatttaactcttgattcaccaaacaatgctaccatacgcaatgtgtagctcacatggcacacacaggttgccacacataacctacacagtgtcactatgcactcacaagacacacaaatatgtctggctgtaactcaacccacacacaacacaacacaatttttttctaaaccacacaaggcactggtgtttttttttttccttttttttaaggaaaaaaacactagacacacttaagagaagaccaagttcttatatttatagaagttgtaaccaataacaagttctaacattaagtaggaaatcatctttaaataggactaacaacaaatactaggtctagtaggacaccaatacctattaggagatcaaatttctaggatataaggattaaagattaatatccacttggttaatttccaacatgatttctgtttagagagtggtagataaggaatagttgtgtgtgaataatgaacattcatactagaatttagccaaaaaaatccacttgagaaagatatattatgagaaaactggaacattcactgctcaaatgtgctgcggccatttagctctgaacggtgcccaaagacttgcattatttttggaggacttttatactgaaatggataaaatcataaaattagttcttatataatttcagagccaacaatgtctattctatgctagatgcttgatgaacttagggataaataaatgtcctaaagaagatttctttctcctatgtatgataaggaataaactgaggcaacatgaaaacatgattgttgctaaactaatcaaacatgtgccagaaaaaacatggactgtgatctgatgtaatcagatccgtttgcatggagaaaacatgtatcacccgttggaagaaatcgtgatcaatgatgattgcatctcgaagtcatttcttggcacgcagatgcagaaagcagcgcggaaatgctgcttcagtcattctggaaaagggtagcttgaaatatgaagtgctcaactggtctgacatgtcttcatctttcatggcccaaaagaccaggtgatatcataagggtgaaatactgcttcctagcatttatattttccagaacctgttcaaagactatcttcttcccatttgatacactgaatagtttatcagagaactagatacacttggttattttgatccatcgttataaaagaaagtatcacatggagttctggtacctagttgatagatcagccattcaagtccaaatttatccaccaattgttttctctaggcactttcaatatgactatttgttaaccatcaaggtaatttctcattcaggtgactgcaaaccttcaggtggtggacagaaatct

SEQ ID NO: 7067 - DNA, 1609 bp, Populus trichocarpa
  Intron number 14 from transcript POPTR_0018s06220.2 (locus POPTR_0018s06220) derived from phytozome v7.0 (chr-ID sca ffold_18; pos 5946572 to 5948180)
catattcacaaagatgtaagtagtccatgctttaaattctgtaacttacaaagcacgctgcatatttgattgaaaatctggtagaattagaaagtcattggcttcatcatgataaatttcattttgagttacttgaggcacaagtggacgtaggaagaaaatgataagaacacatgaaccaggatcaagaaaacaccaccatggtgaagacaagtgttgtgggcttttgcaaactatattactgttaagggatcatccaaaaaaaaagaaataaaagagctatagttgaaggaaaactaaccatttcatgaaaaatgggcaaacgccagcaaaaataactgtttactgctcactcttcaaaaaaatgaattgcttgtaactcgcacgagtagagaaattcccaccatatgttggtgcatattattaacattaaaaaaaaaacctaaaataggccagtctttcactgtaatgctgttaatattcatcctcacacaaatcactattcatagcaatgtttactttgcaaaatttcatcacaggtcctcaagtttttctcttgctccattgtggttcaaagactttattttctttcaattaggtcctcaagagttccttcttggttgctctggttttttttcattctctttgaatttcatgtaatctctttccctggttattgtagattattttggcattgcatggcatgtcgattttacacgggaagttttgaaattattgtaaaaaaacaaaattcaaagaatagggatcaaaattgacattggcataagctgaaagcctttttcattcttattgttaaaaaatgcatgtaaatctacactttgatcgttctattttactttagtctcctaggattttggatttttcatttagatcccaaattttatttgttttgcattatagaccttgagtcttgagagaggagagaaaaaatagtccgaagaatttgaggagatagagcttacttggtgtctatagattaagagaggaacttgtctttaatagagaaacttaatgaaaatagaagaaaaaaaaaggtaggagaacattttcactcaaaaacatgacacatgggcaggaggaagtttccgctacccgtgttggaggaaattattgtcctcgttaaaggtgattgcctgctactttttgtaacactttggcgtttgtatgttgattgaaaaaaaaaataccagtgctgctagcaaccgccaaagatgtcgatgcctatggctcttgagaaaataggaactcctatcacatgactcttatagtttgagcttttttccttcactggtgtgattcatggctaaaaaatggtgaatcctgtctagctaatggtttcttgttcggctggggcattttataaaacagccagcaaagagcatgaaaagttttaccagctacactgaactgtagctggtgctggcagagtctcatgcctgcatcatttatcgaaattagaaggccaataactgcagcaaggaagtgcttcttgcctgagtgtttagcaggtatcaacttgacttttgatctcccgtttactgtgttgttttcagctggtgctagccaatagctgtctcacgtttggaga

SEQ ID NO: 7068 - DNA, 1507 bp, Populus trichocarpa
  Intron number 14 from transcript POPTR_0012s11720.1 (locus POPTR_0012s11720) derived from phytozome v7.0 (chr-ID sca ffold_12; pos 12043612 to 12045118 reverse strand)
tgaaggtatttagactccaaacactgaacatattattttttatttgctttttttcaaaatccaatacagttatcttatatgcataaaaataaaggattcttttcggacttcataatattctaaagcaactcctctttcaattgttttatcattatattcttttcttaattataatgttgaggtactctctggatgctattgttatcaagtatttttaccatctacacatttgactctgtgttaaactgtcaatatttcatttttctcgatggtctaattaaatttcttagatacaggatgctcggcatactcttgtatttctatttgatgaattgtgaaattttatatttctcctcggcatgctcctgttatggaaactagcggcactcaatgggcaagtaatatgactgcagagatagtttaaacctgaagaaaaaacttcataactaactgatatgcatgagttatcaaactcccaaaagagccccgaattagttttattctctcatggacgatataaaatcttgtatccgctctatcactagaatcaatgaaggtatacaggtagtcaacattctcaggatgtgttcctccacctcctcttcttaggtgaccacttgcattttgtactcatgcaaatctcaagctgttacaattttcactctaaaagtgatgttggtggaagctaacagaacaacaatagcataaaaaacataaaaattttaatgagcgaaaaagattgcagaagtaaattctaaattcataattttattctttgaaaattggctgctttctcaataaatttacatgttctttatataggccaggaaaacctatatctaccaggaaacaacctaatttctaaaaacattaaggaaattaaaacaaaatccaaaataataatgataaatctagaaaatcctaggaaaaatcaaaattatcccaaatagtaacttataggcctaattctaaaagattcaacgattcaataaacgatagagtagcttttcataggaaaactgtctatataatcacttcgaaaaatttgaacccgattcaataggtaaatcttttgttatctcaattttaaagtactaacctagtctagcataactagacctcctcttgtgtctaaacttatcttattggtcaataaaaatatatgttagaccagctacatagtgattatattagatccttatctaatagtgtcaagtccttacttgaatgctcagaaccttcggtttgtataacctggctgcatcaagaagattaatggtagtttaatggatacttcattgaacaaagtgattggctgagataaacagaataaaaaagtaaattagtggacaaaatgtaacacagtgactacaactttttaagatgttgctattattgctcatccttctatgattaaaattgtgttcatatgattggtgagcatctttcatctactaactcattttcctagatttggcaagttaccttcaatattgtgctctttcag

SEQ ID NO: 7069 - DNA, 4742 bp, Populus trichocarpa
  Intron number 7 from transcript POPTR_0011s09370.1 (locus POPTR_0011s09370) derived from phytozome v7.0 (chr-ID scaf fold_11; pos 11632712 to 11637453 reverse strand)
tgttttctaggttttggtggggaggcttctggaaggtaatggactacccttttgacattaaacttgtgttataatttggttattgggttaaaagctcaaaattcatgtatgtatcatttcatgagaagtgatttagattgatttgtttgaatcagtgtttgtaaattcctaaggtaggtataggtatgaccattttttttggtaatctatataggtgcatgcattataaatttttgaaatatgcatactctgtattgggtggttctatcaaatccatagttggtaacattttttaaatgaattgtagatgttctaatgttttgtctgctaatatagccatagttcttgtcattggtgaaaaagtttacattttctatggcgctaatgaaggctctagctcttggccttttctttgttgcttgctaactctgtcttgctgcttagtctgaggctttgtaaatttagttaaaggaaaggagaagaatttgtagatcttctacatctataaatgtattctctttaatgccttgtttgtttccaggaaaatgaattcctggaaatcattttccttactttcccatgtttggtgaatataaagaaaattagtcaaaggaaactcaattctggtcaaagaaaaacacaaggcttatgacaggaaagtgttttcctttccttattctaaggaaaacactttcctttctctttattaacaaaacgtgcactgtccaaatcccaaattattctctactctctcacttcttctctctaatcccatcaatggacctcctcaatgtgctaacaccgaccactctttcttcactaacccctatctgctgctcatctttttgatggctttctttgttttctgagctctgatgaaaacagagaacagtatcatccaatctttctttggttgatggcaccaagttgaaagatccgaatttgggtgtgaattcttgagaatagggcagctttttctcctcttggattctctgattgttccttgcttttctttcttgagttcctggcttgaaaaagaagtagcttgtaatggtgggtcttggctggaatcttgatttttggaaggtttttcaatgttgtttttctctgccattattttgggtcatgactcacgaggagagaagacataaagataaagaatttttttttctacagaatatgggatgtaatgaaattacagaaggtcttaattttgttgctgtaattaagatagagtagtatgagttaattttttaaatttatgatattaaataaaaatattttatttaaaaaaattataaaatttaatttttaattaattgtctatacccgtaaaaaaaaacaatctttatccaaaaaatctatcaaaatatttatgtatttatttatcttttaaaaaaatctttataccaaaaaacccaaatatctaactcttacttggttaaaaaaatcttaaaaccataaactaatttaactttcttcatatgaaaaaaaacatattttcagcttttaaaattaaaaaaaaaattaataggttttatttatgaaaaatttcacaaggttaatatctttataatattatatgacatatatagttatattttataaaataagctatatataaatataagatataataaaaaaattcatcattacactttttagattttattcttttattgtaagtgattaaatatttatatttaatatttttcatatatcagataaatttgaaaaaaaatattaatttattaataaaacattttccagttcattttccataatataaccaaacactggaaaatgttttccagttcatttttcactatactaccaaacattggaaaatactttcccggaattcattttcctggaattcactttccccggaattcactttccaaaaggaaactactttcctgcaaacaaacggggcctaaggcgaatccatatgaacatcccctgagtgattgctactcatgtgtaatgtaatcaatgataatagagagctttgaggaaaaacttgctttctcttggtggagaatttccattatatagaaagagtacaagtagtacaaactgatttttagcctttagatgtgcaaaactacaatttacaaaacagtctactggtagcccacaatatcctaattaaaggaaagatttacaacaaagaaattagttttgcaagtttataatctgttggttataaatgtccaactaatagctgtcaatttgaggaaaactttcttctgacatcccccttgaattgatgttggtaaatcataaagcatcaatttgctaacaaggaaatgatggtgctgatgtgtaatggatttggtgaagataccatcaatctgtagagtagtggagatgtgtggaagagtaataatttttcagttaaaggcctctcaaatagagtgacaatcaacctctatatgtttcaggcacttgtgataaacagggttggcattgatttggatggcgttggtgttgtcaatatgtagtggagtagggtgatcatgggagaaaccaagctttgtgaggagaccacgtagccagatgatctcggaacaagcagcaaacatgatgcgatactcaacctcagtggatgacttggagatgcaatcctacttgcatttccatgagtgacgcggtgtataacgtgcatcaaaactagggttcctcaaccccaaatattttacagtccaaaactatagagaaaaacactagggttcctcaagccctaaaggtacaacctttaattgtagagaaaactctgaaaggtttattttactaatcttcattaaaaaccacttattacagttcttaaaggttgcttatataccaataaaaagtcctaaacaatactggaaaaataataaatgagtcttaatctaaccaggaaaaagaatcctaaatcaattaggaaaaaaaacaattccgtacaaatttttttgtccttttggcgctgcatataatatagataaaaaccaaggttccttaatccctaaaatcttacagaccaaaactgtagaggaagaaactagggtttctcaagccggtcaccacccttaattgtggataaaactttgaaaggtttaacttattaatcttcaataaaaaccacttattacgactcttctaggttgcttatatattagtaaaatgccctaaataaagctggaaaaataataaaagagttctaatctaattagaaaaaagaatcctaaatcaattacgaaaataaagacaatttcgcatgataatttccgtcctttatttggagaccttctcaatttctaatcatcatgaaaatttaattcaataaaaaacagggccttcagaatattctgtcaaaattttagctcaatccaatggtcatatcaaaagttctattcgatttaccaaaccatgtcttggacttttttcaaacccatcaaaacctagaaaacgttagcaattaaggaaatatttcaataaactagcaattccaagaaacaaacaccatccagtagtggatttcctagtttttgggtaacctgcccaatcaacatcatagtaggcttgtaactggggtgaagaactagtagggaagaataagtcatgactaggtgtgccaaatatgtatcgaataatgcggcggacaccatctagattgtttgtgagttgtgctaactaaacccaatcctcaatatacttgttctgattcaagacaataccttgaggctgatgatgcactgctaactccaagaaataggtgagttgcccaaggtctttcacgtggaaagtagtattcaacaatttccaaatctctgagatggttgttatataagaactagtgacaataatgtcgttcatataaacaaggaggatgactatctcgttaggtgtcttctgtagaaatagagaggagtcatactgattctgaatgaatgaaaagccaaggatagtggtttgaaatttctcaaatcatgttcttggtgcttgtttcaaaccatatagagaacggtttagttggcacacattagtagctggtgaagtggatataccagagggaagtttcatgtaaacttcctagaattgagaagcggcaagggctctaattgtatggccttgaaatttctcaaggccatacttttgcttgttgccaagaaccactaattgagccttgtaacaatctacgaagccatctgaacaaagcttaatagaaaacacccatttactcccaatgggtttcacggatgggggacatggaacaacattccaggtgcggttgtcgtcaagtactagaatttctgtttcaaagtgtgaacttcaaatggtcatacttgatttgatgcttgtgtcgtaatagccttgcttgaaacgtgaaccattaacttcaaattgtgtgctgtcaaagctcttgtttgattcttgcattcttcaatgaaaatttgaacttttactagcttaaaagtttttattttgtttttcattctaccttgagaagagcatctgtcatttacatgatcaacttaaacatgaatgttttgtgtttttccttgttgggtatcattttgtgaaatatgcaagaacacaaagttcaagtgtgatggtaaagtgaatatttttttgtatgatgttaaaatttaccgtttattttagtttttacaaataggacttgatgatgtttcccaatttgttgggccgacatagttgacatatttgttcatctattgatcacttgtagattggca

SEQ ID NO: 7070 - DNA, 3311 bp, Populus trichocarpa
  Intron number 13 from transcript POPTR_0008s16760.1 (locus POPTR_0008s16760) derived from phytozome v7.0 (chr-ID sca ffold_8; pos 11285611 to 11288921)
aaaatctaagaggccttcgatcaagtcactttttggtaagttttgttatcagttttagtaaaatactaattgtttgactagcgctctgtcgtaagccaaatatttttataaaaaaaatatatatgcatgcttttcttatgtatttttgtacataaaaaaaaatgtgtaaattaaaaaacttatatacatgtaattaaataaatcgagaattatgtgtgttaataataataaaaaagtcattaacgataattaaaaataaattagaaaaatcgatagacaaatataaatcaggatatttaatctcgtaagataggacatatattcgattgtgtttactgaatttgtttattaaaattatttttttattcaatcaaacgataatagaaatagacacatatattaaattgattaaataacataaaaaggaaaaaaaatatatcatgcaaggctgcataaatcaaaataaacattttttattttcaagaataaatctatacaaaagatgaaaagaaaaattatagataaatcatcctagtttttcaaaaattaaatacaaagttaaaaaaattctattcaaaaaaggataaataagcaaaaaagaaaacaattccacagaggagagatattaattgaaacataaatttaaaaattattttaaaaaaatatattaaaaaaagatatcaattaaaaaaaaatcaatattagaaaaaataataatagcgcgggtgttgtggcttaactcgtcaaacctttgatccgagtaattgatttaacaaggtttaataatttttccccttaaatttatatatataaagagcccaacacgcctgggccactgtaatgaaaagcctaggcgtgtaggtgggccttcaagcctgtgggcctaggcttggttttattttttaaaaacaatttaaagggcggaagcacttattttttttgaaaaaaataagctggcaacacgtcgcctgctaagacagacgacgtgtagtctgcaagcctagattccggttaccactacggtggtcgaaaaatcagggcagtgtctcttttgcccaaaaaacctaatttgcaagccatttcaacccaaaaacatcttaccaacacccttagaacacctcatcaacacccttagaacacctcatcaacacccttagaacacctcatcaacacccttagaacacctcatcaacacccttagaacacctacaaaccaatctatcacctcaaaataccaaaaaaaaaaatatcaaaaaactcgaaatcaaatcaggttagttttggcgtccttggctttgatttgttttttcaaacaacattaagactctaaacaaccaccatcaagcccttcttatctcatgaaactcatgaacaccaagaaaaatcattcggtggccgaaaatggcgtgagcgacaactctctcccatcatcggaatccggcgagccccctctctctaattaggaattgaaaaataatacaaataaacttttgtgccgaaaatgaatttttgaaatataaggggatctaaattgtataaattgtgttatttttaaattttgaggatctaagtgtatttttcatgaaatatcatgcacactatccatgtttgatgtctttttcattttagtgccttttcttccggctccagcatttcctaagaaatcaaaatcaattgtccttctattaggatcaaatcgcccgaaataaaactttgatgaccaaatgaattattaaaaaataaacagaagtccactatgttttgtgagtgtgaacagtgtccatctatagtcttttattgtttcctataatatttttttagaatggttgggataatatgataaaaagtagccaaaaacaaattttaaaatatgcattgagattacaaactcacaaaactgtgatcttactcttttgaaacaatgttatttgtactctttgctactttgtagtttttctcagttttctaaggtccgataaatctaattttgaagttaccttgttttttttttaaaaatgaaaattctgtttttaaccgagggaaagggctgagaggagtgaggagctaccaccctgttgggcgcccatgttaagagaatgagaagttatggagggtaatatttcatcccccttttgggttgaagtactgccttccaagcatggaaattagtgtccctcctcaatagtggtcttgttccctctcatgtttcgtttcatcattttcttaatcaaatcaggtctcattaatattatttataaacctattaatagttatcagaattggctggctcaactggtgaaccagattttacacctgtcttgttggagtgtagggactaattgtgcaatcaatatggtaagaaccaccttgaattgggctgaactgactaagaactggcctgaatcagattgaaccggccaagaattgggttgaactgactcaaggcctaccacgtgtccctcgataaaaaatctgaaaaaatgttcttccaggtattaaaccagtgaaatgccagttgaatcagtgaaccaatgaattgacacctttgttggttcaagctccggtctgattttgataataatgggacccactattatgctctatttacaccttctatgcatcattcactaccaaacaccacaaacactttcatcgtcgacactttttatgccctcggcacttgactctcaaaatctaaccctttgccatacccatcttcaaatttatcatatcatacaacgaaaacctaaaaatgttttatgcttatggtgatatttctttctggtttattaactgacagatcaagctatcatttatttatgcaagtgctcaaatttggttagggcctaatagctggtattgcttgaagttattggcgatgtatttagctttctttgaaataagcaagtgcaaaatctttgtttgagttgtttcagaatttcattcacatcatcaacacactttttatagttatttctttcaaaactgtgtgtagtctgtagatgatgcaagttaaacactatcatgctcttagaaccattatgtatattttcacttcaaaatacagcaaaaaaacatcatcaacacacttctttttttatagttatttctttcaaaactgtatgtagtctgtagatgatgcaagttaaacactatcatgctcttagaaccattatgtatattttcacttcataatacagcaaaaaaagtggagcattgtaatagcttgatattgtattgaccatcaatcaggttgcatttctttttttctttccttgttcttattgcggtggttcatattatttcagaag

SEQ ID NO: 7071 - DNA, 1991 bp, Populus trichocarpa
  Intron number 4 from transcript POPTR_0086s00270.1 (locus POPTR_0086s00270) derived from phytozome v7.0 (chr-ID scaf fold_86; pos 56816 to 58806)
gccactccctgattcaccgacaaaccaaacagacggtatgttttctatttcaattctgttgaatgctataataatcgtcattaatgaattgctagactactggattgaaggatttttacgttttgatccctcgggctagggcctaaataatggcaaattacttggtgattgtcttactagtacaacaagggctggccttgtcttttcctttcttcgtttttttgaaagaggtttcctctgatttggtgttgtagatgttttcgcgattatagtttgaaatttttttttttaaagaagttataatatgcagttttttcttaactaaatgatgtagacggaagttgaaaacaacaactaaacaaagaacataaaatttatttatgggcaaaaggggttatatatataaaccttaaattcacaagtttattctctgaaaataattctaataaagtttgtttttttagtaagtttataagtcttaaatagattagaaagcttaccctatcaaggaaacaaaaattccaaaattataaaggaaagaagcatcaatttcaaaaatagcatgaaatccaaaaaaaataagaaaaatcataaaactgataaaacaagggtcatggggcgagatttgcaaaatctaaaaatttgactatccacatagcaacacagagacaacttcaaaggaaaaaaaacctttggaatctcttgtaaaaatttaaccgcgattcaatgaccagattaaaaattatggtcattttgagctgttattctggtctgatgctatcagatctcttcttggacctagacctatctcaatagtctataaatgcatcttctaaaccatccacataatctatctagggtatatcctcatttaactatgacagacctacacataactgctcaaatcacttgttattgtaggtctaataacatcatttagtttttaagagagtttttagtggggtctatataaaactatgatatgtgttgattaactaaatactttcaaatctatgattgaaacaaaacatagaacgcactacaccataccataaaaataaaaggagcctaaaactattaatgttattaaagaataccaaccactaatgttaattgactaccatattaaagttcatatgatttgatctaagacctttttgtttccaaatgctgtggggtttgattctccaaagattttcaatctaaattctctatcttccaaaaaaacaaatcttgaacattttatgcttattctttattaagattgtatagtgatttattggatatcatcgaataatttaaatttctaaagtggtttttgatatggcatgaaagtttcaatgatcaatggttgattttgaatataattattttgattcttctaattaaattaaaaataaattagcacataataactttgcaaattttaagaaagactttctatgttatagaacaattttttttataataatccataaatttattaaaaaacattctagccatttagtggatggctatcatgaaaagttaaagtcttacataagaaatacataaaaataaaagatctaggaacaaaatagtgtctgacttcaacaaaaacattcggccacctcttttagagtttgtccaatgataaagacaatttaattatagccactaagatcctagatagcatgttggagtttgttgaaaagaatatttgcacgaactttatagataccatgaatctaaccaattagcctatagtctgaaatttcaattgaaatcttataaaatcatacaaatgataattgtttgatagccaccatacaaatgataaagcctaatggctaatagagatagttttatatatatatatatatattcatcataaaaaggcgggctcgagatttttttggatatataggcctttacccagtatatagcgattctctcttataaatctaaagctatgcacttctcatcctttttaacctaaattatcatagttg

SEQ ID NO: 7072 - DNA, 1460 bp, Populus trichocarpa
  Intron number 5 from transcript POPTR_0001s27060.1 (locus POPTR_0001s27060) derived from phytozome v7.0 (chr-ID scaf fold_1; pos 25993622 to 25995081 reverse strand)
gcaaaatcttggacaaccgtctcaaactcaacaaggtaattacaacagacaagaaagaaagaagtggaaaaaccttttgatttctattttatttttttgttgtttctgatttgttctgttttagatttgtttatcgcttttatgcaattattaaggcaacggggcacagttaattcttaatagagtgaaaacatagaagaaggaacagcaaaaaagaaaaaaaaatcggaaactgtgctctgttctgtatgcatgcagatgcaaagctatcttgttgctgttaagattgatcgaccaacttctggagcttgcagataatgacgttttaagccttttattaaatattctgttcatactaccattttgccaagaatccaaccattttattttctgggttctattatttttccaatatttcaacagtggtaaagttttaaatattttcccctcatatcattatcacattggagctacgaaaggaatatttttgctgggcttttattgaaatgttcaccacctttcatggaaatggactctgtcgattagcatccactgttagtattatattatattttacataatttcagtccgtggaaaagctgaaaggaaaccaagtcactagcaatccagccagacctagaaatttccagtctttgaccctttgctaaatcccgatgatgaaaacaaaccaaactatcagtgaactttttgagtgaggacccctacatagagccattaaaaactgacccaccaacatgcttcgtttttcaatcatatagccattgattggcaaaaggttcctcgtcatctttcaatcagtaaagtgctttttaccgcttttgaatctgtaggtccatgaacaccaagttgctctaacactgacaagaattagaccactacggttaggaggttgagatgtcatatcaactcaaagaacatgagattagctaggcctgtcaatttcttcatttatgtttcctgtattctgttacctaaagcaaaatagaaggggagaaaaaaaaaagattgcctagtatgctctaaaaagtcagagctcagaacctaatgaaaccttagggtgattgaacagtgagctagcactacaatatactttaatgttggttttttttttttttaatagatacatcaattagattcttcttcgactctgttccatctccatctcttgctttgacttcacagaatctgatcatttgagttgtaataattgttgatttgcttggattctgctagtagtactattcatttttaccatctcatatttgagagctttaaaaataaattttaaaaaataaaaaaaatactttaaaaaattaccattaaaattcttataatcttattgcctcttactatttttgttttttttttaatgtatgatgattttgtggcacgtatttggggcaggttgtcagggaattacagcactcgagaaacggcgt

SEQ ID NO: 7073 - DNA, 1348 bp, Populus trichocarpa
  Intron number 1 from transcript POPTR_0007s01970.1 (locus POPTR_0007s01970) derived from phytozome v7.0 (chr-ID scaf fold_7; pos 1119083 to 1120430)
gtcgaatcacttgctttttactttgtaataattttatgagaaatttcaatgtctgttaattatttgctgtagttgttgaggatgtaattaggaaattaggcaattattttttttggggttaaattatcagcgtgctttttcttaacttaatttctgttaattacatgcctaattttttcttaacttgatttctgttaattacatgcctaattttgacgcagcgtataacaaaagaaagaaacaagccctcaaattatagctctaaactgtagagataactctggttttataaactgtaaataattcctaactctaaataacatacaaaactgattaaataggagctaaaaccgacctagttaatgtaacataaaccaaataaaattctgaaacctaagaaaggaatacaaaaataattaggaaaataatgagaattctgaaacatcttttgggcctaatttcgtcgtgatcttgatctcggcttgccctagctggccaatcctatagggaaacaggcttgtagaacgcgctcgcaatatttcagttagattcaattgctgtattaaaagttatgtctgtttttgttagagatcttgtttgactcgtcctcacttcttcttgggattggacatttgatacacgtcccgcgtcaattttgtagtgttgttgtggagattatttgtgtgttttatgaatatttggtgtgctaattgatatgagttctttaggaagaaagtttgaaataattactagttttgtttgtgtgagggaagttcattttggtagaatctgtttcattcttgaagaagttatcatattttttgttagtatgcttagaaaatgctttccaagatttttgaacttatccatgtgttttatatgccaaatttgtagtgttgttattattcaaaattatcagtgtgttttatggattcttggtatgctgattgctatgagctcttcaaggagaaactttgaagtaatcactagtttttgttaaataatgaattttggaattgatttgattgattgtggttcattctcgaagaagctatcatttttttttaatatgttaaaaaatgttgtgttactttcaaccttatctgtgtgttttaaatgtacttgaggaggaggttgtgaaaattagacaagttttagaattgttttgcttgttatgctagtggctatgagggtttgattttttttttctcttttcccagacaagttttgagttccacttttcttttgagattagttaaaatgtatttgcttgtaataagtacattgaaaactgatgtttgacatatttgcagaggaagggtttgaatttggtatcatcaggcacaag

SEQ ID NO: 7074 - DNA, 553 bp, Populus trichocarpa
  Intron number 1 from transcript POPTR_0009s15390.1 (locus POPTR_0009s15390) derived from phytozome v7.0 (chr-ID scaf fold_9; pos 11917288 to 11917840 reverse strand)
ctgttttgtctaccaggttttgctcttcatcttgagagctgttctttttggttgcctgtttttggaatgaagctttaatggatgatttctgtataggacttctaacatggttatttaaggtgtaggccttgtagatgtaatgattctaaaaaaatccgaaataatcacaaactcattttgttacagcaaattaacctactatagaagtgggcaggtaaaatgtgcttatataatttcagctaatcaaattaaaaattagatttgtttctgacagaaagctcgttaggctcgtacatgcgtttcccccgtgattttatgatttgccattctatacaagaactgagccaattctcttattttaaatcttgacattcccttgagtagcacttagcagtgctattctgatctctagagcccttaatttgttgcaagaaatgggttctttctccaacatatatatacactgatccaaaactctacaagagaatgtcaggaaatacttgtaattaatgttccagcaagccgaagcataattgccataggccggccttct

SEQ ID NO: 7075 - DNA, 1218 bp, Populus trichocarpa
  Intron number 8 from transcript POPTR_0011s04620.1 (locus POPTR_0011s04620) derived from phytozome v7.0 (chr-ID scaf fold_11; pos 4576252 to 4577469)
cagtgtatgtggtttcttttcttgtgctatttctgcttgacttatttctatgttctcttattttttctgtatctttactggatttgtttccttttgttaacttcatcagtacatttatattgtggatgcatattgcacaaataactctatgcgcatattaaaacacatttatcataattttccctttctgcatcctgttttgttcgtttaaacatcagctagttcaatcagtgaagggatctggaacatgattttaagatattggattcagttgcaattgctttgttttggatttcctgaaaaaagatggtcttgaagctgcatatctgttacttacatgtataataaacaggatcttagaattcaagcattaataatagagatgttcgatttggtgtttgatgtctttgattcagaaggcttcttgtactggctgaagtctgcaggagttcgcagattttgaggggaaaagttcctttcatagtggctagacctacatatcatacccaccatacctaattaatcccctcctcaaaataaggcgattgctttgtctcaaagtgctcaatagctctgtctagaactttcacagttatacatagaatagtttccaaatccttggaagcctctaggatactttttggtatttccaacaggagtattgtttggctaggagtataatttcttcttttatataatagtaatgctgatatgtttgttaggaaagcaaacattacttgaaaaaatgcactaggcttgctgaaaagcaactaagaatcatggttgtcactgcatggcattcagaacctggtatttcaagagattgtttagataaaatagcccagctgcaatataacatagcaaaaatgataaagtaacagctatttctacttcaaaaactagttatatgaggtacattttggtgcaacatcattataggagcttctaatcaaagcttgagcgcacaatgcagcctccccccctgcctgtacaaattgttggacagggttgctgctgctaatattttctttataatgttgtgcattaattctgctttattttatattccggttttcttttattatttgttaaactgtttttccatctagcaactagtttgggactgaggtatggtagttgtatttgttaaacttcttggtcaattttttttttttgtttctgacatctttgctgatttcatacaggatccacctgaag

SEQ ID NO: 7076 - DNA, 1528 bp, Populus trichocarpa
  Intron number 4 from transcript POPTR_0005s13780.1 (locus POPTR_0005s13780) derived from phytozome v7.0 (chr-ID scaf fold_5; pos 10778337 to 10779864)
tgttagctagacagactggtttatcgagaaatcaggttagcccccccccccccctctctttctctacgtatacacctttttttatctcttcctcagcaaaacagtaaatatacctgatgagaaagaacgagggaaagagagtgtttcagggtagggtactgtcatgtaacatgaaaatgggattctattctagagaggaaaaaaaagaaagaaaaaacaagaagggaccatgagtgagttgagtagatttgtttgcatggtttagggtttactttctctggtgcacctctttctttctttttttaatttgtgttttccatatattttaaatttattgatttctttggattcttttataagtcgagtcgagggacatagattctgaaatggacattatcagtgaagaaactctagggagatactattatttaagagcagagacacaagtacacaagagatgagacatgagagtttgcatctttaattctctttctatgtctctctctctctacaaatgacaccgcatattatccaacccacgcgaagaagaaccattaaagacagtgaacaaaattcatgtatacttgtcggaatttttacttgcatgttattctttaccacctgcaagtgggtttttaaccttcttactgttttcttgtctatcacgtatttattgcaactgcatctccttgtttctcttgtgattaaaccctataattttatttcttttttctatttaatctgttttcctctcaaaatttaaggtaaagatgggtttccaacttgactcttcttctttcggattttttttttctttccttgtcttgcgtgaaattaaagaatatgttactgaacttttagcgagaagttccgaaaaaatatatatatttctatagaatattatttatgttattatttttttaaagtatttttatttggaaataaattaaaataatatttttttaaaaaaaattaatataaatatattaaaacgatttaaaatcataaaaaaattaatttaaaacaataaaaaaaaattttaaataaacttctaatgcaaaaacaaactcattctaaatttaccatcatgtatagtttattatcaagtgtactgtaatttcttataattgtttttgccgttaggtacctgttatattatttgcatgaaaagcaaaatcccaaaggtgcccttggaaagagaatagaaataaacacatatttagatgcttttattgtaaggtattcttgaattaatcatggcaatcgacgctgtcaagtgaattccactactaatgtctgttataataatattactgtgttttatagcttttattattttattttttataattatctcgaaaggatatcccaattagcaactaagatttgcttgcatcatatatatatatatgaccttgtaactataatctttcgttaatcatattgtacgtggttaattaaattaaatgaaggtttataatccatactactactctatgcgctgtttaggtgtcaaactggttcatta

SEQ ID NO: 7077 - DNA, 2188 bp, Populus trichocarpa
  Intron number 53 from transcript POPTR_0003s03360.1 (locus POPTR_0003s03360) derived from phytozome v7.0 (chr-ID sca ffold_3; pos 3726075 to 3728262 reverse strand)
tgagagagtattctgagaaagaggcttctggtcaggtacagtttctattgcttatatttaaagctgttgtgagagagttttttatctttagccaagtagaatgaaaggttatagatcaaggaaaataaatttatcagacgttataaattttaaaattgttaggtttcactttcataagcctttgacaagtttaaagtgatttaaaatatttgacacggtttggaatatttgataaggtgacgattcttgtgtatgctagaatgaaatgggtggatgggtggattcaatattacttggtattacttatcaatgaaaacatgttagaatgaaaagataaggggtggtggaggattttgttattcaccatttaagtaaattgataacctctgcatgatgatattggccaggtgtctcagattaaaaataaataaatttgaatctttcaaagatataaaatttattatgcttttagtaaattttaccttttgcattagctatggaacacgacttgaaaactatcatattcttatgcttactatcaatacaattaaaaacttggggtggaaacactgttcatatgaacaatgaatagccccaactcttctttttttcattccaagtttttttttttttaattgggtccttttgcttcccatttaataaacctcaaatattttttttcacctgcatcttttttttttctttatcttttgggtcctattgctttgcatttaaaaattgttatacagtttcacaaaattaatgtttggtagaccatgaaatggtgtttaaaataataaacaaacaaggcaatacgagatggaagaaatattttttgatgaaaatacaacaaagaagaatgacaatccactatcggttgcaatagttacccacattaagtcaagacttttttttttatttaattttttgtcgcttgacttttttttattcccaatttaatctttcaatattaagttgacttgaaattgagtttgatgttttttttttttttggttagcttgctctctggttgccaggcctttgagatcatgagcacttttgatgtttatataatgctcaatttagcaaaataaaatttaattttattgattcaaactaataaaacttttgagacccattacaaactgaaagaaatattctgtgccttttgttttttcaagaaataacatttttatcttagcttattgtgagtcgaggcttttaggtcgataatcaacaaatttgttatcatttattagcatttataattctcgatttattttattgaatgcatgtacaaactcagtttgcagtaaaaattttcttaatggtaaaaaacttcaatgccagcactctttttgcattgagaaaaaatgctctatcccacagcgtagcacagggaatcaaactagtcttttttattgcaaagttaagtggtaacctatatgtaaatgttaagttaagtggtaacctatatgtaaatgtttttggaatttgtcgttgtactcgatcttcctttcctttttctatgtttgcgcattgtctgactatctttgtactgaaaaacagattattttacccaaatataatgaagatatggagtgaaaaagtatcatctttactggtacttcaatgatcaacactcacaagataaaacattttagcacaaaattagatttccacttggagaccgcatatcattctaatttagcccacctgttcattatagtagaagtgttacacatgttgtgcttatttctgtatgcagttcacatgatctaccagtctagaatttgaatatagtaaacatgagcgcgtctcaacaaggtcacaattgtcatggccaccataaattactgttcactgggcggaccgtctcttgaaagaattgagaggaatttaatggtggccaggaacatgcatgttcatgtgtgagcgagggagatccaaaatataaccttttctcccattgccagattgaaaaaataggaggtagaacttttcatccaattgatggaattaaagtcctgcatgaagcttattgagaggatggtcagaactcgtaattaaatgtctataaattaaatctgaagtgtcctagtcctagttcttggattatctaatgaggaaaacttgctaacacaattcttgatgatatgtttcttaactttcttattttggttcccag

SEQ ID NO: 7078 - DNA, 867 bp, Populus trichocarpa
  Intron number 6 from transcript POPTR_0001s38700.2 (locus POPTR_0001s38700) derived from phytozome v7.0 (chr-ID scaf fold_1; pos 37876244 to 37877110)
ataagctcaaggtatgagaatcctgtaattctatttattccttttattggttactttctggatatatgagaaaaatatgaatgatacagaatatagttggtgtaatcatttaaggaaattatgagaaaacgaatcaaatgtggttgtaaactttcacatgcattctttaccctaggcaatttccccatcggtataatttcaaaatataaatggttatagaacacatgttttacttcttccagagaaaaggaatgattaatctcaaagctaaattcactgtctttgtacttttatttgcaaatatgactattgttcccctttaattattgttgctgcggaggctttgccctttgattgcgtttatcacttagaaaatataatgacggagctttggatgcattgaatttggaaagaaatatgtagatgctctttgtaggaatgagctagtgtgtatgctttagagtttacctatagaaaaactgaaatattcaattaattagctccaaacttcaagaatctatccctcctactgaaatcaacttttcttggatttagtttttaggtgtttggcagtgtggtagtggttgcttttcaaatagcttttcgtgccgaaatacatgccaatgatgtttttttattttttaaaaatcatttttgacatcagcacatcaaaatgatccaaaaagtacaaaccgcactcaattttagcaaaaaaaaaaaatttgaaattcggtcaaaagcaggttcaaccgcagagccaaacagggatgcgaaggtgtatgtattaaatcttgtgcttttggctcactggtcctgaattttgatcatatagccgtagctgaacctacaactgcaaagacacatagc

SEQ ID NO: 7079 - DNA, 1492 bp, Populus trichocarpa
  Intron number 14 from transcript POPTR_0012s11750.1 (locus POPTR_0012s11750) derived from phytozome v7.0 (chr-ID sca ffold_12; pos 12076408 to 12077899 reverse strand)
tgaaggtatatagactccaaacactgaacatattattttttattttttatttgcttttttaaaaatccaatacagttatcttatatgcataaaactaaaggattcttttcggacttcataatattctaaagcaactcctctttcaattgttttatcattatattcttttcttaattataatgttgaggtactctctggatgctattgttatcaagtatttttaccatcaacacagttaaactgtcaatatttcatttgtctcgatggtctgattaaatttcttagatacaggatgctcggcatgctcttgtatttctgtttgatgaattgtgaaattttatatttctcctcggcattctcctgtaatggaaactagcggcactcaatgggcaagtaatatgactgcagagatagtttaaacctgaagaaaaaacttcatatctaactgatatgcatgagttatcatactcccaaaagagcgccgaattagttttattctctcatggacgatataaatcttgtatcccctctatcactagaatcaatgaaggtatacatgtagtcaacattctcaggatgtgttcctccacctcctcttcttaggtgactacttgcattttgtactcgtgcaaatctcaagctgttacaattttcactctaaaagtgatgttggcggaagctaacagaacaacaatagcatagaaaacacaaaaattttaatgagtgaaaaaactcgcagaaataaattctaaattcataattttattttttaaaaattggctgttttctcaataaatttacatgtcctttatataagccaggaaaacctatatctacgaggaaacaacctaatttctaaaaacatttaggaaattaaaataaaatccaaaataataatgataaatctagaaaatcctaggaaaaataaaaaattattccaaatagtaacttataggcctaattctgaaagattcaacgattcaataagcgataaagtagcttttcataggaaaactgtctatataaacacttcgaaaaatttgaacccgattcaataggtaaatcttctattatctcaattttaaagtactaacctagtctagcataactagacctcctcttatgtctaaacttgtctcattgattcataaaaatatatgtgagaccagctacatagtgactgtattagatccccatctaatagtgtcgagtccttacttgaatgctcataaccttcggtttgtataacccggctgcatcaagaagattaatgctagtttaatggatacttcattgaacaaagtgataaacagaataaaaaagtaacttagtggacaaaatgtaacacagtgactacaactttttaaaatgttgctattattgctcatccttctatgattaaaattgtgttcatatgattggtgagcatctttcatctactaactcattttcctagatttggcaagttaccttcaatattgtgctctttcag

SEQ ID NO: 7080 - DNA, 1916 bp, Populus trichocarpa
  Intron number 4 from transcript POPTR_0011s07780.1 (locus POPTR_0011s07780) derived from phytozome v7.0 (chr-ID scaf fold_11; pos 8659632 to 8661547)
aagtcgtgaagcgattgaattactctataccacccgtattcttcgagtttgatgggcagtatggtgatatgattcaaggtgtcttcaacaaggtaacgactctttaactgtgcttttttatttctattaaaaaataatataaattatattatgatatattatctaaaagtttaaaatttttaattaaattaatttttaatataatattagagttttaatgatgaaacagtaatgagttttaatcttgttatttttatttatttgataaaaattaaatataagatattatggatatatataagtttcaaattcaaaatttttttactgaaaagatatattatttaaaaaaattcaaaattttaaattgaattaattattttataatatcaaatacacaatcttcttcgtgcaagaaaccccaattgttcgataaccaaaacgtccaaacgtgatcttctctaattttcagtatgaacgcatgcatatcaatacagccttgtaaaataactagtcaatgccacgctattgccagtagacgctattaattaaagataaaaaaaaaaactttattcataagatttaattatggtttctatcacacacatttaagtaatacgagcccattctgatcagaaatccatatgttattctaatattttaattggaattgtttctgatttattattatatattatagatagaatataagtatcatctatcaattgtaatttgccgactataaattcttatccgaataaaagagatgacacagtcaaaattggctgcaactcaaaaccaagaataaatttatatagaattagtttatttacaggaaagtttttttttttttaagtaaatttaagagaaaataaatttttgaaaagtaaattattttatgatatttggtagtgttatgaaaaataaactggaaagtgttttccagtgtttggttatgttatggaaaattaactgaaaaataatttattaatgaattaattttttttcaagtttatataatatatataaaatatttaatataatatttaatcacttacaataaaaaaataaaatctaaaaagtataatgatgaatttttttattatattctatattcatcatatatagcttattttataaaatataactatatatgtcatataatattatagagatataaccttatgaaatttttcataaataaaacctattaatattttttttttcaattttaaaagcttaaaatatgttttttttcatatgaataaaattttcactattctatttgttattaccaaagcactaggaaataaaaaaaatgaaaaaacaaggaaaatgaaatgccaataagaaaaaggctaaagaaaaatagaaaaaataaaagaaacaaagcagtcgttataataataataaaaaggaacgaaaactgaatctcccacacacaacagggggcaaaatagagtttttctattcataaaaaaaaaaaaataataaagcatgtgttttggcaagtgtagatgaggtgcatgtggtcttgtcattggtcacaagagaaggagacaacacacgtgtttttttggtaagtaaaggaaattgtttttcttataataaaaaaagaaaagtgtttttctgccacaaaacatgtctgtttttattgatcagaattaacttttctttgattagatttttggatggttatcaaatatagaaaactaaagaaaatagtttctagaaaaattttcgaaaacaaacaaggcatattttgataagaaattgaaatttgacgagtccattgaggcccactgaggagttgtatgattttgccattattttgctcctgtctcgttctatcagctgttttttcaacattatttttgtgctgagtgccattgtttgacttttgtgccacttgttaatcg

SEQ ID NO: 7081 - DNA, 593 bp, Populus trichocarpa
  Intron number 1 from transcript POPTR_0001s19190.1 (locus POPTR_0001s19190) derived from phytozome v7.0 (chr-ID scaf fold_1; pos 16654896 to 16655488 reverse strand)
acaggtctgcaatttcacgccttagagctctcaaggtcagttgtttgaaacccaatgcaacctaatttcttttttgttctcgagaaaattcttcaagattgaatatctgtcgctctctctctctgttttttttaagacaaaaatgaggctaaagtgaatgcttgacttgattaattacatcgattatcagttgaagtgcaaactctctcctaaaatcctttgctaaacaaatcgaacccataatgttttttcaagttagattactgttttctgtatagtttagcctaattagactccattttttttttgccttgaatgtggaaaaagtcgattataggatagagcttttatgataatgtgacgggtagctcggatgatatttttgtagttttcttgagtagattaactttgcatcctgcaaatacaattgggagtttgtggcttaattagtgggctattggtatttttatattctttcttttctttacctaatgcagttgatatggttgatttgactaaaacgtgacactgtcttcctttttaatggtatttgcatgaatagggttgtgctggcaatttgggaaccacccggt

SEQ ID NO: 7082 - DNA, 698 bp, Populus trichocarpa
  Intron number 9 from transcript POPTR_0013s06180.1 (locus POPTR_0013s06180) derived from phytozome v7.0 (chr-ID scaf fold_13; pos 4580014 to 4580711 reverse strand)
gaggtatggttttcgttcatcccttagtacataccatctgttcctgctacaagtttttcaatttattgctgcttctgtagctattaaactactttctaaattactattatgctgtctctatttggctaaaagctggataaaaagatttcaagggcattcctgaagtatttgattttgtactatacaaattatttctgtttggataatagcactgcatatatgaagcacggtgatgtcttgagttgctgatgttgcatagaagattaacagttctcaattctgcatttgtgtcagttgacaaagctttatgctgcgatattttcttgagtatctaattttgcatgagctgtgcaaatgttactattgatatgcacagcagtagaggaaagttgcacatatgataccataagttcaatgtgtagtttcacttttaccatacaaagttaatcatcatttcccagactgaaaggacctgttttaatgtagcaggcttgagctgcccagttatccattctggtgatttgtgccttaacttgtaattccagctaacaagatccttaccttttgttgtcttgcttaaattatttttcttttttttaagcaagaccatgcattttgtgagtccacttattttttcaagatataagtgataattgatactaatgcttatgctgtccttgcacaggaaatcgctggtg

SEQ ID NO: 7083 - DNA, 2277 bp, Populus trichocarpa
  Intron number 1 from transcript POPTR_0017s13920.1 (locus POPTR_0017s13920) derived from phytozome v7.0 (chr-ID scaf fold_17; pos 14099893 to 14102169 reverse strand)
tttctggtaagtgtgctactattgagctcttcttattgttcattttgtgttgaaaaagttattgtttttgctagttagcattgagttagggtaaataaatgtgattatttagctttgtgacatagagaaattagtagttgagagttttgcaatgcaaattatgcagtgttgtcccttttactttagaagatctccattgaagttggagaagagttaattctgtttaacttggactgtgtatgtgtacatgaaggtggtctattgacctgcaaggattttctttcttctcaattgggaatgttctattaatttaggattcaatgcttcgtgaatatgacatgtataatttgataatggattcatcgactgttgttttgatatgggtgcaagatttccaacagaatcgatcatattgtgttgtaggtttaaaggatgtacaatttcaaatccaaacataatttccaaggcaaagtaccatttgacagtttattaatggcctttcttctatttttaatgagaaatgaaatttactggggaagaggctctcgctgaataggaatgaaatttgtaattccagagaataaaaggaattgggacttgagtatcttgaacgtgagatttcttggtttgacagaattaagattgcacctatgcagctaatttaaatgctttatgaatcagttgtctcgataagttatggatcaaaattcctgtcttcttttatcttttcccatcatgtttattaaccttgtcttttgtagatttcatcagcattgaagatcacataccttttgctatgtttaggtcttcaagaagagcctctcttcagcatcacttatttaaacaaataagtttttttttttttttgtcatgaagtcatgattacttttaatttcattttagcccgggtattctaattggagggcagtcagcatgttgaccttggtcaattggaaaggaattcagcaaatttagcttgtataagctggacacattgtggatttgcagaagcaacatgagatagtcaatgacacccttagattggctttcttgagagaacaaggattttctctctctttagaattaagtcaccagcttcttgatgtcgcttcacttctaatgcgtttctgaaaagaaaagaaaattgcaaggcatatgccagtgctaggattttgtaggagtaaaattatttagaggggaaagcaaatgaataatagatgggtgaatgattcaattctctacttaggctgctatttttaatatttttgtttgaacttgtcagtttttctgttgatgtataatggagaaggagatgagggagagaatagacgaaagaggtgttgaagaaatagaaaggagacaaatatagaagaatgttgggggagagcagtgggagttgatattcagattttaaatgtcgattgtcaaaagcctttcgaaaacataatatgcgtgctcttataagcatgaacaaaatatctaatagttcaaaaacaaaataggaataagaacatcctagagaaaaaaattcctatttaatgcaaaaattcataacagaattcttaattaatagtaaaagctcattatccatgagctattttttgtttgtgttggataggtggtaagaatggcctagacaataaagttccttataaatgctaaaaacttataacagaacacctaattaatactaaaaatcttgttaatgtaaacggcggccacgctccattttttgttttggtggaactttaacgttcaattgtattcatggctttattgaatcgccttggtgaatgagttctctttgggggttggtgtcttcttaccttgtaacatatttatcctatcattatggtattctttatctatacatttgcaatttgctctgacagattgtttttaggaatttctgttagaccatgaaatggatgaactcatattaagtgaggtgctgtcctgtggttagattcacaaggatgcctctagatggtaaatcactgttattagaaagacatatttgattaggggttctctcctgtttttgtccttggcaagtaatggttgctgaaccttttcttctgtgtttgatagcttttagaagagtaattgtgatgcttgcagaatctaagttatctatttatacatagaactggaagttgttttgaaatattgtttttttttttggtttcaaaaaatgtttgtgttgttggctcatgacactaatttgcattttaactcacagttaagctgagatctgtaaggtgcagacaagactct

SEQ ID NO: 7084 - DNA, 1485 bp, Populus trichocarpa
  Intron number 9 from transcript POPTR_0013s13470.1 (locus POPTR_0013s13470) derived from phytozome v7.0 (chr-ID scaf fold_13; pos 13940467 to 13941951 reverse strand)
tactgatcaaagccttcaatctcattgataagaatgtaagtatgttgtcactcaataccatggttttcaactatccattcaatttgcattatctttatattccatggatgctactatgcatgcacacccacaaatataatctttgtgcttaattcttgttcattgtaaagtaattgtatagccttcctctttcaaacaacgccttcaaaatattgttctaacatcatgacatctcaaatacttctgttttctgagagatgctcttcattaagtccttttagatatctaataaaatgaaaatctgacagagaaatcaaaatagcccttgcataatgattctctaccagatggagaaataccttttctaaacaaaagagaaatccttgtctaatgtgcgtaccaatgttgttatgtccattgttggtagatgtgaatgatagtcactttcttttgttaaacgctccacttgatattgatacaggaagtaattttatctagacacaaaaaagagcatggtacttaatggatgacaaggcatcctccctggaaacatactatacaattttaacaaaagatcttctctgcagtccctctgctcttcagatatggctccaaaaattccgttttgtggtgctacaatgacgaagtcaggaaagctattttatccaaaatgagaagacaagataatttcaagtctttaaagattctagagtgctgaaatcaaatgcatcaaatcattgcaaaagttgtatgcacctttgctaaactcacaaaagcatatagaaaagcaactcatttaggctatttggacaaatatatggctctctatatgtcaacaatttcattttcttttacccaaactacataattatgtggtaataatgtttgaaggtgtcacttctaatagaatgcatgaaacaaacatctggagacattgtgatgtgagaaaatgtaagcattgacattgtttacgactgaacaaaacaaatgctttattcttagtatcttgaccttacaaataagattacttacagggatttgagaagatgtaggattatgaataagataagcatgaaagattttcaaataacatgtcctgaatttcccaaatactatgctcttgctctcttatctcttcttggagacaaacacgctaaatcaagcgatgaggtgacaaggctagtttctctgtctcacattcatctgatctgatctgatgcaaatgtttgttttggacaacatgcacaatatgactgagtgtcatattcttgcagtcattttctccctggtgtatggtttgcttaagttaagggaaaattttcaacttccccccagcatagttactcttgttgattgacctaccactgtgttttcaacatttgaatatagcattttttttttctctgtattaaaatgtagttgctgacatcttatttgttgttctttgtttcatgtccaatgggaatatcatttttgttcaacagg

SEQ ID NO: 7085 - DNA, 1948 bp, Populus trichocarpa; identical to SEQ ID NO: 6961
  Intron number 2 from transcript POPTR_0001s35590.1 (locus POPTR_0001s35590) derived from phytozome v7.0 (chr-ID scaf fold_1; pos 33933595 to 33935542 reverse strand)

SEQ ID NO: 7086 - DNA, 4795 bp, Populus trichocarpa
  Intron number 3 from transcript POPTR_0003s02510.1 (locus POPTR_0003s02510) derived from phytozome v7.0 (chr-ID scaf fold_3; pos 2589994 to 2594788)
ttcaaggaaattatcttggtaagtaatggtggcttatttctctaagctctctctcctttcgccctgcgtaattaaacatgcttgcatttcattaatggtggcttatttctctaaactctatctccttttactctgcataattaatcatgcttgcatttcattatgtgggtgaacatcaagacaccttcgagattaatgctttggatattggatgtttaatttaataccaattgcctttcaatcattttattatcctaaagaaaaagaatgacatgtgttgtcgttgataccgaagcttgagtgagtgctgtttgctggttagagtcataggtccaaaccacatggccatttttgctctcggagacaatgtttgtttttagcaaaatatttttaaaaagatttaaatttttttattttattttaaattaattttttatagtatttttagattatttttatgttaaaagttttttaaaaaaattatattttgatgcatttctaaacgaaaaatactttgaaaaacaattgctattacactcttaaacactttcaaaaaataattatagataaagggttaatttgatatgtaatttaaaatagaaaaacaataatattaataccatcgatccatgcttgcaggataatagtaattacccaccaaaaacacccatttgaaaggtaaatgtaacaccaccctctttcctcttaagaattcaactcgtcaataaatcttactaccaaacatgaccttactgccctaccttctgccttctactctttaaggcatcatcttactagccctaccttctgccttctactctttaaggcatcattggcaaaatcacttctcatgatgggtattgggtactcaaaagtgtttgaggatttatacattgtgttttttttttcttgaataattgattttttaaaataaatgtattgttagatttatattttaattatgtatatttaactacacatgacaatatagtactagaatttttagatttatcgatagaatttcttgtgagtatttatttatactcacaatccatctacacgaaacctactgacaagctcacgaatagaaataatccgtcggaaaaactcccgtcggtgatttgaagtttgtcggtgagttcgttgataataattttaaatagtggtagtgatatatgcagtaatgttttttcaactctctagaatatattaacggactaaatccatcggtaatctcgtcagtaataatttaaaaatatatattaaaaaaatctattaaaaagaaatagaaaataattaaaaaacaaattaatataaatttcaaatatttattataaatttaaacatttataagttcaaatggaatcaatctagaatagaggtgttgaaggagtagggtctagattgtgggtcgaataagaaggagcacatataccactcattcttgatctcatcttcagtaccaattggcggagtttggtcgtctcaccattcagtcattcataattagtagcaagatggattgttcgagcttaaactcactggtataaaatcgcctcaaactctggagtttgagtgctcggaactgattgcgagcatccgacgttgaaacactataagtcgtccgcaagtcctcagtcataatgttaaagagaccatacacttgatttttatcaggtccaacgaacgatactgcctccaaccacaaatctgaatcgagatttaggtgggttgaaagatcgtcattgtatctctccttcaaccaggtgttatatgtatcatggaaaaacaaattcagcaaattcaaaaaaataataacttaagaaaaaaaaatggttgaaaaaaacataccacaaagtgttgagctcagctattcacgagttgttgcaccctttttggcgatcatcaatccgcacatgcatttccacaaaaagctccatcatgattggttcatgttcaagaaccataaccagcaagagaacattgttgttaattaaatatatttataaaaaaacaacaaataaaaaaacggatgtaattgtttcgtatgtgaagtgaacggaatgaagttgttggtgtgcatggtaatggaaccgtgaacatgctggttctggctctttgtatcggagtgtgatcgtcacacaaaatgatcgggcatcacatgctgaatagattctgcccacacggcatccaagatatacagcagtctaaaatccttccaaaccgccacctccttctaacttgtaagttctttttttctgtacattttttagttttctttttcatctcataccaaaaatcatgtaacttatatggtacaaatgaattatctattagtaaatgaataataaaatagaataaaaggattaaaaaaatttatcttgatttcaatcttacttagttgtagtgttattcttcaaaactctagacaaataacttgaatggattgaatttgtctatatataaccctagacacatgttctttgattccactgaaaacttaggattcaccctattaaaatgtttacaggcttcgccattagaaaggtgcatcatcactccatccactgcatcatatgaatgatgttatgtcatgtacttagtaatttttagtgacatgaataacttttacaatccaggtgtgattgggaagtatctaagttttatatgtgggacaagagtccttcctatgccagttatgggttataacgagcatgctcacatgttttgtacccaatcaactctgcattttcaagatagtacaacatgcaaaagtttggacgcatgtcaattttctagcatcttaggtcgaggggtttcaatatggatttagcagcataaaagttcactttcagcctattcccttcaggtaaaatgtttttcgcccattcaataattctgcataatcggcctcactcaacctatgatttgacttgatagtgaacacctgtgtaatggtcaataatttactataatttgtgcactcatctactattggacacccatggttcgtctaagtattttaaaagatcaaaaaaccttatcgcatttgcattaggttctttatctattattggatattgatcagcataaccctgattcattctcatcacatccataatcatattgatataagaactactattgtcatatacaacttcatacacgttgctagaactaaaaattgacccaaccatcatttctaccatggtatcatgaggaacatatggttttccatgtgcaaaccaacacgggtatctctccatgaactttgttttagagaatatgtatcgttacaacatatggatcgagaaattttttatttttgcacctcttacatgaacatttaatatcgcctccactaatatttatcagattagatagtaagtaattaataaaaccttgaacttcattacaataattcatcatacgcaactcttcagatgaatctcgatacatacatgaacgatcgtccattacttatgtcaaacctatatagaatattaatgacaatatgtattaattaattacgtaaactaaataaataaaagaacattggtttaactcaaacttactcaaactattttaatagtacaactaatgcattatcaattatctatatgaattttaatttctatacatttaccaaaaatttcaactcgacaataaaattgacaaaatataaaacgaacccattaaactagccattatttatttcatcacaaaacatctaagtcacaagttcaaattaaatttcatcaatttacaaacaaatacaattttatagaatctcaaacaaaccctagcatgtacaaatcatatattcatataacaaatttcaatgagaaaaagctataaaacaacacccaaacaaaatacatatactacaaaaatatgcaataaaatttaacattttaaaattcaattcaaataaaaaaaatgggtagttgtgcttacgaatcgtcaataaaatttgaatcagaacagggatgctaacaaactaagtattaaggtgactaaatttgtagcgggaggttgatttatgataaaattaaggagggtgttgtttgttgaagagaaaaatagaggaagaaataagagatgagaggggagaggagggttgctagtcaagtcataaattaaatattacaaacagatttaaccgatgaatttatattcgtcggtaattttgtctgtaaaaataacatgtcatagatcatacttcttagttttttttttcattctttcttttctctatttaattctcttgatatataccgaaagattatttcatcggtgtttactgatggatactgcgagagtataatcaatcgaaaaaatccatcacaatctaccaacggaaatactttgtcggtgtgtctatttgtatttgctatatttctggtagtgataatggttatattcaatatttatttgtgcttaacattaatttctctcattggatatcaactttgatatcaattgtattgaggaaaattatgtatttctttcatattaataaaatctccaaacccacaccaaaaacgatgggggggaaattaaatcctctcctgcccccttcctgcttaatatagagcatggacggatgaggtataattagccactccaaactcatctcactgctactattaaatttatttgaagattgaaatttgcattctgaaaatagaacgaagttttttttttattttttaataaaatctttagcttcttcttgattgatttctttgatcatgtagttaacaaagcataccagttctcatcaataactagc

SEQ ID NO: 7087 - DNA, 3914 bp, Populus trichocarpa
  Intron number 2 from transcript POPTR_0010s05750.2 (locus POPTR_0010s05750) derived from phytozome v7.0 (chr-ID scaf fold_10; pos 7229623 to 7233536)
ttcatccccgagcaccagcctcgtctctgtaccaggtaagctcttctcgtttctgtgcatgcataacttaattcactccgttaccgtgcatgtgaaatttaattcactgttctggccaaccgtgtcattgggtctagcccggcccgtacagctgggttctttttcttaaaatttaaattttaaaggtttatttactcgctctagcgtcagaagtaccataccttttaggttgtataatattataccatcgttagagttaaaaatattcataagtaaatattcattgacatcagagccaggaacattgtaaaaagataaaaaaaaaaagaaaaataaattcgtagtaatttaagacaaaaccaataatgtagcttgcctcagatagaacgtttaaaaggtgataacatttttccttttacgtaaccaatctcgtaccatataatctctgttaacgagttagggtttttagtaactataatactagataacaactctttgaactaaatatttttttttaaagaataaaatgttaaatatctattttttccatgaaattttttaattaatcattgggatgtctgatatgacatattctatgtctatattggggtgaaacagtagaataaatctatatccatgataaatacaatatttttctgacattttttaaaatatagtataatatgcgaagctaaagaaatcttaataaataaagaatctgcagaaacgttaagtttaattatcaaaatgaaaaggatcagtgctccttacctcgacgcctttaaatataattgtgaagttgtactcagcagcttcatctccgctacagcgaacaaaaggaggatctttgacagatgccggccatgtgctattctttcgtatgatatcaaaggaatctccacgaggcctctacgttagagaaacttagtgcgtgtttggtatttcggtagtttttctggttgtggtttgaaaaaagttattttataaaaagtacttttagttgaggttggtttgaaaaaataggtgtttggttaaaactgtggttgaaattgaggttgaagaaaaagtagtttaatgtgtttggttaaaaaaatgtttttcaaattgaggttataaaataattaaaatatacatattaaaattgatgatttttaatttaaatattgtagatttaaccattactattactttatgaaataaataatactttatataaaatattttttattatgccattaaaccatctacaattccattacgtacaaaattcattcgacaagaactacagtttctataattttttgagcgtgcaataaaattagataaaatattatcatgaataaaattaatttaatattacagtgcgagtgaatttaattcgctctatactagtttttcaggaaaaaaaatattgtttacatgagaatgtaaaactagtttttttataaaaaaaaaatatacaaaaactatacacactaaaaaaaaaataataataaaaaatcacccgaacagtgcaagtgaatttgcactgtttgcgtgcacagtgcaagtgaattgcactgtgcacgcgaatacaaaatttcaaaaagcagcctggagctgcttcgcgaatgtcgcgtttaaaacgtgaatgtgcatgggtcccaccggtcatttttagcgtttttgatattaccaaatgcttggctcctgcgttttgattgaaacgcaatctctaccgcgtaaacaaacggagccttagaaagggagcgtgtttggcagtgtggttgtgggtgcttttttactaatttttcatgccaaaatgcatgtcaatgattttttttattttttaaaaattattttgacatcaacacatcaaaacgatccaaaacatacaaatcatattaaattttagtaaaaaaaattaaattttttgagaacgcggccgcagccgcgttcctaaacattcccagagtatagtagtgtctgtaatcatggttaaaattatatatttttaaaaattatatattattttaatatattaatattaaaaatatttttttaaaaaatactttaaattacaatatctacccctaatcatcattcgctttatgcaaccacaataaggacagctaaagtaataggataacaacgatatatttaaataataagatatacttctttcactgaccttagggttagcatatgattggttttgatacagatttgtcaaacttttaccactttatggttaagatagtgatttcgctactttcaactagcaatatattaaaagtatgtttgtggttgttttttttaagtattttttatttgaaaatatattaaattaatatttttttatttttaaaaattatttttgacaccagcatatcaaaatgatctgaaaatattaaaaaaatattaatttgaaataaaaaaaataaaaaaatttcaatttttttcaaaaacatttttaaaatacaaaaacaaataagattataagattcatttgatatcacaaatagcttcactgctaattgatatcgacacatttcttatttaataaataaaaaatttattaaattttagaccgacaatatttggaaaggcggtacaaatattatttgataaaaaaatatttattatttattaaaaatatttttttatgtttttacattaaaataatattctaatattaaaaataaattttaaaaaataaaaaaaatattattttaatatatttatataaaaatattttaaaaaataataggtactataatacggatcatagcacaagtctaataaatcccttctccctcagcttaggctagacaagtcctgactctagcagcatttgcacgcgtcttcatttcttatgatttaaaggaaaaaaaaaatcagggaaaggattagtctatttagtattgtggtagctattgtggttctatttaaaaaaaagtattttataaaaagtatttttagttaagattaatttgatatttatatatgtttagttaaaactgtagttaaaattgagattgaacaaaaagtagtttaatgtgtttggttaaaaatacttttgaaattgaggttataaaataattttaaaaaatatatattaatattgatgatttttaatttaaatattgtagatttaattattgctatataaaataaataatattttatataaaatattttttattgttccattaaaccatctacaattccatcacgtatgaaatacatccgacagggactacaattttttttgtttattaaacatgcaacaatatcaggtaaaatataatcaggaacaaaattgggattgcgatcaaattctgcaaatgctatgtcatcaagggatctccgtctaatttatgtagtgtcattgaataatgttaaacactagtttttcgaataaaacacaattaaaaaataaaaaaaaaatttattttttattttactgagtcggacccggttcaatgcattttgagctttggatcggagccggtcaggccggaatagtggagcatgcctccactgtttactgaactatccgcataggaagcagcaataacttgctttccttccccctgcatttcaaacgcaaaaacactgtgggacccatgaatgctatactgttaagtgatttattcgtgcaagaagcagcaataacttgcttctttctccctgcgttttaaatgcaaaaacactataggacccatgaacaatgaactatgtttttttctttactaaacaggttgtatttgtgttttaagtgaaatgcatacacaacctcctaaacaaacgcttttttaagagggaaatgtccaattgatgaaaatccaattgaaaaagttgtttttttgtttgtagacccaattgagaactgggtgaaaattgagggataaaaatatccttttgccaacaga

SEQ ID NO: 7088 - DNA, 2247 bp, Populus trichocarpa
  Intron number 2 from transcript POPTR_0001s22010.1 (locus POPTR_0001s22010) derived from phytozome v7.0 (chr-ID scaf fold_1; pos 20611689 to 20613935 reverse strand)
aagaggttcctacatgctttaaattttcttctgtttctatgtagcatgtcaatattgtttttatgaacatggtttatttatcagaaaatgctgctagtctatttgtagcaagaattattgatagaacatcactagctatttttctaatttactccacgtcttcatgatatgccttgaattttttttttatttgtgcaagagtttaatcaatcatggtatcaaatgctcagacctttggctccctttggaatttttccatttacctttatctgtctcttttctattagtctaatgtcgcaagataattgtaagtaaacaattgaatgactttaattaagaaaagcacaatcagaagaaaaaaagttgaatttcttgcagcagtggcaacttcacttctagcagatacacgtgacaccaataaactgcttaaagaattgaaaagttaaaacaaaatcacacaaaagagtttcacttgtgagactttgaattccaaagcctcaaaatttctcacttctccaaccacagaaaatcacattgattgtttgctttctttccgtttccttgtctaccactttttaaagcaaacttgcagagtattttaagcacagagtagactgcaataactttctgatttaaaatcacttctctctctctcctcacacacacacacacacacacacacactagcagatgtctgtagagttaatcaatttgtcaaatcaaatggtgatgtcattttaaggatcttaagattggatagctctttttgagataaaaaagtttcccatatgacaccatcaacatggtcctcaaatgccatgattatttcatggtcatttgctcctgaaccaattggatattggtttagtgttttatatctagctatgatgtttgtgttggctcgatttgagatcaggagacatgagtggctaatggtgaagttggcttttgataatactgatgaagagaggatctgaaccttttgctttcaatatctgataacatcgagagagaaaaacctattagataataaaggtcaaacgttgacacactggcacaatatgcagtctcttaactggttgagtagcctttgatgttggctgttacttatcaaattgtgggtgaataaaccaaacaaatataaaaaggctcccaattgactaattgagagaaatgagctaatttatgtgtttttggccacagataaatcttgtggacataggtggagtctctcagaatcagtcattgtctagccacaagagagatgtgtgcctcagtcattgctagttacagtggttctgatatcatgaaacccagggggaaggggtacttttgagagctagaagtgatgttctttatagatcagttccaacaagtcctttctattagcaaggaagaaggaagatattaaataaggtgccaaaactgggattatttatcctaacttgtgttaccataaaattaccttgctactgctcaagttgagaatagcatggtctttatgacagctccttatttgacaggcaaccatttgaggaggcaatgctatatatgcttttgtttaatcctacataacaccaagctacacatgctggcattagtgagcaaaagatgttttcttaatattctcggcaagttgctttgtaggtgctgattctgcaacttaagaaggattacatgtaactctgagcatataatgtttttggatgacaatactcttgtatttgtctcgaactatgagtgggttttgtggaaaggaaagatttttaagactttttttggaatatgccatttctgctgtcttattcagaacttggttggagattaatgctataacttttaagaatcagttcacctggagaaaattcttgtgggatgtgtagcttttctccctacttttcagtttcatgcttggtacttttgggggaattttcttgactgataatgatattcagctggttcaggctacttgtttatgatttttcttttttctttgctttcatgatttggaagatgagccaccatacaacatgattttgctgtacttttcagttagttgatataatgttcgtttataaaaaaatttcttttgccctctacactcttactgaacttttcaattttatttctgtttcttagaatatgggtggttgagtatgcattgagctaatgttgtgctgatttattaaaaggctgttgggcatcatcatgtgcaggattttgatccagttaggcatattctagagc

SEQ ID NO: 7089 - DNA, 1565 bp, Populus trichocarpa
  Intron number 5 from transcript POPTR_0009s14820.1 (locus POPTR_0009s14820) derived from phytozome v7.0 (chr-ID scaf fold_9; pos 11543015 to 11544579)
ctcatattcggaccaagttggaagtcgttgttcaggtaattcaattttaattcttgtcttgcggactcttaagttcttgtttacatgcaaagtaacatatctgcatattgttgtttaggatttcatggtatgtttccttgacctcttgtggagtttttatagtaagaatgtcattttttgcatgagtggatagtattgctatgtgagtagtgtaaatttattggatgcataatgggagatgaaaaatgcaactcagcctgaaggagaatatgggtaaaaaagaattctatatatttaagcatatttccaattattcacaaggaaaagaaaaaaaatgcctaaatgcaaaaacgattagtcttttcagtatttaacatgaatttaaggtaccctggcagaaactgtaaaacagggctagcaatttttagcaaattgttttactgtaaagatcttcaatgattgaaatcaaaagggacagtaataattgaatgtagatcataatattacataaaaataacaatccaatactataactactaaaataatacaccacttttagttgacgttgaacttgaatatttatttactgatttgaaattcatctttctgcaagcacaaccttggttggttgtctatattgtagatcctagaattctcgagtgtggtacatgccattagccggttcactttggttctactaatcactaaaaagctcatgagtactgcataatcgtacatcattatcattcaaactccctttccaaatatctcacatgcttaagtatctgctagatccatgataatatttgattgtgtggttcacttacgttttaattgatcaattgccttttttcattaagatttcaaaaactcttattttcttataccttgtatgttttagacttcttgctgcttaagtttgcagcacttgtgataaatgcttgatttgtttgctaccacaggttggaaacatgtttgagtctttaataggttttgcttttgggctttggtagaagttcaacatggaaaaaagatatacatttgtaatgccacacagttgcataaaacttcttgctaaagaaggatagtaggcaacaatcataatcaaatcaagctcaaaatcctgagtctcaattttgagtggctgtgcgcagcacttttaattgaggaagaatagtttcctataatggttttcagggcacgtgggataagattgctggcttgttgcattttaggtatcgaattgcatgtggcaaaatgcgcgtcatttctcggcagcattttacttaaacatataaaactaatatacaacacctacattaacaggactttggtttatcgttcagttgtttttgagagagtgagggaaattcataattataccaagctctccccaagttcttggcacatgcagattgttttcaagtttttggttctccacaataatttctgcttcacagtatgtccctgttctaataaagtatggtgcacaaatgttttgttgcctacatttaacagaatacttgttctgcttgttgctttttttgggcctcactggtttgtag

SEQ ID NO: 7090 - DNA, 1219 bp, Populus trichocarpa
  Intron number 1 from transcript POPTR_0004s21700.1 (locus POPTR_0004s21700) derived from phytozome v7.0 (chr-ID scaf fold_4; pos 20748971 to 20750189)
caggtacttttttgtgtatttcttcctttttctctttttggtgacttgccttgatcatcaacacatttttagccttttctgttctttctttttttaggtagtttttggtgttttagtgattgaactgcatgatggggtgttgaagttttaacagtatgactataagagggttttggtgggtttatcttaactgaaatcaatcagctaattattgctaattattattaggatctttcaactagcacctgagaaactctttctcatcatgttctcaaggattttatgatgggccttgggtatgctagtcatttatgcctaatcacttgtgtttatttcttaattattgccactatttaatttttttatttcgtcctttctatgactgctgaacgttaggtgttgttattttgcccttgttcaacataggattctcagaatctcttcagttctggtcatatgccttcattcaattttgaaacatttgtttatttatttaattagttaaagaagcaataattattaattggtaattggtctgactttcactccgagagtggaactttttcttccatggcatgcaccggtggtctcgtaagtcgtaatcactcttctttctccattgacgcagcgcgtttcaacttccaagcgtggttttttctgtcgttatcccttaacctttgagacttgaattgccatagcccatgtgtgttgaattaaatttccaaatgagagagaggagagcaatttggatgataaggacagagctattaagagaaggggaagagttttacttctatagattttatcatgggcagggtaggttcgttcaatgtcaaggccataagctttttggttttgagcttcatagtttttcttatttatctctcatataatttacttgaagtagattagatgacagattacagaagcaatacattgcttaatgaaactaaatcctgcttaacctgcttgtagacattgcatttcaaattttcaaccatcaaaatgaccttttaagcaaatatttccaaattacaatagtctgtcattcacttctttggcaactggaagcaatccagttatctcttctccagcacttttctcttctttttccatgtttccactttctctgctacttaaaagttttgagaccactcttataatatatactttctctactataggcgaatccaatcaagtataacagtattttgtcagg

SEQ ID NO: 7091 - DNA, 486 bp, Populus trichocarpa
  Intron number 4 from transcript POPTR_0004s19920.1 (locus POPTR_0004s19920) derived from phytozome v7.0 (chr-ID scaf fold_4; pos 19581818 to 19582303 reverse strand)
gatctccttatatttgtcttaatcgtttaaatcaggtacgctacaagtttaatgataaagacttgtataatgttgcacatgtcactgtaactaatctcaagggaaaataaataggcatgtttcgaacttcaatttgtatggaattctacaaccaattgtgacattggacaacgactctaggaaggcaaccctttgatatctactctttatgggatcttgaaatgattgataaggattctgtaaaatgcattttttgacgaatgattcagcaaaacgctccctagtaatgctgtagtgattgcaagttaaacaattcctagttcttatgtgagattatagtgatatcttgcacacaatttatttttgtagtttaacaagaagtctagctatactatatggtttctgtaacatgttgctttatctgtttaattctattgaaatattgatgcagacacccaattcacctgttgctgctggaagttctgc

SEQ ID NO: 7092 - DNA, 1837 bp, Populus trichocarpa
  Intron number 7 from transcript POPTR_0016s04130.1 (locus POPTR_0016s04130) derived from phytozome v7.0 (chr-ID scaf fold_16; pos 2347490 to 2349326)
ctgtgttggcattcaaaatatttgtctgtgaacaggtcagctacattatctgaatttctgttggagcttatttagatgatcggcctggcatttgcaatgagtggtttatctctaacttttttatttgcatatgtttgttcacttgcccgaatgaaccaaggcgatatgctaaaaattaaaagaatatatattatattatataaatctaaaatatatatctttccaattaagattagatcattagaaaatcaaaagaaaatataaaatgccataacatagtcatataacattatatttttcacccttaaaacaaaataagataatttaaagtagtaagtagcccaatagattaaaaagcaaaattaaatatcatcatcgttatttattaatcttcaaagacatctccatccatgctttgcgctccttcacttgaatcctctatatcctccatttcatgattataatcgaaatccttatctctcaaactattttccacttgtttagaaaaaattaaagtatttgttgtacagatgtgttgttctttgactcctattgctgaaaaaagaaagtgtggttagtgtttctcttctaagtgtccttcattgtctgtttgtttcccactttaatgaatttttttataattttttaccctagaaaaatactctaagttgtttcttgtggtaaaaaaaaaaagacaaataggtcaaagcataaatcatttaaaaaaaaaagaaaaatccaacagaaaaggaagaacttcaagcaagggctagccttagccccttgcactcactcacaaggcgctcgcctcattgaaatccaccgcccgaggctaataaaggtgccagggccctgcctcacctggagctcctcagcgcctcttgacaacattgctccacagtgatttgtatccttgcattcgtggaaaatcccaaaaatactatttaccttagctcatgatattgcatttggacacctatatggctcccaatacttaatttcatttgcaaagatttcagccatagtcatttttcctttgaaatttaatggtggggcagacagaacattatccaattaccctggatcgatacattatttacagagcagaagtgcttgccatgtccaatggatatctgttcttgtttcactgatttactatttatcttagaacctctagagcctcaagcaatcccctgggtgccctttaaatggtgttccccccccttttgtttatatatatatatatatatataggaggctaccttgttgctgatttagctatctatctgtatttttatcatcttgttcaagtgtttcatcatcttctccctcacacaaccatttgtggtgtgtgtgaatggacatttttgtgttctgcttagctgcaaattatgcatgtgaaatacatgtctccttcatggtctctgctagtcagtgctgttgctgcacttgtactgtaaaaaatctcattttgctgatagtaaatctagtgaaagaatccattttgactgttaaatctgttgcatctttgttgagttattgtacattttccaacaatgattatacccaagttatagttgttcctgttgctgtaaacattctcttcagtcattgccattatgtttgtagatctatgtccttgatacattgctagtcttgaattttatgtgaaatcttttgagctacatgactgcatctatacgttgatgtggtctttttgtaacagtctgtcttttgtatcaaattgtttttgtttatatctaagcccatgtaaactgttaatctttattgcttctgagttaatgattctgtttttcttttccttttttgcaggtag

SEQ ID NO: 7093 - DNA, 2092 bp, Populus trichocarpa
  Intron number 1 from transcript POPTR_0001s33160.1 (locus POPTR_0001s33160) derived from phytozome v7.0 (chr-ID scaf fold_1; pos 31361260 to 31363351)
gttggataactctcctcttcttctatttttgcctggtcagtccttttttgccaatttattatctgattattttagtagattaggtaatatttatttacataagtagatcacgaatttactggaaagtggaaagtttccttttataagaataacaacttcgtcaaatcgtaaaatgctccctgaaccgtacttatttaaaaaacgaacatctcgctgaaccaaaaacattcttgatttttcatcctaaacaatatgattcttcgaatttacctctaaataatagaaattgatgaaaaagcccaaaacattcctcttaattccacaatcatcaagaactaattgagtagatgtcttcccctcctctctttctttttatttttgttttagggtttttcaatttttttttttaatttttttttaatttcattctttattatttgggttgggttattggaaaattcataatttattttgatttattttttattaggttattttagtctcttgagtcatgaatttgatcggttaaaccgagttgattcagggtttttttattttcttaattgattttttttaatttcatcattcaatgttagattaattaaaaattaaatttcatagtttgctttaattttttttctattagattcacccagtttcatgattcaggtttgataagttaaacctaaattgatcgagtcatatcgaattgatctttacattgttttttttttttttttcaaaacatgttatcaatgcttgaatatttcttaacttaaaaaaaatgatccatgggtaaataatctagtctttctttgcaactcctaataaaaaagaaaagataatttattttcattgattgttggtttaatttgaattttgatttgaatggttgatgttgattatgtttagttaaaaatagattttaatatttttttctcatagagaaaaggagagggattagaagaattttaagaatttctcatcaatttctcaatgttgatatttaatttttgatgatgtttaattttttttaatttactcctaaataatagaaatggatggaaaagcccatgaaaattcaaatgcaaaaggtattttttaaaatatatatattttgttgaaaatgaaaaattatgattttgtttttattctaaggggttttgtttttgtttttttccctaatattcaaggctttttttaaacaatttaaccctttttttattaataaaagtaattactggaagatagtaatgtaaatttaattcaaacctaacggatgccaactcaaattgatcttgatagatggggtttttttgtagataattaccttagctaataggtaaatagatagagtatatgtattgtcaaacctaatttaaaatcacgtgtgtgggtgatatcactattttattttattttattttatattggatataaatgatatttgaataattatatgaatacctaaatcttaatattttattttttttaaaacgaaaaaggtagacatatagtagaaatccgattgccatccttttagaagatttatagtttccttttcattacggtaagagagctttgctctctctctctctcttaatcaccgcatctttaaaattatttgaaaagagaatttattttcagttgatgttgatggacaagctggttagatgataccccatattgtcgggggaaaaaaagaacaaaaaagtaatgggagacatggacttaactctggtttacaaaaatacacaaggtttaatgattgttgaatgatgcaaaccttttttcttttctctggtttagttaataaggtttgctggaccttggattgtatattagtcctcaatcatttttatttttgttttttgaaatttcacttttttatatctaaatttaaaattttgtagattaggactgtgaagtttatgcaatgttgatggcacttccattttcaagttttcagcctgtttgtactgggttttcatttctcactttcaaattagtcagttcaaacttctacagttgctgttccaaaaaaaaaaaactttaactgttaagtaaaagattctgaatcttgcagggattg

SEQ ID NO: 7094 - DNA, 2383 bp, Populus trichocarpa
  Intron number 6 from transcript POPTR_0001s36810.1 (locus POPTR_0001s36810) derived from phytozome v7.0 (chr-ID scaf fold_1; pos 35558800 to 35561182 reverse strand)
agaacttgccggtgaaggtactgtctttggtcttcgtctatttatttttttgttcttcttctatccccctgcatactgtgtatactatgtttgtgaggacttgcatttttctgctcttatcttataaagaatgaacttttgagtaataagttcatgaaattggattctaagaaatctgccttaccaaataagttcaagttcccaactacaggaattaatatttgattgtttaggaattttaatgttgtatgattattttggactttctgagtgttatgtgggaatattagtatttattatttagaagttaaaataggaatttagattattttagtttcttattgtattaggactatgtaataggttttcttatttatatggtttggtgcctataaaaataaataagcaccctacctagatattaagagaatgttgaatattaattatcagactaaaactaagtttctcgttgagaattggttctctggttttgtgttctcgttggtggttctacaccacaatgcttgtgtatcagtggcagtcctagaatgcccttctaaatgccttaaagagattgctgccagtgtatgccatcacatggactgtgttttttggcctggcaaactcttatggatttgatatgttcacttgagaacaaacgagctaccatacagctcttaacagctgattgtatccaaaggaaatttttgaacctggatcacacctcctgaagataatatgccacatgatgtttagatgctttgacacaaccttggtcacctctcttaaatatatggtgttctgttgttacttataggacgtaagcattgtcgctaattttcttcagaatcatacaaggaccttcactctttgaatgaagctttatatatcaatacctttaggatactttcaagtctgatgagtatttgatgataccgaatacccacttttcaaatctatatttggaaagattgtagaagtagccatagatccaacatgtcaattaaatggtggataatcttgtttatggtatgtcttatcaccatagatgcaccaaaaaccataattgttttttggtgcaagcaaagctaggatagcaatgcattaattcttaaaacaattctttggagctggacaacagttcatcaattcttataagcttggcatgtcacaaggattctttcataggctggaagattaggcttttaagaccctggaattagaggcaaaggatgcaactcatttggtagttagcaggtgcaacatcagaaaaatctgacaaccacctagtttcctctaggatcaacatggagaaagggacagcagctgattttaacacttctcttgctatacagaaaaaatcacatttgatttgggctagctacctggaaaaacaccagagatgcgtattgtcatcaatgcccttgtaattttgatgtcaagttaactcattggcctgaaaaccattttctttcccagagagaagtccacatgttgatctgaaagacaagatcaaccaagaatgtgaaggacttgcacaggaatcatgtcacataatatggaatcaccaaaggcaccacaagtaaaagtagcaatgtttggagttaccagaatggttttgtaggttatttaaaaaattacagaattaccgttaaaggcctattcaagttcccaaagatgttccttttcatcaaccatatatgaaatcaatgcttcagcattataaccagtcatggaatgccttagaaactactgccaactgcaccatgaaaggggttgtgtttaggcctggcaaaatctaattaatttgatatgttgaattgagtaccctaaggcaccatatcagcaattcatggcgctcataacttaacagaaatgcctgaatgcaatggtacagctgccagttttacatattggatcaattgtggcaatttttactctttgatttgttagcatgggcaaaaatccctatgtagaatgcatgaaacttgtgtgaaattattaatggaattaagacaaaaaaaacatacaaaaggccttgtacttctactgcttgaatggtgtaatagtgaattattactgttatcattgttatttttgcattagtgcaatcatcaagaaatgtaagtacctctgataattgagctccacatttgaaatcatttttatcaatatgatttcactgcatttcttttgttatgattgttttcttggttgaaatttcacttattggagctacaaactgtaatcaagtcctaatattagtccagctagtcttttcaattcttcattgatgctatagtgtgtttgcttattccaagcactgtttgtacttctcatgaacgcagattagtagagattgtcaagagctagaaccctctat

SEQ ID NO: 7095 - DNA, 975 bp, Populus trichocarpa
  Intron number 4 from transcript POPTR_0004s20980.1 (locus POPTR_0004s20980) derived from phytozome v7.0 (chr-ID scaf fold_4; pos 20317148 to 20318122 reverse strand)
gggaggcactgatttctgcagatctaggtatgtaaattgtcacttccatcttaagcttttatgcttctatatgccatcaaacttcattcttactaatgcttgccaaagagagtagtttctgttattttctaaggagaatatacaaatcaaatataagtgaagatgttagagaaattgagtctaagtagctatgatggttggtttccgaatacattaaggagacactggaaacagacattagcaatctcttctcgaatctctgcatgaatgatatatttggttgagagcacactaaagcattaagagagagaggaaaaaaaaaagaaaaaaaggcatcctctattttgagttatgtcatgaatagtgccaaagtgcttacaaacaacacttagtagttattactccattcatccacattttattcccttccaatattattaccttgcatgggaacctgactgatcgtttcatggcttcaccataaattgtttgaattcttgcaatcttggaacgctaattttgtttaactttagaaaggtcggtaatgatgttaaaaagagtgattttttaaatttaaaagaataaagtgcacgatgaaaggtgtggaaaacatttgggacagacagaatacatgctaaagggaaatcatgcaaatttcaactgttagggcttgaagtgtctatcactacctgatctggcttaatcatagttgactgtgaaaaagttaatgcttaaacttcaactcactcacaaaaagtatgttctgatgggtcagagaaattctccctgttcttcatttgtcaatatcggttgtgtaacaaactgtaaatgttttatgatcggttactattaagggcatcccttgaaagtggattgctttagttgtgttcttattttcgagaagaattctgatattgataattatcaaaatcatgaccagatcttggagaaatagctagggcaaaatttgacttt

SEQ ID NO: 7096 - DNA, 3801 bp, Populus trichocarpa
  Intron number 1 from transcript POPTR_0001s25260.1 (locus POPTR_0001s25260) derived from phytozome v7.0 (chr-ID scaf fold_1; pos 24428668 to 24432468 reverse strand)
tcttctcgagctcgaagcccccattaagatctgtggtaaacctccctcatcttttcctcttactattattcactaagaaacactgcgtggttttttgctggattcattccattctttattacatataggtgaagacttatacaatcatttttcttttcttttcttcttttttctttgtttggattaaactggacgaatctagattgatggggaaaaaatcaatatttgggaatattaatttaatgctggctggaaggattattggttcaagcaatttatttaggggatctattttaccctatttgtcgtttgatacagaagccaaaatcttggatatggtaattgatgtgaagactgataattggtggacgcggagctgtggagcggaagaaatatctattctagatcgctccatttttcttaaagtcttggtcttggtctgagaccgaaagcaccctttttcttatttcagaatttggtagataagattgcttggaattctcttcctaggcgcttcaagactgaagagcagcaactagaagcataatctttggtggactataattgagcaatgtgtttctccttttcttatcttgttcaagatgttagcttattgattattagttctgggtatgaaggacttgaagaaaattatataaagaaagaataagggagattgaagggtaggatggaagaaatatctattcacttccgaaaagaggaaaaccaaataaccagttctgtatgagctagtgaaaccagtttcacttggttaagtcgtttgaaagtgtgtccatatggttgggatctaggaagcattgatccttaaaaaatgatcctgtagccatattggtcttcatcatatatcaaccggatatggcctgatacatgtcagagatgtgggtatatggagaaaaataataaaacaataaattcaattttggatacatggaagatactaggatgtttttctttatttcttgttaaaataagattttcgtatgctacataaaatatttaaaaatttaacatatccctcatgaatcatatactaaatttttaagaattttcatatctccatatccatatcatgccatactggtattccatatttgtgtccatgcttcatgaggatgcactaaagggttcatatttattaagtttatgtgaaattgatttcataatgaataaaatctatctatggtttggttgtttgtatattgttatggtgaacttgggtggtcatggattaagctggatgagcttgtctgttcacaaacaacttatgctttctttggatcaattgcatttgaacagaaaaagaccctccaaggttaaagcatttgtctagacaaccaagaggcctcatgatgcctggtgtccgagtatttgcccaatgcatcattgtaaaaagtagacacatagtcatgtttttttcatttgagaatccaaaaatagtaatctatcctgaagttgtttgctggatatttcctttttttgtaatctgtcataatttaatatttttatattttaattgtctcaaaattgctaggacagtattagctaatttcataatatgcataagtattaagtgtatagaatgagacaagacttggttagtttgcttgatattctatgttttgtagcgatgatagatttgggatttcatgctttagtacctgtttgagaggctttttttggactggtcgtatcaagagagtttgtgcatggaatgcataatttcttaaactagcagcaccttaacatcaaatatgttttcaacaaaacataagcattcatatgtaccttacagctgtttttggttctagaattccatgtcaggtttagcaatttttggctgagcttgttcttgttaaggtttggcctgtagaattcacactacatggacatttatcctggatgcttatcttgcatctctagattcaaaccccttccacaatacttgaatgaaaacctcttttactctaagtgaaaagttttgttcacttaaaaataagcaatggttggcattctatgcttagaaacttaagtgatactctcaatcttaatttgactagccggtctaaatattttgttgatccttacatataaatagcacaagcaattttagtttgaagtttggacttctagttgattagaccaagctgaaaatggcggtttgcaatctttctaagtaagcctcttagcatttataggttgatgttgctagttggttggcatgtgctagtgtaattgttgtgtggacattaagggagtgtttcttttgcttaaaatattttacaggaaactagtccatgtaggatattttatagtcaacttataaactttatttattttttggaaaatagttttaggtcgtgaagttttgtaaaatattttatagatgataattaactcacaatactatcgaactattttaaccaccaccactacatcattgttgctactgtagccaacactaccagccccaacaccatgccaccatagttgtaccatgttaccaccaccacctccaccacctctttgaagttgttgctgtcaccactaccatcatttatttcactacctctatatttttcacatcattacttattaaacattgtgaaattaattccatgtttaaaaatgtcttagaagttttttttccttttttaaaatattttatgcaaagcaaacaccccctaaaatgggatatttcaatggagcctttgatcagtcccttatttgcatttgcattttctttaagtgtttaaaatagcttgtgaacaagatgtagtataatatataggattttcattaatttgtttgcactttaatatatatatatatttttatttaggaagttttataggattattattattagatattttgtaagaattcttagttctcaattggcttagattaacaggttttgggtgtctatgtaagcaccatgttcaatgcgttttgggagcagacacttatgatgaatcaaaccttaaatggagaattgtttcgttcatccaacccattactactgggttttctttttctcagtccgctcctatagattcaccctgttctatagggtgtttttctttctcttattcaattcacccctctctcctatagagaattcttcaatcttttatctttgttcttacccttgtcctacgtcagttaaacatgagagttaccagttcaaataaaaacgaacagtaaatgtgagggtttgaagtgccttgctgttacataactcacttcatttggcaagctattactctaatatattcaactaaactgataattgttagcctcaggtactttaataagtcacaaagtgtatgatgaagaacaggaaaagtgatagagtaaagagacaaaccctagaatccactagattaaacccttgagattcgtaaaggatgcacaaattaaaaaaacctccaaatgctagggttctgaactccacaagaatagaaaaggagttgctttgcaaaaatttcatttgttgaaacagcatctccataatgctaaaatggctgtttatataagtgcaccaaaaacttccgaatggtcctatcaaaatagggagcaagctaatagtatcactgataacaaagaaaatcccaaataatcaaaagatatcagaaaatcagacagtatggcaaaaatatctaatttatccttcattctataaaaagaagtacatgttcatgattctcttgcatttctatccttgtttctgggttttgttaactgctgtgccttttcctcgttgatttccaggtgacattc

SEQ ID NO: 7097 - DNA, 788 bp, Populus trichocarpa
  Intron number 2 from transcript POPTR_0009s15150.2 (locus POPTR_0009s15150) derived from phytozome v7.0 (chr-ID scaf fold_9; pos 11766662 to 11767449 reverse strand)
ccttcgtcatcgccggcgcttttgccggtgagagggtaagaattttttattttatttttagtaagattgttttatgttttattgtgtataaaattgaagaattagtgacttacttcggaaacagtgccctaacttattcgagcatttgaattttaatcaattttttaaaagaattaatttttgtaagaatttggaaatagcaagctataaataatattattagaattctgtttctcgtgatcaaaggaaacaatgatctagaaaccaaaagttgttgaagaaacttgccaagtggaaacctttttttttctctttccatgtagagctcacattttgcatagatgtcacttgcattattgaaatctttcggagtagccgatcaatagagaatataaatgagcttctgtttgcctgagaacttttctacggtttgatctggaaatgatgatatgtgagacaatggcacatgaatctataaatgtataattggattagattttgcttaagaaacacagacatattttctatgcaatctgatggagtgggaaatctttttcatgttttgaatctgaaaggggctagtctacttgaattgcacttattgatgcatttaaaaaaattctttggtagttcaactatgtgaatgcctagctgaatttgctgaatgctatggcagttcaattatgctttatcgctacaaaaatctgacttatattttgcaattgtttttaataatatgtggtatcttatcccggttaatcattgttgatgcatgcaggctgtggatt

SEQ ID NO: 7098 - DNA, 4191 bp, Populus trichocarpa
  Intron number 2 from transcript POPTR_0007s09870.1 (locus POPTR_0007s09870) derived from phytozome v7.0 (chr-ID scaf fold_7; pos 9393859 to 9398049 reverse strand)
aagtgtctgaagctcttttgggtatgcgatattgttcttttctgtctttgatcattttcacagcctgataagaagataacgaaatgctaataaacaaaaaaagaaccaaaatactgatctcttgctttttgcttgaaactagtaatttatgagaccagaagaactgaggtagggagagctccacaaaaccaacaatagatgcccatattgctaaatatgggctactgcattttgctgacctatgaacctaatttttcatgccgaaagtcatgtgctgctatattttattgcgcagtcattagtatcacagtgcctggtgctagagtgaacagctagcccatattagtatcacagtgcaggcattttcctgactgcttcgggaagaaaaacatattttcatgtttagttttttattcatttcaaaattctgacacataagcagattgttatgagcttagggtgattaaatgtatctaggtgtatgcccaaaagctgaaagaaaggactgggttgaatgcagtagttatggttgaagtgcttaaatcggaagataccatgattacagctgaaagcaatggagtagaaatttaagcagtgttacacacaccacatacatcattatgttagttgtcctaaaaaataattgctaccaaaaaaaaaagaaggaaagaaaagggaaaactttagaaaagaaactcgtgaaagacctagaaacatgcattataggcaagtcccaagaggttgttggatcgaaaaacaccaagttaacttttcgtaagaggaaggaaagtgacatgtagcaagcttttgttggtttcctgttagtttttccaggaaaagtagagaaacttctgaggaaaatactttaaagactaattaagagggaacaccttatgtttaaactgttctacaaactcgcctcacagagtccctccctcgaatctcacctatgttgtaaattgcttccattatttcttccctttcctctcaattctgaaccaaaaacaaggaaagaagtcctgaaacttgattttgtctctcccttttctcctcaccaaactctatgttaggctctaagcttccgacaccttatttccagtcatcacccatggacattacatggaaatctcaagcactttcctcatcagaactaggtgagacttcggcaactgtgtagttctgaagagaatgtattaaatgttaatcactagttgaagctagaataggtaaatatttccaagtaatactgcccaaagacctccattacagcaccagaagaaatacaatatgcttctttagatgtttaacacatgctgccactttagaattggtaactttgatgacttcccaaaattctgtcgtaaatacacttgagctagatatcagcttagccattacattttgttgtgcaaagcccaagcaaaccatataataacacaaaataaaagggacacacaaatttgatgtggttcggcaaagcctactccacaaaacttcactatcaaatattgaggattgcaaccactgatcaagcacgcactcaaaatatcaaaacccaaatgacaaccaagaaatcactcacaacaaaataccacactaatacttttggctattgcactatttcttttgttgccaccacacaccatcaatattggaggcatgcataaactagccactacacatgctatttatacgagcaacaaggtccttcaatagaagaagaattcttctttcattaagaaaaatatcaagtccgactccaacagggaaagtcttttcctaaatagaatatgtcaagatatttcattcttgtttaggacaccacaccatgcaattaccaatctaacaaaccaaatcaccaatttaaaccacagctcaacaatctccaccttggctttaattgtgacaaatcatcgatcttgttttcgtgaagtatgcaactcctctcttcttcacctacacttgtttttatcttgcatatttcttcgaatgaaaatcttctttacaactatctatcaaaataaaactaactctcttcttggatgcaactgaacaatgcatttcatttacttcactacacgcttcattgcatgctccaccttgaactgcagttcctatcaacttatacaaatcattacacatcaattttccttttgtcattgccaaagaaccgcgactaactctcgtaactccaccttcaacaaaatgcttataaccacgtgagtcaagtatttcaaatgaaatcaaattcttttaaagatttggcatgtgcctaatgtcatcaaatgtattcattagaccatcatgcatctttttttacaagtatttcaaatgaaatcaaattcttttaaagatttggcatgtgcctaatgtcatcaaatgtattcattatataccatcatgcatctttttttttcactttaccaattccaacaacttctacttcatgattatccaccaacacaatggattctccaccataaatttcttaactactaaaacaatccttattagcacgaaacatgaaaagagtaagcaaagtctaaaatccatgaatccttcaacgaatccttaccttgaggagatcatcatcatgtacttcaccaaccgcagtagaagctacatctacatgctcctcacaactcttcttcttcttttccttaaattcttttagatcactcttcaacctcctacaataaaattggatatgacctttcctatgatagtaataatactccttattactataatccactcttggttttgatcttgatcttgacttaattctatcacaattagttctttgtaatgtattttcatcaccatgatcaaagttcatcacacaagctctacctttgttgccactactaagctttttaaatatcttactatttaatagcatagcagtgatatcctccacattagtcgtctctttcccaaccaacaatgctgtcatcaaatcatcataagattttggaagagatgctaataatatcacggctagatcctccccatcaatcttcacatcaattatacaatcaatttattaaatttattcaagtgatctagaatattcatgccttcattcatcttcaatctatataattccttcctcatatcaatacaaattatgagtggtctcgacacttggatcttcttcacatcaaacggccccaccttaaattttgcgctcgtcatcttcaattgttttgcacaaatcttcaatcaatctcgaactaggtactagttgttgtgcaaaatccaagcaaaccaaataataacacaaagtaaaagggacacaaaaatttgacttggttcggcaaaccctactccacaaaacttcactatcaaatattagggattagaaccactaatcaagcacacacttaaatagctcactaccgaaaacctgaactccaataaatcacttgcaacaaaataccactctaattcttttggttaaaaggttttggctgctgtactaattctttggttttcacacgccatcaatattggaggcacgtgtaaactagccacttcacaagctatttatactagcaacaaggtccttcattaggagaagaattcttctttcattaagaaaaatacttcaagtccaactccaacaaggaaagtctttacctaaacagaatatgtcaacacattccattcttgtttaggacaccgcaccatgtaattaccaatctaacctaaaccaactcactaatttaagccacaactcaacatattttccatgtagaattatagataacaaaataacaagaagtaatgcttgtgaatagtcttctaatacaagcctcatggtttcacatgacaaatttgcataaatatgaatgcatcaatagacaaataaagtgtgtattttgccatcgaaagacacataatagtgaatgtcctattatgcaagttgcaccttcaatctttcccttctataacttgcatgtggacaccaaaaaattgagacccagggtatttttcaaaaataaatatgaaaggttggaagattgttcgtcattgatatcaggaagatcacataccatcatatgcatgttctgtacttgtatcaactttccttgttatatattgagttcagtttgctaacgttataaatgagatacatgtttgggtgtaacaggcaacccagaaagcttgggtgcggagcttttggaa

SEQ ID NO: 7099 - DNA, 2610 bp, Populus trichocarpa
  Intron number 1 from transcript POPTR_0009s10990.1 (locus POPTR_0009s10990) derived from phytozome v7.0 (chr-ID scaf fold_9; pos 9282737 to 9285346 reverse strand)
aaacgacggtattaaagaagaagaagaagaagatagtgagacaaaggaaagcaaggggtaattttttttcgaaagttgtcttctttatttatttattttttattaaacaagcaatatagtgtgtaatgaatgaaattaaccctgctcgtatgtggaaattgcctgtaatttttcttttttcgaaggaaattaggtgttttattgcttggaactggaaattagatatagagatttgttgtttatcatttatgtacaaattgatcgactttgtttttttaaaaagaattgggatatgttttttgtggtgtcattatgtagttctaattaggtcaaaaaatgtcacatttgtgtcttatgagtcgtataggctaaagttagtttttgtactatggtttctgttatgtttcaatttataagtaaatgaaagcaccaagtttaatagtgggcaatgaatcatgtgaagctacttagagattatttgggattaaattgggatgatattagatgtgagggttgtatatgatttactttgagtttagattggaagtgaaattatatgaatttttgtgtctgttggttcaatattgggatgtgaatatgagagaggtggcctttttgtagatttaagtaatacagtctagtaatggcattttgtctttcatgagttataagaaatgaccttttaatggcggactagtaatgggtgtatcatctctactttcagtgctttataattttcattgattatttctttcttctagtttttgcactggctttcttttgtattttaggggggttaattttgaattcctaatatttgagtttcatttcataggcttgattgatttctgtttgttttatatatatatatacacatcgaaaataggtgctcatttcattacattttgaactgaatatatgtcagatagccaatcattccagatacaggtttcttattaatcatgcttggtactcttgtgttatctgtcttttaggtcagacaagacagaaaaggtgaggaaaagaggcggttttgctaagttaagtagcttatctccgcaacttcaagcagttgttggagtgcctgaattggccagaactgaggtatgccaatcaccaacaagatgattcatttctggaggttggtcaggtggtagttcctggatcgggatctcacttttgttctccttacttttgttattccaggttgtgaaaaaactttgggcctatatccgtgaaaacaatttgcaggatccaaagaataggaaaaaaataaaatgtgatgaggcattgcgcgctgtctttcatgtaaattcaattgatatgtttcaaatgaataaagccctgtccaagcatatctggccattaactggagaaaatggtactttcctgaataagttgttctcttttgtttctttctgtgggggacaatgggtggttagttgttattggttgttagtagcatcttcgtgctttcaatatgtaaggttgcttaggatttgtatgtatacttgttttctgttagttttggaaacctggattattttgctttggcaattaaatttagcagcgtaagttttatatacccagaaaaaaggaaaaaaaaaaacactgttacgggagagtttttcttataatctgactggtttgacaatttttttcttcagctattttgactatgatttttttttctttccctttcctgggttgatattaccatcctcctccccttttctttggctgtggtgctacactttattattccagggaaactaatctttttccccagtatttggactacgttaggatgtttatattttctgcactttcaacttcaactactacaaacaggcttcctattgaacttgcactttatttccttacggtacattataatcttcttaattatttacctttagagatctcttcttaatgtgtcatcagatgattgttggctgatatattaaccaatgatatcatttaactatcagaaagtgtaaagcaaaaagaaaaaagcaaagacattaacgattctgggtctgaaggagacaatggaggggaacaagaggatgacgaggaagaggtaaagaaagagagtaatgaaagaagcaagaaaggacggtgggtttcttgtatccttttttattctttcatttttttttccatgggtgaattgctattcttgtttgccattattttgaggttcctaatgctcctctgtttgaaagagtggaaattactcatgctcgctttaacttatgatatggatactttaggagttgagttttttttatgactaaaagcaacttcatccttcaaatatcacctctgaaagtgatgaggtggttagctcttcatagccaaattcctgccattcatgccctgaagaaattttggttgaggtgctgaaaagcattagttttcataacctttctgcatgtttgtatggttactgaatggatgatatggggctttctgtgactggcagtcctagacagatattaggaaacgttaggattagcatagcattctcattccattacatagaatatttgtggttgttctatggactgaatgatcttatcttatccagtaggtcagctaaggtgg

SEQ ID NO: 7100 - DNA, 819 bp, Populus trichocarpa
  Intron number 5 from transcript POPTR_0004s08800.1 (locus POPTR_0004s08800) derived from phytozome v7.0 (chr-ID scaf fold_4; pos 7399530 to 7400348)
ggtaggttactgaattagtttccttttaactttccatcagtccctttgactttgtgatgtttgagtgaatggccctgctataagcttccatagataaatagggctttctgttactcaatgccataatctacaaaccacattctgagcataactattagattaggtcaagacttgaatcagatgttgagcaaagagcgtttctttgtaaactttaagcaatataacttgctttgttaggatggaattgttctgtcctctagttctatgaacagggatttatgcatcattttttctctgctggtcctagggcaatggattggcagtgaaactgctatgatactggcgtctaggattctaggctttcgcttgactttatcaattctttctagtttactttcaacctcaactatccgacttctttagccaaagcatgaactattatgcaattttcaccccagaatcatgcacaaattgaccaaatttcttgtagctgatgcatcatgtggaggatgagtttgttttgctgtctcatggtttactattttgaagaattctatcaatgttaaacttcactatgatttttgccttcatctctaataaaatcatgtgctgttgctttggcaacaaggtcactcatattaggatttgattacattatgaaaaatcattttgacatgagtaagtagcaaacagctctatcttagatatcggccatttgttcacaacatgatgacatttgtgcctttattattggacgtgaaattgacatcatggactctgcaatctttttgcaggctaaacccctgttgcagaagggaa

SEQ ID NO: 7101 - DNA, 3039 bp, Populus trichocarpa
  Intron number 1 from transcript POPTR_0011s01805.1 (locus POPTR_0011s01805) derived from phytozome v7.0 (chr-ID scaf fold_11; pos 1408303 to 1411341)
gactcggtataggtgcaagatttaggattgacaatctcattgatagatgtctagtagaaattgtcaaaataaaaaatgataaaaagttatggatgcatcaacgcataagagatatgggaagggaaattgctcgtcaagaatcacccaaatgtcaaagaatatggcatcatgttgaaggtaggaactttctatcaaatgttagagaataatcaaaagaatccaatggtgtagtttgcctgcagagacaacttctttctgatatcctaaacaagactgctgatgacgtacatgatgttgatgaagggattatatcaaggatgcattatgttgcagaagaaatcttattgtacttgatgatgtggacaaatgggaccaattaaatgcaattgttcaatgcaattgttggcatgcgaaattggcttcgccaaggaagtaaatcattgcaagaactagaaataagactttgattgtagctgatggtgagtgtgtcaagtgcaaagatgaaccactagataacaaaaaatcacttaatcttttgagttggcatgcccgtggacaagcttacccagttgaagattttatggaggaatcttggagaataatagtacatcattgtaatggacttccattagccctacggtttttggttcctcattgtcaagaaaaagtagagaagtatgggaaagtgcattgcatgaaatggaggtgattccgaattttcaagtgcaaaaggttcttgcaaaaagttacaactctcctgatgatgattattagaagaacttattccttgatattgcttgtttcttcaatggaatggacgaggattatgcagttaggacatttgatgggcttggtataggtgcaagatttaggattgactatctcatcgacagatatcttgtagaaattgttaaaataaaaaatgataaaaagttataaatgcatcaactcgtaagagacataagaagggaaattgctcgtcaagaatcacccaaatgtcaaagaatatagcatcacatggaagcttttacagttttgaaagaaacaagtgtaagagtaactggttctgttttcctatcttcatggtatttatgtgtcttaaaatgttcatgcttttactttcttttctcatttactttcaatattttggaagcatgatgctgaaaaattgtgtggccttaccctgtacatgcatgaatcagtacagaagttgtctgtactgattcaatggttcgcctgcaaccgctacaggcttaacttctttcaacaatgttttcttcctacattcctctctcaatagtggctttctgagtttttcttgggggaccaattacaaattgaccaaacaagtttgtttcttgttctcaacacggattcgtttagaaagatgcaaaatgtaaaatttctccagctaaattacacaagttctacggaagttatgaacactttctcaagaatttgatgtagttatgttggcatggattccctttgagatccagaccaaagcacttctgcttggagaagcttgtggctccttatctatccggaaccagtctaattgttgcttggaaaagcaaactggtatgtatctattctctctatatagctatctctcttattttcaatggacaccaactgatttcaagtgttttcacaatcttttccaaaatttaaaattcttgatctccgttgctcattttataagttctgctttatttcaactctacatttttgttcttgtatgtctagaaaaatttccctttgctcattttataaactctgctttgatggaacagatagaactttagggcaacagattcaacattgtcattgaatatgatgaaaatgagatgttaatgtggtttcacgaggaggaagaacaggagtggctactttagaaagagtttgtagagtacttgtcattcaaaatatcctcacccgccgcgcaccggttatgtggctttaatctattgacatggttttctgctatgacagtatgcaatccttatcgtcatgtttatcttgaaatcagaaacaatacgaaggggtagagtctgggtttcttaccccttaattttttcgacagaatttttggccgaaaaatctgaattgttatggctaagctattggaaatttgggggcaatgatcctgtatttgataatggtgatgaattcagtgtttacagatgatccagttgttgtgcgaatgttgcttgaagacgaaggtactgatgataatagcagctcatcaaacagtgaagttaacgcaatgatgatgtgcctgtagcaaaagcagaaatagcttctattattcttagaaattattattgtagtgactgttgtgattttgataatgaaattgttgtgtttttttaaaaaagaaattgaatgtgaaaataatgatgggttgaattgaaaatttctgagatttggtattacattgaaagctttttttaaaacattaattgtatatatcggaagaactttttggagtaaaataaataggaagaaatgggtcataaataaaattagcaaatatttggagggatctaattgaatgaacccttaaatatacttggcgagcaattatgcggcgagtactaggtgatctggctaccataggcctaagctcctccccaatcgagcattcttgaaggatgttgttggaaacacaaccattacccccaggtggtctaaatgtagagaaaagttagtcaggttgaataatctcaacaggtgtatttctcattatcatccctcttcaaacgcatccccatcgtgaccctgctttatcagaatcatcacggagaacttttcagtgataggaagtcgaatatgtaatccatcctcccgtggataaaccttcctcccgagatctaaccatccaaaattcttcagtatgtctttcccgagggtttgcatacttcttttaaatctctgatgcatgatatcagaagaatttattccttgatattgcttgtttcttcaatggaatggattacaattatgcagttaggatactagatggactcggtatag

SEQ ID NO: 7102 - DNA, 2180 bp, Populus trichocarpa
  Intron number 7 from transcript POPTR_0003s01280.1 (locus POPTR_0003s01280) derived from phytozome v7.0 (chr-ID scaf fold_3; pos 1150804 to 1152983 reverse strand)
gctttaatcaatattgaggatattgacctttatctgtaatgcttctgctctcagtgaactttttccctctcttgctgatgattttgtctacctgttttgagttcttgaatctcatatttagctcaactcaatcaagctttaatacacaaactagttagggtgatggttcatgaagttattttctgaaagctttcctgacacaatcatttgaattcaatatctttattccatccaaagcaaaattttggcagttgtatggtttattgttagcttcgatgcttgtaaacttctgcaacttgcaaacttaaaggactgggcttctccatgttaatttttgaggattggcataagtagtttgtctgtttccgacgagcatattaatattgatttatggtgaatattacatattttactttggcttcattaattgttgaaaaaaatggagggttgtgcttcaggcatctgcttgtcttcattaaccattggtctggggtgcatgtttacttatctgaagattgttgtcaaattgagatttgaattgggaatcagaaagccctttttgggttcaaaaattgtaacatccctttttgagtttgagaattgcaacattcagtcacaaatgaaagcaacattataaaatataaataacatactacatatttctaaataaaggataaatgatcatttactaaacaaatgcgctgcaaatcattttaattttctagttctaagtcggtaattgaacccaaagtctcaaaattcaacatattattttggtactttgatcattctaatgactcaataacttatgatatatctaaaagccatcttctagctagttaaattactgaatgtcctcgttttaataaggaaaatgatttacaaacccttcatactaaatttccttgcaaacagatgtgtcaactgataattggtaaagtgcatgtctcataaattttaaatgattggccttccattaaaatgtcaccggcacttatttatatgagaaatttgtttgtatataattaatcttttaacaaacagtaataattttctcaatatttatgtcagtatcaccattgtcattcttgttgtctttggcactcttgctttcttgcactcttctctttctttgtgaaacttgaattaataataacctatttaagtttcaaatagaaagatttaccacagaaaattgtttataccatgacctttaagacatcgcatttgtattcttatctcttttaaaattatgcattttacttctattttctatttgagttgactgagttgacttgtatgattcaatgaatcgaattgaattgtgactgaattgcatgatttatttaagtcagctattcactccatggtttcgtatgtgatcaagacagattataagattcgtgttgaatagtaagattgtaacaaccattttggaattgttactttgacatacatgtgctatttttgatgtggtgcaatgtttttttttcttttcatgtgattatttattcctatgttttttggaaatggagaatctgaaattagatgtataattgctccaaactaatgctagttactagtgcgttccagcatttatttagttggggaacttctaggttaacacagctttaggttaagacttttcatttgctgataggctctgccattaaattaaatatttcagataactggacaaactgtgctgtctggtttttagaattaaaccaaatttcatttgtacttttagagtgtaatatcctaaatgtccccttgaggaaggagggcgaggttggttgctgctctgcaacctattgtaaaaaaagaagagatgtttgtgatttaaaacagctttattgagttgactttgttatcttaagagtacccaatctttgtactttgcgggccaagcattctgccgatgtaaacaagagacttattgttacagccaaatatacacatgtaattcaaagggatatttctttttagactttttaacaaccagacagtcttcatttcactttttttcatttctaaataccactatatatgtatatatatactgtcacctgacattaatataatttggatctcttcagtgaagcatttcagttctttgtgactgagtttattgtacttttaaaatttctttcctcttattcttttataggttggtagac

SEQ ID NO: 7103 - DNA, 549 bp, Populus trichocarpa
  Intron number 1 from transcript POPTR_0010s09970.1 (locus POPTR_0010s09970) derived from phytozome v7.0 (chr-ID scaf fold_10; pos 10563177 to 10563725 reverse strand)
cagcttgttagtgctgttcatcaagacccaggttagcctgctccctccctctgcctcgcttaagtttcttgaatggcactattgcccaaaagatttgagggaaagagaataatgtagtgaagcttcttgaataaagataaaatgacttttttttaaccaaacagcaaataacttcaccgtcatcctccagccactgttcacttctctctgttgccagacaaccgagaggaaaaaacacacgatggagaattttctagtagtttcactccaaattcaggtcttcggggaaacaattgaattgtgttttttttgtagctgaggatttatttgtttgtttattctgagaaagtgatcgctaaggatttactagttacatgcgagattaagaaattataattgttgaagttagctttgaatattctttcttgtttaatcttgccaagaaagtttgcaataacagaatcaaaatcaagtttgattaggctaaaactgggaattttgtggtgtttagcagatagcttgcgagggaagcttggaaaagtagcagac

SEQ ID NO: 7104 - DNA, 1097 bp, Populus trichocarpa
  Intron number 1 from transcript POPTR_0015s14540.1 (locus POPTR_0015s14540) derived from phytozome v7.0 (chr-ID scaf fold_15; pos 14095130 to 14096226 reverse strand)
cattcttgttgagggcattctgcttgctgcttcaggtatgtcagaatttatgggattttgctttatttttttattttgtttttatggaatttggttatatttggatgaattgaaagaagctacaaatgtcaaaatctggttaaaatcttggagaatttcgagattagattgagttttgtgaattgggtttaattaattaaagtctctgatttgaaaattttctgaaagcaaaagtgttttttagattattcaagtcaatttggatactgaccttctttgattcaatagtgttagaaaatgttttgttgaaattactgattatctactggcatggccaattttctcaaaatcaaattgctttgctaatttgtttgcaattctatttaattatagatagtgtataatcatccgtatttagtattggtacttttttggtgttcaatgtttatgcttggtatcgtgtctccttatggctatgattactatgaacgaatttagtttcaccacaagaaaaatgatgatgtttttcttacattcttaaactttgtcaaaccatggcttgattagcaatatatttcattgaaagaataaaacaaagtatccaatagcctaattttagctgcctgatttgtttagcaatgaatatgactttggcatagctagttcataaccgaacgattatgctagtcctccataagagggtgactgtaaagttaatggaatttatttctttcacaaaggagcttgttttgctactaggttgatgcaatttcctctgttttattctctccttttttcacttggaaattattcaacgtataggaaacggtgcaatgcgtcctaagactccccttagcctgactggatgctttaggaaattggtgccattttgaaaaacaaccaaaaagaaggcataatgcctcctagcattaacatgcttatctaaagcttgttcctattataaagaaaatgaggcaatgattctactttgtttttatagttattactcatattgtatatgaatactaacctcttagctcctataaaaaaaaaataataactcagcattttccttcaacaggcttcctaccagaaga

SEQ ID NO: 7105 - DNA, 544 bp, Populus trichocarpa
  Intron number 1 from transcript POPTR_0003s14580.1 (locus POPTR_0003s14580) derived from phytozome v7.0 (chr-ID scaf fold_3; pos 14616811 to 14617354 reverse strand)
ctgaaattgtacgaagccgcgatccgcaggtaataataaagcaaacccatatattttttccgatggtttgatgctctactccctgtaaagactcaaaatttgggggtttagagtagggaaggtttaaaaatttgacggcttggatttgtcagtactgcaaacccaatttctgttttgttgcctagaaataatagatactgaagtaattgaaacgttgggcggtgtaaagttggtaaatatgagaatttaaaggcgtggttttgttagtgttttggaggattttggaatttacttatatttttttctcatttcaatttgctagtcgtgctaaaaaaatgcagaatgatgtgctggaaggtgagcattgttttatgagaatgggagtttgcatatgggggttgtgggatttaaagttttctagttactctttgcatgtagatttattgtcagctaataacagagcttgagcttgtagtttggttgtgtatttatgtaggccgcgtgtgaattgatttggggttgtttcaggtgttggagggtcttg

SEQ ID NO: 7106 - DNA, 1352 bp, Populus trichocarpa
  Intron number 2 from transcript POPTR_0005s12140.1 (locus POPTR_0005s12140) derived from phytozome v7.0 (chr-ID scaf fold_5; pos 8907361 to 8908712 reverse strand)
tttccagtgatcattgcaagtattttatatttcaggtaaatactctctctcaagtggtagtagtataaaagtttcgcattctttcagcccgtcttgtgatgtcaatttcatgctaatatgcacagtctatctgacagaaagtgttctccctgggaattatggctgcattttatctctgcaatcatatgttgtaatttcatgttgtgccaggagatggtgattaatattttagtgaaaacagtattagatggttacaaagtgaaatttatttaagaaagaatcataccaattgtgaacaattatgatttaatggttcacagagaaaaatgattaagctgaagctgaccattctatagtagttatgtttggtagttttggtctatgagctgtatctacatgtctttaaattgtaaaattccaccccagtcaatagatgtcagactttggaagaaaatgcatgttcatacattctttgttaccacgtgttaatcttggttaacaccatggggcattatcagacccagctttttaaggtgtcgtcacaattcactggccttgttagatgtgtcatgctcagcgttccaaggtgtcgacattaatcatggattttgattctccattttgtggggtatgcaacccaccaaatttacttaaacctataaatgaccactcatctataatatttagtatctgtagtttcagtcctttgattttctggtttactctgtgtcatgcccgttaaaaacttgaatccacaagaaaaatagtgaatagttagaatatatagaggcggtgataatagttatgactggattcatcatcttatgaaagtttgagagagaagctatggttcaagcaaaattgatttaaatcttcgatgctgcagaattttgtgattcatgtatgctcacactcagggtgccaaggcaggatgtgagggtattctcttcattttacagtaaaacaagggccttctgtgattcccatgttttgctctctttgcgagcaagaaatgccttgcattcagcattccctgttggcttctctggttgcaaactcaactgagttacttattagttaatgaacaacacaagactgagggcgaagatgttgatgaatttggcaaacattgacaatggctcatgttcctttttgaatgaacttgatagctgtgctttgtgacatagcataaccagcgataataatctggaataatgattaaatgtgatgccatgcatgccactagttaattttcaatcatttttttttcttctcagtattgttctgctatcatctaatcttcataaaatattttagttgctacgtgggctgaattatctccactctgcaaa

SEQ ID NO: 7107 - DNA, 1433 bp, Populus trichocarpa
  Intron number 2 from transcript POPTR_0019s04850.1 (locus POPTR_0019s04850) derived from phytozome v7.0 (chr-ID scaf fold_19; pos 5092746 to 5094178)
acctcccaaggcatcattaacgcagttgagaagttggtgttctctaggagttgactttaaattgatctctcatgttcaagtttgtgctcaagaaatttaaaaatgtgggtttgtagtaagggttgtgattattgttttggatatcttttgataattctattgattttggatgaagttatggccttattgttatactttattacgcgtttgtacgagagtttcagcttctcttatccccatccaatgttaggaaaagagaagcttgcgtaatattcttgatgtatcgagattcaactattaaatatataatatggcctcacagttggactttgctaaaatgctggcttggttcttgaatcttccataagatggcagttgggattttttaattggagaagctaacagcctggtaggaattaatgcgatgcgtttgagttttacttcttactaaaaaaggtaggcgttccattttttttttatactcagagctattatacctgcgtatctattctgtagaatatgatagcatatgcttagagtttctaggaaaataaaatgggagattgggctttggattcttagcaagcactcctccgacttttatctgtatgaacttttggtttccttttcgtacgcgttcaaaaacctattggagaatcatattctcggtggcatacttttttgagagaactttgtattggaaaggagaaaaagatggcaaccttgcccactccaaaagccaattggaatgggatacaagtagcacaaaagaattaaatgttctgcaagacttgtttgcacaatttctccatatccaatgcttgatgagacgtgggaattaaattgaaaggagtccgtagtagagttcctcaacttaatgccctgtttgccacttaagttaattgtagttatttaaaattctaccttacattttctattcttgtgatcaattttgagaaacagaaaatagaatatccatttttttccttcaagaaaatccttttctgaatgatttgctgttttgacattcataatttgtgttctattttctgtgagaatgcatctggagttgtgtattagagctccagaacatcgtgctttgtttcttaattccatatcgatacttggttgaaaaattcaactttacatttctatcttcttaaaactacaagagatggacttgttccttgtgtgtggtgtgtgtgtgttgtgtttgaattctatatctacattcaatggattatctgttgaatggagggatttgtgcaaattcagaaacacatcatctcatttcatagcatataaattggaaggtttacattcattatatggttttaaatacgttctatgttgctgttgtccggtgttgttgagaatgaaaactcactattaacttctgcattcctttatatatttgctgtctcttcacaggt

SEQ ID NO: 7108 - DNA, 4593 bp, Populus trichocarpa
  Intron number 3 from transcript POPTR_0007s05730.1 (locus POPTR_0007s05730) derived from phytozome v7.0 (chr-ID scaf fold_7; pos 3853095 to 3857687 reverse strand)
aaataaaggtacttttttaagcctttcttcttgcatacaatttctttcttcttgatcctcttgactttgtttgtagtttatcatacatgacactatatgacaggaaaatgtgttttgacaatgttcagggcatatcaatttaaggtgttcatatcatatcaaatttttatgggcatgtttccataattagatgctgattacctcataaatctttattgtgtgacgtagaaaatcatttgaatgcatgtgacaattttcgtaaatatatgttcatagattagtatatctaaaggaaaattgtgttactctattgatagtaaataggaagagaagaatggattgaatatgacagacagatgcttcaaagatcaatacaagttactcaatcttcttttttcacaggaaaatgtcttttgtaattttcctctccacccttctctccaatggctttgtctctccctcccacctccacctttttcctttttccttggtctaacccctgcttttgtccctaggaagtaggacctacagtttccccctcctgaatattataaatgtttccagttcttgttttcaaaataaactcatccattacacttgggctcctccaccttgaagggctatttgaatggtgttttgactgtgataacttgttgcagttttaggttgatatatgtatggctgttgtgcatgtctgagaggtcttgatctaggtagcttattgttaggattctcagatgtgggcttttgatgggagcaatttctgtctgccctcgaacgttctgggatgtggattttgaatggtataggagatgaagctggtgaaggaagctggcataaggccaaaggggtcacggttgtgggtatagtggttctctatgtagagcctggtttaccatcaattttctggttctgtctagctcctttttactcttttggattaaggccaaatcaccattgcagtctaaaaagatgtggcttaacctctggccctcctccattgatcattgatcccagagacttcttactaggctgggcaaggtgtgggttgggctttatacatctttatgtccgaaccaagcaaacctaggcaaatcttctaaatttgggttaatattccaaaatcatagtccatgaaatctcatacctgggttaaataaaaaagctcaatccccaatcaatttaatgttgaagggttaatattccaaaatcatagtccatgaaatctcatacctgggttaaatcaaaaagctcaatccccaatcaatttaatgttgaagggtaaatttgagaaaaaaaatcaatctaaaaaacttgtcagagcagaaaaataacaataaaaaattaaggatcaaacccaatggaaaaaaaatggaggataaaatcagaaaaaaaattaattttataaatcatcctaaataaaaaaattagcaatcaaaagaatgagcgtcaaatttgagagatgaaaaaattgaaggaggatgaaattaaaaataatttttaatttgaataatttttcaaataaaaaaattgcaattaaaagaacatgctaaatctgaaggaaaaagaaaattaaaggctgctatgaattttgtaaggaggagctacatgcaaattgagttgaaaagagaaatgaagggaaaaaaataaaatccaaccagcatcgcaccactcgtgaaggaagaggatgccgagacaaatcaaatgatgtgacataataacaatttttactactgaagtcaactgcacgcgctgcctgaaggtggtaaagtcgctaatgcatgcaacacacgtgtcggtagcttttttgttttgttttattatttaaattacaatattgcccctaggatcaaataaatattacaaaaaaaccttcatgagattaaaaaaaaaaaaaaaaaacctgaaggtattgaaaaagaaaaaaaaaacctgaagccatgcactgagaattttgtttccaagggtaattgggtcattacactaaaagtgtccctagactatagttaagttttttttttttgcttttaagggtattcaagtaatttttattgtgcaaaaaaagggtcaaagcttataaaaaaaaaaaggagtgtggtctgcatgatgaaaaaagtggatgcaaatgactaatccgcttaccagttggttgtgcccaggtagtttggatttaatctcccactcttttaacatcttcacattggaatagctctgaattgttattagtttaataacactctacaatgttgttcggcgaaactgttgatacgtactataaatgtaattgcatggtctatggggatgaagtcaagctcggcagataaggggaggcttagtatactgttaagacaattaaaattgatgattatttgataggagcctcttggggacttggacaatcatttctgtggcagttgggatcttccattgtttccttcaaaacatcactatgtgtttgtggtatcatttaacaacccatgcacacctaggagttgtaatagcaagttattaactgaactctagttctctataactgacaaccatgtgaatcctttggggtctcattcttgtacgtgtctgagctattgttcaaatgtcttaaaggaatttggtgctctcccaccagagtatgctgttttttgaaaggtgacctccctgatagaccaagccttgtgcacaattctaagcattattgtttgagaattatgtttgtgcacgcccaagtgtgtataaattaagcccccccaaaaaaaagtttgggctttgccattttcaaatgtcacaaatctaatctgaaatctgtcagccaattgttattacagagcagtttagatgaggccaagaagagtcgctaacttggcactaatttctttcaattatgagagagagagagagacacaagaatgtctgtatccactgtggttgcatctgtcttgaagattgggttgacttagaggatccacactcatgctagccaaacccaatccttagctataatagctagtgaaagcgaaaaaaagtaaagcatcattgctctctacttggctagttattctagcaaaatgaagaggaaaagggttcgctatggaagctttggtgctaattgggtgttggttttggtgtcagcctggaggcatttaatcactcctagtttatcaatttgttaatttttttacctgaaattgagagaatttgtttggttctaattgaaatagctagaacttgtaaaatggttagcctagggtaggaagagcaatttgggttgaattagcatcatttactgtgtcgatcagttagattagatagttacaaatctaggatttttcgatagggtaggaagaacaatctgggctgtatcatttcaatgtattccacttgaaatttggtaggtgattaacttcatttgatttttgtaccagttgcttccaaaaagatttgtaataaagtacaggaaagatctctgagatatggtagtgttcatgataagttagtcaaactaggtgttctgggttttttttttttttttgtgattcaagtgctgggtctcttctgttattatcaattcctctttcttaacctcaccaaccattgttaaaggtgtaatcttttggtatagttgttgaagttggatggttattgggtcccttttgtttaatgttcgagattgttaacaaaacttgttgaagtctaattttgatcagcttatttagcttgcaactaaaaagaagactgtagcaaatgaagcatgggcaatgtaacagcttattgaggcagttggctcctacaacttaccattttcagaatctctgctttctttttgttatgctctagaatttccagcttcgtgtaaatgtactgctttctaaaactgcattagaggtgacgttagtgtttttaccaaccatggataaaccaattacgctaaaaatactgagaagttagtgacgatgctagtccaatgactccttattttagatggtattacgagtctaatgactttgctttgctgttagtttaattttcctgatttatcagttgtccatatgttttctttgtctactaaaaatgaatgtttcatcctaaaaagggaaggatatgagttttatggaaggattttattcaagtgcatattttacaaacacattctcaatattttcattgtcaactctgatattgctgggaactatctttgccgtgtgacttttgtctatgggtcatataatgctactgttcataacaagtagctggaaagtttgtgatattactgggaactatctttgccgtgtgacttttatctatgggtcgtataattctactgctcataacaagtagttggaaagtttgagttagtgtagctagaatttagagagcatgaatgtaataatttttttttttctagctagctaaaatgattttttaaactattttagttgaaatttagctaaaatttaaagagcacgagtgtggatgctcgtagctatccttgatagtttcttagttattaaggctgttccaagtttactgttgcctcttttatgtaaatctcactgataattctgtctctataggccagtgaatctatcaggagagagt

SEQ ID NO: 7109 - DNA, 663 bp, Populus trichocarpa
  Intron number 6 from transcript POPTR_0007s08460.1 (locus POPTR_0007s08460) derived from phytozome v7.0 (chr-ID scaf fold_7; pos 7302390 to 7303052 reverse strand)
ccaggtatatagtgctttgataagttctgaagttgtcttgacatgactgatatttctttcatatgatctattttagctttttggaaaatttcacatggaccatgtcaactttaaatgtgctttcaagatatcctgtaattgattgtctaatgtgcttgtgtgtctgtcctgtaattgattgtcttatatgtgtgcgagtgcgagcaatctcctagattttgtacttgtgggatacagagacatttcattctattgacattttatcacgtctattgtcacttaatgctttagctaccaaaaacaatgttagcactaacatcttcactacttccattgccataagcagcttcacactgaccacttccatttgccacactacagtactttcttttctgtggttcattgctgcttagaagcacaatgactcccattactggtcctcacctgttgctccattattgttgcgatatcttgtttgtaattacaaaccactattgctattgaattgtttaaaactgcacatgattggagttttcaacttattgcaacatctattctgcatactctaacaagagtttcctcaattatcatatgatcattcttcctggtggcagcagttgtgaaaccgatgtattgatgtttttttcttaccatgagggaatt

SEQ ID NO: 7110 - DNA, 1325 bp, Populus trichocarpa
  Intron number 1 from transcript POPTR_0005s09680.2 (locus POPTR_0005s09680) derived from phytozome v7.0 (chr-ID scaf fold_5; pos 6772079 to 6773403)
actgtttgtcagctcgttgatactgctagcagagagtaagattttgcccttttgtggttttttttaaaaagctttgattattggagattttgtgatatgggttttgttattttgtgtaattatgttagaatttgtgtttgattagatgagccctaatttgttttcctagataattagggttgttgttaacactaattgtagaaatacttgatttctcttagacgtgcaatgggacttgaaattgcgttttattacagaaaccctgattttaaaagacatatttgtagactgctaaggttggtgttttcaccaaattttgaattccccggttgttttttattgtggacttcgtttttcatgtgtagtaaaatcagagatttcaccgaaacctaatttttgtgatcccaaagttttttaacaaggttatgttagtgttgggtgattaggtcagagattatgtttcattaggcaagccctattttttatgtgataaattttgaatagctaaggttttgcttttcctgactgtagaaattagtgggtttttttcccctctctaatatgggttttttctgtagtcatgtttgacgaattatttttaatgttaaatgtcattgtttttatggataaggtttttgtttgttctcctctaagttggttgttcgatgttattttttatgctatgctgtttccaagtgaaccctaattctgcaaaatccaagatttgatttgtccctctctcttgttatgtttctttgttagggtcatgtgtgctgaagtttttcaatgattgtagaaattagtggtgttttttctctatctctaatatgggttttttctgtagtcatgtttgacaaattatttctaatgttaaatgtcattatggataaggttttgtttgttctactttaagttggttgtttggtgttattgtttatgctctgctgtttccaagggaaccctaattctgcaaaatccatgattttatttgtcccttctcttgttatgttttttttgttaggttcatgtgtgctgaagtttttcaatgattttagctaaggtttttaattttgtcatggttaagttgattttggtattgttctgatggaaattaagcttgaaacaaaacaacctccaagattgttcaagttgaaaacatgaaactttagtcttattgtagttgttgcaagtaattaaaggactactggttcttctttttgaggttggtttaattcaggttgacattgcagtttatgtctctgccatgcttacgttggcttgattttacagggtccaggcattgatattgtcacctacaagggaac

SEQ ID NO: 7111 - DNA, 2588 bp, Populus trichocarpa
  Intron number 2 from transcript POPTR_0015s14910.1 (locus POPTR_0015s14910) derived from phytozome v7.0 (chr-ID scaf fold_15; pos 14322280 to 14324867)
gatacgacatcatcaactcaggtttttttttcttctctttttggataagttatgtagatttaaaaaatgtacgagaagactcgttatcgagcctataattgtaataaataggtactcaaaaaaaaaatgagggtaaaattattaaaaataggtattaaaaaatgagggtaaaatttgaaagattaaaaaattatagtaaaatatttgtaatttaatatattatttatagataaaaaaaatcataaaagataaaattaaaaaaattcatatggggcacacttaaaatataagaaaacaaaacccaaaaaacaaaaaagataaaaaaaataagaaaacataagctcaaaaaataaaaagaaaaaccaagtaaacctcctaaacctggtttaatttttaaaactagccacttatgaaatcctaaacctgagttcaatcatgaaacttaactctcaataaatttaattttgaaagatgaaataaaaaaaaatattaataaaaaatagcaactaaaaaaataagaataaaacttgacatgaaaaaacctagaggataaaacttgaaaaaaaaattaaaaatgatctcaaacaaaataaattgcaattaaaataattaggaccaaacttgaaagattaagaaattatagggggtgaaattaaaaattatttgtaatataatagattatttatagattaaaaaatagtaaggggtgaaatagaaaaaaataaatatagagggctaacccagtagaatcaaactgaaaaaaataataaacaaatttttttttaaaaaaggataaaaaataagaaaacatcaatttataaaaaaaaatacaagcaaacccaacaaatctcttaaacctggtctaatctttaaaagtcacgtcctaagaaatctttgacccagattcaatcaaaaaacctagttctcaaccactttaattttgaaggatgagatcaataaaaaaatactgataataaaaaactgcaaaagcaacaaaaaaaaaatgaagataaaatttgatagaaaaaaactcaaggagaatacaatttaatgaaaaaatacagataagatctcaaatacaataaatattaattaaagtaataagaatcggactttaaagactaaaaaaagcataggaggtgaaattgaaaaaaacatatgtaaaaaccaagcgaacctaatcaaatattctaaacttgatcaaatctgaaaaactcacaacctatgaaaccttaggtctgggtctaattaagaagtttattgtgagccaatttaaaaataaaaattttaaaaacttgtcaaagaaaaaaaatcaataatttttaatttaatgaaatggattaaatttaatgaaaaaaacaaagtatggtgaaatcataaaacaaaaccaatttaaaaaatgatcccaaataaaaacttttaaaagcagaaaaattagcaatcaaaagaatatggatttaatttgataggagaaaaaagcaaaggagggtgaaatcccaaaacaaagtcaatttaaaaaatgacttgaaacaaaaaagtagcaattaaaaaaaaaagaaccaaatttgaaagataagaaaaattaagaggtgaaattgaagaggctcaccaattttatagatcattcaagattaaaaaaaaaattgtaataaaaaaagggaccaaatatgaagaatcaacaaattaaagggctattcttgaatttttaaggggtcgatatgaaaatctaggtgaggaaagagaagaagggagaaaaaaaaaagactattgatgtgctaaaccgtcgtgaatagtgtgacatgcactgcctcactaggtttaagacgtcgagacttttctaacgtcgccttaaaatgtgatgtttggtggcaacatgaccgctcataggcggccagagttgcatgacactaccaagttttttttaaaattatatttaataaatataatttacaatagtaccttttagtaccttggaaatttataataaaaggaaagtaaaacgaaaaaaaagagtttaattggttttgtctaaggatattacagtaattatattgtttctataaaaaataaaaataaaaaaaatgtttttgagtataaggcatttaattatcttatttaagggttaaatgagtatttttatcgtgtattaaaaaacataattatcaatttcaaaagaggctattttcgattataattttttaaaatatttttttgtttaaaaatatattaaaaaatatattttttaaatatattttttatattaatatattaaaataatataaaaataaaaaaattaaatcgaaaccaaaaaaaaataattttcttctaaatatatttttaaaacataaaaacaaaaatacaacatgatgttaaagataagtgatgacaagcgatgatatagtggtcacgtcggcttgcaccggagatgaggatgatgaggctaggaaatttggctggatggcagcccaaccgaggctgcacatgacagcctctgcttcgcgctacgctctctagcattgtgtaaaggtgcttttgctaggagattttttattgtctttcatttattgttcttgtgttggctttgcagc

SEQ ID NO: 7112 - DNA, 1498 bp, Populus trichocarpa
  Intron number 1 from transcript POPTR_0008s04030.1 (locus POPTR_0008s04030) derived from phytozome v7.0 (chr-ID scaf fold_8; pos 2218656 to 2220153)
gtcagtgtagaagcagtaactacgtaagaattcaggtatggtatctcgttttgcacaacttggacatggtttttagttttgcttgattttaatgcacaggagtcgggacagctgtggccaggctggaatggttaacctagctgtgtcttttacactcatatacaatttttgtgcatatttagctgggtttgggtttttatgcaattgaatgtggtgtttgcaagtgtaaatggggtccgtggtgcattgtgtctggtggcttctgtttcgccgacatgtagtagggatgcccgggaaaccataaattcaagcccctcagtggcactacctcatggcgacgggtgtgtttgccactgctcttcttgttttctatcgccagcctcgagacttggatttcttagcgttgggttctggaaataatttgaaaaaaaattaaaaaacccttttaaaataaaaaacaaacacccttaatcttaatttcatttttatgaaaataattctgtgcatggaagagaaggtagaaaagggacagtgggggaggcttttgtggtgggccggggggttcattggtgttttttctgcaataaactgtagatagaaatggctggagactggattttcccaagagtgggtggtatcaatgagtggttacagaaatatcactcatgattttattttgatatatatatatatatatatattagctagaggcataattagctatgcttttattatgaggatcacttgtagccatgctttatttgctgtcagatgcaaggacatggtccgtgtctttggaattcttacaccgcctttgtgttaggcacctatggtaagaaataaatttgaagagagtaaaattattaggcagtccatgtatttaatttttgctatataaagtggatacaaagttgataatagagtgtgtggatgacaagtcatgctgcttttcttttcttttttcttttttctttttgatatttaatcgacagagtatcttcggattgtacaacaccaaaaccaatttaccttccaatcttactttgttaggtaccattccagcaaacctactattgcatccttctagtggataattatttttatatggaattaaatttataattttttttttttgaatctgaaaatgtgctgagaatgctaatcttaatgtggttttaatcatgctgctaaagcaaatatagaatataaaatgagcagtggatgccctcagttgtacaagctttcattatttgaggggccaacgtcactgggtccattctttttggggggtggtttggctagttaacaaggttcggtaatttcttatagtagttggattaaagtagcaataatttaattacatttctccaaataattccatggattaaattatctgacacctgtggtccgatccctttattatttattatgattcagtgtttttaaatatgatatgtgtttaatctcctaaccatattaactctggcttgacaggcaa

SEQ ID NO: 7113 - DNA, 594 bp, Populus trichocarpa
  Intron number 2 from transcript POPTR_0009s12110.1 (locus POPTR_0009s12110) derived from phytozome v7.0 (chr-ID scaf fold_9; pos 9932829 to 9933422 reverse strand)
ccattcattcgccgacttcctgagttcaaattctggtaatgaaagtaatttttccacttgtgacaattagtcttgtaattacccccatgctgtttgtatgtgtatcaactcagttatcctgttgtgtaattgctttcattgttctttataacctgataaatgattcctggtaatcttccgagacttcaatcatgaatgatccacccttgagtaccttttggctatatatagcccttcaattggtggttctcatagttcttgcagattcaggattgctttaaaagaataggtggttggaaagctaaatagttttagtagtgtgtttgattaagattagatgtttctactattccatgctttctcttaactatatagggctgcttttgggtataggataagtaaacaaaccaaacacatatctataataaacaatacaagaaaaagaaatgggttctcctgccattgagaaggggcgggataaggaagaggggattaaggaaatcatctttgatacatttatgcacaccagtaatcctgttgtttctgtcattatatccaggtactccttcacgaaagcattcgtcatcgcatttg

SEQ ID NO: 7114 - DNA, 588 bp, Populus trichocarpa
  Intron number 1 from transcript POPTR_0004s12350.1 (locus POPTR_0004s12350) derived from phytozome v7.0 (chr-ID scaf fold_4; pos 11455587 to 11456174)
aaaaagagattggcccagatcagttttagagaaaagtaagccaacccatcaaggattttcccttttgttgaatgtttgttttgcttttttgatgacccagttgaggatttgggttgactctagtgtttatgggagcatcctcttggtgggtttttctttttatgttgttatgtccatgcaagttatccttattctttgagtgtttcctttgattctgaggatttgtttgaggaagaactacttgaagttttttaggtggttgtgatttgtagaagatttgttgttagaaatcttggtatgcttatatgtacgtgtgtttgtgatttctttctattagtgtggcctcctgcatcattttgttgcatgatagcgtggttagctttgcttctaattttggatagattcacctggctatatttgattgctggaaatcccagttcaaaactatttccttaacagtgtttcttttttgcattactcacctgttctgcataacatattcatgtgctctctgtttcttttttctttttttgatttcgtttttatttggcagagtatccaattcaggatcttggtgaaatatttgtc

SEQ ID NO: 7115 - DNA, 1044 bp, Populus trichocarpa
  Intron number 1 from transcript POPTR_0006s19200.1 (locus POPTR_0006s19200) derived from phytozome v7.0 (chr-ID scaf fold_6; pos 18180528 to 18181571 reverse strand)
tcttcgacgcttcctccacggcaacaccgccgccggtactctctctctttacacatatatttacagttttgtactcctcctttgccttctataccaatttgctttttttgtttttttgtttttttgttttgggcctcaaagattcttgctttgaattcacgttgatcttactatcgatagcaaaggaaaagaaaatctgtaataatatatatttcgcgattctcttaaagttaggcttgaataggcttgaataaattgattgcttatttaaaatcttagtaaaaaaaaccccaaatttaaccttgaattatgctccatctcgaacttgaacttgagatttagttttggtaatctgggttgttcggtttttggaagttttaacaatctatgagaacgttagtttcaaatttgaggatttttttttataaataagaatagctaatggaaccagatgtgcctgctggtgcattgcgtgtacatgatataatgatatgacaatggtgataaatggtggtttcagcttttgggtttatgcgtgtgggttatttgtttagaaaataatataaatcatatcttgaagtatcatctaatagcttaagcttttgagttagatgtttgtttgacaatttgaacttgtttatataaatgctttgtaggtaatccaattgtcaatctttatgattttataatggtgtctcatatgttctgaggtgattttagtttctggctactttaaaacattctgcagactggcatcacaggcacaatcctgtaatgatactgtcctgaaggtcatatgggcttgttttggtcatggtaggcgggaatgtgtctattgttgaaacagattgttttagaacgcttggaaacctttctgtagatttaaacggcaaatagaatagacattttgtacttttatccattatagtgtacattgtttcacacttggagtgattccatagattgattgaaacaccaatctgcatctcagaactctgattgaaaattaaaccttaatgcttgtgcagacctgagagaattgtc

SEQ ID NO: 7116 - DNA, 2636 bp, Populus trichocarpa
  Intron number 2 from transcript POPTR_0008s05160.1 (locus POPTR_0008s05160) derived from phytozome v7.0 (chr-ID scaf fold_8; pos 2998358 to 3000993 reverse strand)
ttacttgattaagcttctcttgattggggatagcggttagtttttttttcctttctatctattatcctgggtttgttggattggaagggcgctgtttctgttttggggttttgatttggaatgtgatgcggtgatctaagggtgtttttttttttttaatggttttgtcaaacggttttttgttgtttttttggtttcgtggtggatttaaggaatattgacctgtatgaggctaatcatttgaggatttgcttaaatggtgtttgttcgtgatctggtgaggtggggttcgggttttaacaggcatttgcatcaaaagtggcattggtcatgtttatagctccactcagcattgccagtgacctttctgttggattgcatggatgatattgattattattattattattatgtttctgtgagccattcccttaaaatttgtgtttgtatgtttagtgaattgaatttgggtgagcaggacctgcaatgtaaagtgttttaattggtcacagagcttgtagcagttggtcttaataggatgtgtgcagcgttaaggaaacttcatgacagcttgaaagttccattatgtactcggatgaatgttattttattttatttttcatttatgatgcctgtgctcttttaacaatcagagaatctggaagtttttttgtccgttctgtctccatccttggcaaattttaagtcatggtacaggttttcctttcatgttttgaagtctgatcctattgtgttcaagcagttttatttatttatttacttagatccgttacatgttttagatttggtgatgctgagatggaccatttattgaatcattattgacttggtttatttaattaatttccccatcgaagtggggttttgagagaggattttggagatggccctatcctgttccttttttgaatgaaatagtagtgagcaggacacatacatgcaccatcaaaattgcaacccaggacacttaaagtaatattcactttggccggtctcccacttcccataaaatgcaactagatcttatccttttccaagcagtgacctcattgaaacgacactttttgcgtagttagagatgctgacctctgctgtatccatgtttgcaattgcatttgtaaatgcagattcattaaaaaaaaaaaaagattaatattttatcttcacaaggggggttagattgagaatcattctctagtggttgccagtgtctgctgtggggggaggtggtctgaccttcgaattcaagttaatggctacatgtagcccaaattcaacctcatctaatggccaattgtcggattgcattgaactttttggtgcaatggaaatcatcaagaaaaactgggtggataagtggtttaaagttaataaaaaagatgagttcagggaggagaaagtttgtatgcggtaatgaattctagatgttttgtggtttttcctgcattgttgatggagaagatatgtacctgtaaatgacccttctatttgtctgcgatggagaacttttccctaaggagaagctgcagataccccaagcatgcattttactgatttggtagaattttttaccaaaaaattgtcttaggatcgagtttagcaattaaagacaaagtagtaactctggctgtctatgtgatgcaaccggctgcttggttcatttgtctccctaacttgagtcttgtatgttgattccttggtgaaattggtagatgctactgtttggagattaaagagaacaaaataatacttatttgagttgtcatgatgcagtagttttaggcaaattatgattctttctttgcactgatcttgaatgacttgacttgcttttaatgcatcacaggttagtttgtcaagtttccccctttatcttatttgtttcttagaatagtaagtgtatgtttgattccccaagtattgagagcagaatggaaatgggatttctttccaattccaagtagaatttatattttaattttatttcaagttgaatgtacttataagagtgttaataacacaaaagggaagctatttagttcacttgaaatgtaatttctcatttttctggtgaaattgctgcccttttgttgaacttcaccccgcaagatttatttgagggaattccctctcaacaagtgcatgatgaagtggtcaatcttttttccacctcaagagacccatgttattggcagtaaaacagaattgaaagggattcatattccatattcactcctgaacaaattaaacatactagtcaggtgttagcaaccccacttgccccacttgttgtatgtcgatcagtgattgatttttgattggattcttttttaaggtaaaccagttgaaagatttttcaattccaccaggttgctccgctccttaatattttacatcggtatctgctggcagttctcatttcctgccagttcgtatctgactttaaaagtaacttgaatctatgtgatttcaggggggattcaatcctgacattatgggctgatctacatactatgtcctgtttttttcttcctctttcatgattatttgaaatcccagttcttgttaatgtttttgtaggtgtggggaagagttgtctgcttttgcgtttttct

SEQ ID NO: 7117 - DNA, 2166 bp, Populus trichocarpa
  Intron number 1 from transcript POPTR_0002s07980.1 (locus POPTR_0002s07980) derived from phytozome v7.0 (chr-ID scaf fold_2; pos 5523313 to 5525478 reverse strand)
ctcttcgtgttggcgatcgtatcatcattgaaaaggtttatcatttttaacatcatcccttgaacatctatgctttggtatcgtgtgataattttcgctaggggttggtttagtttgcttgccttctacagtggcgtttaaatggtatgtcgatataataattacttttcatttcctgaaaatacaatcaatgtgttgtttaacaaagttcaattatctgtcatatttgcacaagtgatcaggcactgctacttgaaatgggaaagatgaacgtatttgcacctcccatttctttattgcttgatcaactttaggcatcctatgggacaagtagaatccagggacacgttttataaatctgggttctctcatttttaccttcctgatcggttaagacagaaaaaaaagaagctagttttattcctcaataagcattgaaggtatatttttgtatctcactcactctaccttttaaaatactttagttgttgtgcgaggttctccaggtgaaaaattccaacctttttctgggaatatatgtccatctatattgtatagatgacatttcttgtcagtttgctgtttgctgtttgcgtatttccacaatttatctggctagtttagctggagtgagaagacttgattgtttctatagagattctttccatagtctggaaggtgcttttaattccttcttttcaagtccgcagtgatgttaattacacttaagtgttttctcaaaatttatagtttgttccatcattttgagaaagtgatttctgtcaaagattaaatctgcttttcatcgcagcaagtcatttcggtcctctgaagtaggtttgaaatactccttaggttgcagaggattcctcattatgtttctatgtagattatagtccgattgttcactccagatcatatttaattgcctgtaagaagtgcgagattcatgtaaaaagcaaccatgagtgcaatcattgtcaaaaacagataggtagtcaccctctgcaatgtatgagcgcattcactgaatgggtaacatcactcttgcattgtaatttgtaaatgcaaaatccggagttgtactcgattagtcagccaacctgattttcttatgaaacatcattgaagcaagatgggcaggcgtggcgttgttcgaagtcagattcttgtagaaggtactttattggtttacagggctattctgagtagttttcctttgaaaaacagttttgtaactaccattgacatgattatgttcttgttaccattgggtgctggggatccaaatttgatggccactaactcatctacaaaagacttacaactttctgaattatagttcgctatatctccctttaatcagacaatttatccagcttgttgctttgttaagctgggggtgtttctgtacccttttcatcaacaagggagtgttctatcccatcctttaatggggccatatttatggaagctctgtgaaggctgtgtttgaccagaaagaattgttagttgaggcttgtattttcttagcgatagtgttagattcatgttcttgaaggaacctagagaagtttggtccctaaatatcatgacatctgcacttcagttgctagatccaatacatattattgaagaatattgaactttcacatgtgttaggaaacagaaaatcgtttgccatatgattagcattattgaacgaatataacagtgtcattgaattgagtaatgaatggtaccaggatgttcacttgaattgatcgcaacatttatttcaaccagcgggaaaattgtcagtataatcaaatagcaatgtttgccaatggttccatggacatgttttgataactgagaagttaacgagagaatacttgtcagttaaaaaccattttgcaagtctgtgaggaagaattcttcaatctttgagaaatctagatgcgcatgcttcgctatttcttgaacctgattgcaaatgttgttcttttgtatattggattcaatggaatcatttttgtgcttgatttggcattttaaaccttgttttatttctctgagaatgcatttttttcgtcttactgttaacattgtacactttgggttttaactaaccagtggcactccaaacttctcaggcctcatactatctcaaggtaccggctataa

SEQ ID NO: 7118 - DNA, 151 bp, Populus trichocarpa
  Intron number 5 from transcript POPTR_0006s01900.1 (locus POPTR_0006s01900) derived from phytozome v7.0 (chr-ID scaf fold_6; pos 1143150 to 1143300)
agttgaagagacagattgaaatctgccaggtactattctgtaaaatatttggttaattgtttgcatatgttatgtagattttgcgtgatgcggatttggaagtatatcacatgcaggaggagaacagaattctagagaagacgaatcgcca

SEQ ID NO: 7119 - DNA, 1232 bp, Populus trichocarpa
  Intron number 18 from transcript POPTR_0003s19340.1 (locus POPTR_0003s19340) derived from phytozome v7.0 (chr-ID sca ffold_3; pos 18097633 to 18098864 reverse strand)
gcatagaagctgattatcaccacaagaataaccgggtaagttttagttattaaaattgatgttcgaacatcacatttcatttttggttaaaacatgactttatattccatggttatggtgctattgaatcatttacttttctaccatttcagttaactacaagtaataatattagatattactatctgatatcatttctaatgtggtaattaattctggaatatattgttgttggggctaaaagattatatttgttgaagataaggtaatcgatgtgtaagtttagaattttggaaacacttcaaaaacacactattctataaatgtttgggaacatgaaaaacacaaacataaattgcataatggatataaataagggtatcaggatgttagagggatgttctttgaggaatactgaccacctaaactagaagaaaataatgggtagctagagaggtgtatcatggattaaaaaacaggggggaaaagaggcatgtcttgtataaaagcattgcaatgtattgcttgaacctaatctgattatggttagttaattcagatcttggagggacattttcccatggtactaaggacaattttgtagatctaatgggtgatattatgatcaatgtctggtttgttacacctgactatcaggatatgctaacacgcatgttcttgtgactaacatgtcttttagttcctcgtcaaagttaataagtgaatacatggactcaagtataaatgtcccaataatctaatgaagtgaactgttttattggtatcaatcatccagctttaataatggttaggacattcacttggttttgcgtggattctgcatgattggatcatctacatctgctcttagttttatggtgagtagagttgcatgtggctccctagatattaaaggcaaaccacattaatgaatcatatgatctctatttcttgagatagggactgggatgataggataaggtaatgaatgaccccaaattcttatattcgcacaaagttgtgatgggttgaatgctgtgtcaaagtatgaacttaatgtgatctgctagtcaataagcacacaggtgactcctcattttagctctgaaggtgagctttgttgctgaaagttgaattgttatgataagtcatgtggattgctggctgcaaaagttataattacctctgttttcccaggtttattgctggaaaggtctccgtgtctctgctag

SEQ ID NO: 7120 - DNA, 2290 bp, Populus trichocarpa
  Intron number 2 from transcript POPTR_0004s10345.1 (locus POPTR_0004s10345) derived from phytozome v7.0 (chr-ID scaf fold_4; pos 8885760 to 8888049 reverse strand)
ttagggctcctggtgctggtgtgtttgttggtgaggtattttttcatccaggttaatggtgctttattctggattcttgggtttttgatttctgtttctttttattttttattctgcactgatttctgtttctttctttttaatgcactcttggctctcatgatggcttgatgtttgctcttgtccttttgttttgctcatttcgttgttctgtgacactttctctgtctttacttatttttatgataagtttgtttgttatctttgatcattggttaggttttgtgtattgtgtgcattcaatgattgtttttgccttggttgtagttgtttgcaacgatccatcgattttgtttgttcttgctgttctgagctttggtgttttttggaggtctgctggcctgcgctgagtgtttggttgttgtgtgtatttcatttgaatttacttctttgtgattgttatttctgattttgattttgttttgatgtttagactaaacgttgttcggcttatgttatatgatcttttttctggtttaggatcttcggtttttttctatcgctaggcttgatgggggtcctttgaactgttgggttattcgtttacggcgttcttttaagcttttttagtgatttctttctctttgcttgttgtttggctctttacaggactactgctctgattcattgaggccttgctggtgattttcagtcctctttaagtttccatgttctgctttggaattacctgttacgaactaggagacatgatgaaggctggaaagagagcaacaagaagcaacaacagcattgaaagaatatagttagtagttaattagttagaaaagcagttgagtgagtcaatgaagtagttagagtcagcaggcttgaatatagttacagttagtataagataaaagcttgtatataaactggtgtatggaaacgtgttggagagaagaaaatacagaacattattctcaatcactgctcttccctctgttctcctttctcttctcaatctctgctccttctcctctgctctctcttctttctgttctttctcaatttctattctcttttcttgctattctctgttctcttttctttctattctttctcaatcttgttaagctgagcttaacattacccttgggggatttacaacgacttcaagctgtttatcgtttccagtttcagttgttttatgtcgatccaggttatagtggttctggtggtttaacttactaggtttttctttcttcttcgtctgttgaacgggaatccccggttctgtttctctttgttgtttttctctttgtttactgtgttgttctcgattggcttttcacaaatgattcttgggggttgcaggttccttcttgccttgttggtttctgccctattctgctttgatagctgttatgctgtgtttcctgccttttattcctatgttgcagcagccactctttttgcttcctggctctttttgcaatttccattaatttctcttttttctttttttctttttttatggagtcctacgttccagctatcgttgtttggttgtgctgctggttttctttgcctgttttttttcctgggtcttttgctcttcgtgctttgtctgcttccctttgttgctgtttcttttttggttttaaaacaatgctccctttcatcgggtgcaagctagattgctgtctgaaactgggcataaaggaacatggattccaatctctactaggtttgctgggacttggggaatatggactgttgattatatgtttaaacatgcatttctttaggctgaactgttgcatttttctgttgtcgaaggctccacatcgctggactttgatgaggaaacaacatcctcacagaaacagcccgtggattcccatgaaactgccctccacaaacaaggaggcgtctgctattcgacaatgaaattccactgcacaggtttaaaaaaatagctcacaaacacttgcttggtgcagcaaatatatataaacttatattatgtggttgcgttttatttttctctgggagactacatcatgtgatctaacagccctttagttctccatcatgcagtaaacctctggctgttttgcccccactttcttctttcaacttggaacatttctctttgatttttctcacacccatttctttttgagcttttggaacagaggcgcaccattacgtgcacaacaaataacttaccttattttcttcctttgaaacagcggcccagcacagcaggacaacgtcccagttcagc

SEQ ID NO: 7121 - DNA, 792 bp, Populus trichocarpa
  Intron number 4 from transcript POPTR_0007s05110.1 (locus POPTR_0007s05110) derived from phytozome v7.0 (chr-ID scaf fold_7; pos 3302928 to 3303719)
cagctaaggaagaaccaaacccttgagaggtaaatcgtgcaatttctgtttgtttgggtagtgttgtgagcgtgttgtcatattttctgaacagatacgtgtacctgataatactgacattgcttaattatgttcttccctttcttgttccaaagatctgttttacacagaaggttttctattctgcaattttcagtcattcagaattgacctgtgcaatgcatttattttacatattatcattgatgtagactgtgccataaatgacttcctaccaccaggggtatatgtactatgctcagttaacttaatgtttttccttcagagaagtggagttattgctatataatttctcaagtttatggtcttggaaaacacttcaaacttctcttaaaagtctttctgaaaatcagtctagttgtcatgatgatccaaccaatttcaatttatacaattttcaatggaaaaaatgctttctattaaaaattcatgcattattttatagggtaactgtttggagaaacagctctcccatttttaacaaatgattttttttgttttttgtttttcatggaaaagaaaaattagaaagggagattgaaaatggaaaaagttttctgcaaccaattcaacccattgttctcctacttgtatatgatttgttggttttcataattggtgcttacattatatgtaaaatatgtgcaagctgcccgcaattaatgcacttgtttttgattgctttccttttatctaccaaatgttgttttggataaaattatttcaggttcc

SEQ ID NO: 7122 - DNA, 788 bp, Populus trichocarpa
  Intron number 13 from transcript POPTR_0001s16420.1 (locus POPTR_0001s16420) derived from phytozome v7.0 (chr-ID sca ffold_1; pos 13222895 to 13223682)
ctaggtaatgtattctgtgtaactttccatatctcaagaacttttctataatcacgtaactccctcagttccataattatagctgaacttgaaatggtgcacttgtttaggtaaccacttcgtttgggtgggtttgggggggtttgggggtaacattacgttggacaatggggtataaaagtaggtaatcattgacaatgcaaaaacatttaactgagcctaagagtcagcatggactatgacttcacatgaaaggaaggagaattgtgttgagaatttcagtttctgcgtttgacaagttttactttatatctggggacttctctgtgaataagaactatgtagagacacttttgtgaattggaaaactgtattacaagaagatatattggtgaaagaccttggtttggagaaagtgcatgtttctgatatgatgtagatctggtttcaacattgtattgcaaataaatcaccagcttaaagatggttttttccagtaaatgtaattccttatgtcatttttttttcaaatcataactacaactttgatattggaatttctcatttcatatctttgattcaaatgattttcaacagaagggcttttttccaaattaattatgtgtgtttaacgatgtttgtctgtgagcttaatgccagggttactttgaccatataatgattagaagataaatatcatgaacctagaatttcatttggagggaaacttttatgcaaacatttcttttttgttatctttaggtcactcattaaaagatcactctctg

SEQ ID NO: 7123 - DNA, 1488 bp, Populus trichocarpa
  Intron number 6 from transcript POPTR_0010s02940.1 (locus POPTR_0010s02940) derived from phytozome v7.0 (chr-ID scaf fold_10; pos 3467056 to 3468543 reverse strand)
tccatcgatcctaaatcggtaagtttgttactccttttaactttcttcttgcggttagttacaattggtagttgatcatcttgtgtgatctaacaactcaaattcacatgtcaagaatagtatcatttaccctagtttaataatttaggccttctgctatgtggtcctttcaaagatcgcgtcctgctgtaataaatgacaaactgtgacttttcaccttatttagatcaactaattgttgtggggcgtgcttcgcatgtcattcgcgtcgttttctcctatttagttgagtggagtactaatacataagagactatttagcaatggcttaaattatatttattagttctctaatctaatcaatgacttatatatagtgttgtcaaaaggcactgaggcgctccaggcgaggcgaggccacaacgcctttattagccttaggcgatgaatttcaatgaagtgctgctgagctccccgtgagtgggcaccaggcgttaaagcgagcgccttattgaaatacttcttttttcgttggatttttttaattgatttatgttttgatctatttgtccttttttttttaatttaccaaaagaaataacttaggggtatttttgtaaaaaacaacgattagggtaaaaagaataaaaaataattgaagtggggagacatgcagtcaaggaaggacacttttgaagagaaacaccagccacactttgcgttgaacagagttagagtacaataacacaagtatagaacaagaaagcatggatgaagatgtttttgaagattaatgaatagtgatgatgatatttaagtttgttttttgatctattgactacttactattttaaattatcttattttgtttcaagggtgaaaaatataactttgtacgattatgttatggtattttatattttcttttgattttctaataatctaatcttaattgggaagatatatattttagatttatataatataatataattatacatatatttttttttaatctatagcatatcgcctcggttcattcggtcgagcacccaacatctagcgccttgggcattttacaagcttggtgccttttagcgcctttcgcctttgacaacacaacttttatattatctagtcattttagctcatgtgttgtgcgtgatttcactttttttctttcacagtgatttaatatattagtaaatttaaatagctcttgtacaaattatttaccttaaatagtccctaaacaaaactgaaggtaaaattgggtcctttaaatgggaccaggtatccaaaattcttggatttttttttctttgaacgcaaattggattcccaaaactgatacatatagcaatggtttttaaatagtttcctgatgttagattttacctgacatgcacattctagcacgccactctcttattactttgtggactttatgtaggtcagcatctatccggctgttaaagcacctgtgga

SEQ ID NO: 7124 - DNA, 561 bp, Populus trichocarpa
  Intron number 4 from transcript POPTR_0005s04700.1 (locus POPTR_0005s04700) derived from phytozome v7.0 (chr-ID scaf fold_5; pos 3154650 to 3155210 reverse strand)
cctggtcgtacagaggtaactattatcttgttgcagttgaaatttcatttgtccagccttttgatacatgtacagaagatgattttccttgagtcaatttagttcccaaaacttgatgctaaactgcacctatgtaatggtgtaggacatgcatggatacaatgctagggcttacattaaagcttaagatcttttggctttggcagtgaaaggttaacataaatgagctattgattaatacatgtatacgattttgtagattatggaacacagaatcagtgacaaaaattagcaaagaatgtgaatatgagtttgataaatgaatagttgaattttttgatatgttacaccttggcagtggttgcggttttctgcttgagtcttagctagttttccatgagaatggtgcatcttggtatattgtgcttttgtttgtgtgtgcgcaaaattgcaaattattcaaatgcaatattacacttgaatgaatgtgctgctctcaattctgaacacaagtgtttctttgatgatctaggtagagcaactacataagatatataagct

SEQ ID NO: 7125 - DNA, 2979 bp, Populus trichocarpa
  Intron number 3 from transcript POPTR_0011s02420.1 (locus POPTR_0011s02420) derived from phytozome v7.0 (chr-ID scaf fold_11; pos 2308130 to 2311108 reverse strand)
agtgtatcattacagttactgcaactgaggtatggtgtttctctttgtttatgatttgtttcttttgtggtgatgcaggagtcctgcttttttctgcattgatttacatagagatgctgttaaagagactgtcaaatgcatatttgatgtactgcattatagagttgaataatatatgaaaattacttaaatgggatcaccaacctgcactttttatatgagcaacttagttaaattggattgcagtctctatagctgtcacaccccttttctaattactatgatatttcatcttgttatgcttttagttagctaagtaaacccacccttctaattgcctcttattgttacctaatcaattaaatttaccagccaaacatgcatttataggttaacataacctgctgtccattacacaaacttacaagacatcttatcttttctagttcattcatgtatgttctatatctttgtacatagatgatacaatccaaacaaggtcagattcagattttagcgtaaaattttcaattgttcagttttacgctatctagcataattttcaacttgattgttggatcgggctgaaattttcataagagtttttagacatattgttctatgttggggtaaaatttcagcttacaaaaccttatataatagttcaactagtaaccctaatggaccaaaacttgtgggctaatatttacctacttacaataaacccaaagtatgctaactaagcccaaacatgaagaaaataataaaaacaacaaatctgacacataaactaaagctgttgcacctaattaaacaaaatatcctaagatagataaatttcgtagtttaaataatgtcatgaacgaaattttcatcctagaaacactaggatatttgttgccacctttagatatctaaaataagctaggaaattgattgctgaagttgcctcctctttagtttctttgtttgtttaggataattaattgtgtctctaaaaaatcctcttaaagtatggaaacccttgttgtctttctttaaccttccttataggattaggaaagtccccaaaataaattaaccaatatgtcattagataccatcggctcttctttccttgtgtagctagctaggatgaataaggtatccttataagaaaatgattttggaacatcaatgaatccttgccacacttgaaaattatgttgtagcctattaaagatccttgcagaagtagaaaattaccaaaacaagctaccacatccttataggaaaaaaatcattgccaaatacgaagtccacaagtcaaagggaaaaaataacagaattcatacaacctattctgacatatatcgcaaggccttcctgagctctaattgatttgaaattttatcccaacatagaacaatgtctaaaaacttgtatgaaaatttcagcccgatccaatggtcgagttgaaagttatgctcgatagcgtaaaactgcacattagaaatttttacgtcaaaatccgaatctgactttacttggatcgtatcaataaatgttctatttagcaattacacattaaaagtgtcgataaattatatgttacataagcatttacatgtgtaatgacccatacacaaacactaatctatgaaagacaaaaactaatctatgaaagatataattgcaccatttaaattaaacttcaagttaggactccaaagacactttgtttggtagcctattacccaagccctctttcaatctcactttgattctctgaaaatagtttatcaactactaatgagatcacctagtgaataatttaaaaaataagcatgagaaacttcataagttttcaacatatattcctaacatcatattgacatgatagttgcacaagtaaacatgaatgacaattgaatgtccatatctcatatccatatactactcaatggtagcatataggcggccacaatctcacggaaagcaaactttactctttttagatatcatgtgcaattatatcaacacaatatttggactaaaacatatccttttactttaaaagaacacattatactttaatctttcataatcatactcttatttatcaactaatatgaagtttccattcaaaacttaggtcatatatatatattctgaaaattcagcaaacatttaaaacaaattctcatacataaaaatatccaaaacaatagatttatgcatacttattaatttaatcactcaccttaagttttagccctttttcctttactttctttctttactttcctttcttttctaacctcacaatctatctttggttttctttctaacaattctattgaatttaagctccaatacttcacaatttgttcttggaattatatggtttggtagtgttagtttgtaggatggtgtttagcactcttttaggttcaagaaatggaagaaaaatatgtagttagtattgaaaattttgaaggagagcacatctctactgtccttttgacacctcacaagcatgaccatgcaaaaattgtcatacttcaccaccttagtcattgtcttcttcacctacttaatcatgcaaaatttatcctagttcacctagttaagttggtaaatgcattttagttctttgtcttttggcccttaattttctctaatcttacattattctaaagaaatcatcaattatatagtcaacgcaaattttggggtgttacaataattcaatgtggatattaatttttgtcaaatgtggctgagctaatcaaatagaatgatttgtttgtgctttccaacactagtttgtatactcttttattctgtgaaaagtgctttaattttgcaaaacttgcttaattttaccaattcaacacatgatgtgtgggctttaaggtatgtgatgtcaatacacttatctttctcatgatataaatcgggttttaattatccatgtttaccattggcagtctcccg

SEQ ID NO: 7126 - DNA, 904 bp, Populus trichocarpa
  Intron number 1 from transcript POPTR_0004s07420.1 (locus POPTR_0004s07420) derived from phytozome v7.0 (chr-ID scaf fold_4; pos 6120335 to 6121238 reverse strand)
tttcgattgaattttctccatttctctctctacaggtacttgctagcctattttattttaagatttacagctatagttacattaaatggaactcatttcttgatttagtttttttttttaatgcaatttagttgatgtattggttaattgagattttggggcggctgggttttttgttttgtatgatgtgcttggtttgttgggtttttgatgatggtaaagatgcagacttttgaagatttcagctttagagcagtaaatagaattacgggttttcctttttgcttccttttactgattgtttaagcagtgaaaaggattttttgggttcttaataaagctaaagatgccgaagttgaagttcctcaaattctgttttattgaaagtttatagggctctgagtttattgagatttgttatagcagcatcaaaatcgagctcggggtttcatgggcttttctttttatgtcttgttattgattgtgtttggctgattttgttaaatgtattgatttagtagataaaaaaaggtttttttgggttcccaatgaagttaaatttactagttttgaaatttataaaagagttttagagcttaacaatttctcggggtttctctctgatgtatttttattgattgtttacgattaatgttgttaaaaatatgttttaattttgatttcgggtttgttgccttatcaatgaagctaaagaaatgaagctaaagatacagactttgaagttttcattttggtacacattaatagccagcctaaacaggattttgtagcctcttggtttttgtgttctatttcttgttattgattttttatgttccattttgttaacttcatgatgttttttattttgttgcaggaatacgatttgagaaactttgattat

SEQ ID NO: 7127 - DNA, 798 bp, Populus trichocarpa
  Intron number 9 from transcript POPTR_0004s10130.1 (locus POPTR_0004s10130) derived from phytozome v7.0 (chr-ID scaf fold_4; pos 8697351 to 8698148)
aggttaatcttttagcaggggaggacattattcaggtatcatcaacatatgcatttgggaactctcggaaattcttatttacggtttgtatataatacaaatttttggctttggcaacccaaacttgcaattccttttgtttgtcatgtgtgcataggattgtaaactactaagttctacagaatatgcatgatatgtttcctgagaatgctcgttgatattgaacaattaagctcatcttttgtgcccctaatatactgaatgatgtaaggtcttttcgggacgatgttgagcatttggtgaattttgcttaaacatcaaactgaacttggcactgaagttaatggtggaaccatttccctgaagtacattactggattacatgctcacacattcacggggccaactttctctagatttggatgcattaatttcagcgatcatagtatattgttaatagtaatacttaatcattgaagagcaattactcaggtttgacagtaggttccctcaacccttgctaggagctttaggaactctgggaactgtttgataaggacttgcaagccttttgtttttttaatataatttctagtgttgccctatatttgaagcacatattttagtttgttgtgacaatcctcattattgtaattgattgtaaaagagagaaaattgaattggtattttttagcttgctatggttaaccagtgtaatatcctcccatggttcaagattgaactggttttatttgcaatccaggtatcttgtggcgggactcattcagttgcgttgac

SEQ ID NO: 7128 - DNA, 3398 bp, Populus trichocarpa
  Intron number 3 from transcript POPTR_0001s33180.1 (locus POPTR_0001s33180) derived from phytozome v7.0 (chr-ID scaf fold_1; pos 31371065 to 31374462 reverse strand)
gcctattcatctagaggtaaattttatttgaaaagtttctgcatttatacaaacttgactagaagccttgatttcaagtattcttgaggcaatccaaagtgccctgagtaatttatagtttgtgtccaaatcctctggaatttagtttttgttggttcaatgatgacagcatcaagtatgcaagcaagctattaaataaagaaacactggggttttagctgcggtggcactataggcataacattccagcaaactgctaggttttccccttgcacttgaatttttttcccctctattgttattgttgtctgaacttaatgaacaaacaaatttctagaaagctgtcaaaaatgtgctgactcacagattctacttcttttacttgttgttcaaataggggaaacaattatccaaattataagaatctgcattttacatttatcagagtgtttgaaacaggccacttaagcatatatcaatattgtgtgatggaaattatatgttttacattttaagtacaagttaagatccagaattcagagctaaaactattaactccttggggatgtgatacaatccaattattgagaaattggattagctataaactatgctaattcccaggagaggagatggcttgctacctgattctaaccatctccccttccaagattactaactaactaattgaatcttctcacctatactgcttttcctactaactataccaatttgtactgtaacaatgccccctgcttaaagaaccttgtcctcgaggttcattcattgctcgagttctgtttataggtacattccattctatgatcatacatttagatcttcgtcaattggatccttgatttaagtactgaaactccagcttcaatgtcttcaagtttccaatccacttggggctgggctgttactgcaatgttgcccctgttagtgtagacagtagcacaacaaccttcgggaaaaaaaacatttgcagccatgatgtatgttctgtgatcaaatattctgcagtttctttttctaatcttacaattccattgaaccaatctagtgattaagaggctccaaattttcaggaacatttcgtattttccaaatatttcaaggcttccaacataacagtaaggttgtcgctgcataaacccatgttcttgtcgagctataacccatttgaagataaagatttattgcttgtttatcactgtcaatcgtccaaaacaaacaagcctgcctgatttccttgatgtccaaaaacagttgcttttggagtgtaaagcaattatgcaaccagaacatttcacagaatttcattttgacaacacaatttgtcagggcttgatgtctgataaaataattgattgatattccaagcaagtcactagcctccaaagtccatgtttctacaacttgccatagaatatgtatcgaatacctgataccatccaattcaattttcccctttgttgcaaccttgaatacaaaaatgttatgattacatagacaagatcacaaccaccttttatgcccgcaatcacttttctgaaagcattccccatgttgaattctttcacaacaacagtcgttgattctttcataatttttatccaagcaattcatccacttagttccagaaccaagctatcatttttttttccaataaatcttccagctgtagcaggtcactgcctaatacggaatgccttgcacaatcaaatgtgtaaaagcagacataaaattcttttgatttggaagagaacccatatgtgaattggtatacaaggctgtcattgctcacaaacaaagaatctgatgcttcttttatactcttttgtgcacatgcataactagacatagcctccacttcttcatgacaatccccgattctaacaccattccttgtaaaatctccaccaaaaaacccatcctccaaaaattacatccctcagaataccacaaattgaaccccaaaatcatcacaatgctgccattgattcctaatatcagttaaatgctcttgattagctttatcaatagcatcaagaacaaattgaccttatcttgattaatcactacattatcttcgacgttttgacaaacttgtagcaacaaaccttcaccaaattattctcaatggataattcagtttccaggcatttcttaaactgagtttcaacagtttctttgatatcagacccggtgcagtcagttcctaaagaaatcccatccatgttctgatttttagcaaagaactcagagcaatgatcatcttttatcctgtatttcatcaaggcccacaaaattaatcgaatcaacagctgtaatataggacttggattcaatctgacctgattcttgggtatgcaaggaaggttctcattctctaatctctgtttcctgttgattcatcaatggcagcatctccttttcatctgtagtgctttcatcttgcaatagcctctccaaactctcaagaatctcattctttaactgattaagcttcaaagtcaattcttgagtggtctgcttcgaatctttatcgaacactgctgggttgcgagactttggtatggtgcttgccatggcttgaattcacttcaacgctttctaattgtgtctccccaaaaccaggttgcgaaatttaatatctaatatctaatctacaaaacccatcataaatgcaccttccatgaagggaagttgtagctgatagtgcattttgaaaggattgaaaatagaccagagaaagcccttcaaactcttcaattcagggcacacaaccatatggattaaagacctgatgcaggacatctcttgtaataatctggtaatgaacccttactgtaggaacttccattctggccttcaagattcaagatttatggacagtagagatgttgagatatgaataaaaaggaattgagcaattaatggccaaggatgaactgctctgctaccaattgatacaatccaattattgaggagttgaattagctataaatatgtcccagaagaggggaagaggaatatcaaccaataatggtaggaaacaggaagaaatcttattggttgaaatagagaaagtgacaggaaagagaattcagagagagggaatcacaaatgcaaaaagatacctagaaccctaagctaaagtcctttcaagacatgtaggacttgatagttgattctaaccgtctcccctttcaagactactaactaactaattgaatcttcccatcaatactattcctaccagctaactataccaatttgtactgtaacagtgtcatggaatttcttgacatgtttgctgaaattgattaaacttatgctcataaatgatgtatacaggtgtcaagagttactgtcagggcaaaggaagcagt

SEQ ID NO: 7129 - DNA, 962 bp, Populus trichocarpa
  Intron number 4 from transcript POPTR_0008s12880.2 (locus POPTR_0008s12880) derived from phytozome v7.0 (chr-ID scaf fold_8; pos 8377622 to 8378583)
cagtaagtttcatgatgctcgtaattgaatctacttcccctcatttgtatattcagtattgtgtttgagagtttaattccttaatacattgatatattgtacagtttctgcaaattgatcatcatgaatgaccgttacaagattggagtctcatcaatatgcattaattgtgaaatttttagattgtgtcgtgcttccaaaatcctaaaactaattgtgtaatataagttgtgtgatgtggactcttttacattcttccttaaaatactatgcaaaagaatgcacaccatgaccatgcaattgtttgtggctgataagattgtcaagatttattctacaaagatactgtattatattagaagtctttgtttttggaatcagatagtgcagaaagggccaagatagagcctcgtctactataccctgcacatgtcttttggataatcatgactgcatattctaatatcagcaatgcttaatggattagtgaatttagtttggcattcttgataatggcacttcatttggtagtcaggaaagcaggacaatatgtatcatgatgttaaaaccccaagaatatacttatatcctggttgtaagccatttaagtctcttgcccattaataggtgataaagataaagaatgcaatgctattgaacagaatttcttttctccagcatttatcttgatttagcctttaggttgcatgagggcgagtatgagtgtgaattagtcttacaaatttggcatgttaagtgctgtgggagggttaaggtgctctcctctctgtgtgtgtgtgtgtgtgtgagctaccaattactagaagctggaattaagcctgctgattattcatttactgaagtctgatacctctctctctctgggtgtgttttttattgggtgaactgaagttcccgtgcccttactcgatgcgtatgtatttatgttcttgcagcaatat

SEQ ID NO: 7130 - DNA, 2324 bp, Populus trichocarpa
  Intron number 1 from transcript POPTR_0010s16380.1 (locus POPTR_0010s16380) derived from phytozome v7.0 (chr-ID scaf fold_10; pos 15348661 to 15350984 reverse strand)
attcgtacgtactaaattcactctcttcttctcttctatatattatatttataccttatcacacagttaacatatatcctgattaggtttctctctctctctcgttttcttggtttcttcaggggcttttgttgtttgtttttcttcttctttcttctgtgacatgacttggtataatataaccactctgtctaacttctgattttctttttctctggtttttccatagaatctcttgatctatgtctcctctacgttatcttggccaagccaagactaaagccataaatacccattggttttgctgcttcctacatcaattttggtgtatatagataggatttggtactgaataactgtgctattattttcacttctatatatatatatatatatatacagagagagagagagagagagagagagatggagtcacttcatgcagagttatctcgtaatgtgttgcttcaccgtaaaaataactataaacataaaaaataaaatcaaataaagtaactgtaaacatatgcttcatgagttctcaagtcttgtccagattgatatagatggctgtagggtggtggtgtgtccatatctgactggaggagtactactccctctccctctactttatgacagtttttaaggtgaaggtgcaacatcctaggataaaagatgttatctttttatttgattgaatttgtttaacaaaaactataaaggagaaatcgtacatgtaatgggatttttcgtcattaggttagctatgacgctggctgtcactaatcttctcaacacttctttattttttacttggtattttttcctttagttttatttttctgttatccagcttgatgtttcctttaaacataaaagctacgggccacagctgtaatttgaatatgtagtcgcccatacttaggggatatattgatcagggaattgaagagcctgactgtgtttttttttttttaatctgtgcccgtataaggtctggttttacaaccctaatgaatgagggcaaacgtgtcatgtttgatatgtgtattaaattctgggggaaggaagcacgttttaagaaacataaatattatatataaataaattggatggtgtccctttttgaccaatggagaaatggatctaacatcgacgtcacaagaaggcttaagattagcatttgctacatcatccaaaaacatgattcatgacacgttaaaaaagagaaaaaaagcatctcagagagagataattaaccctacttgcagtttaagatttgatactgcacgtagaatcatggactgatcagtagactaaataatcatgatctaaaactcatttcaagttaaggaatacaacatatgtaaagataaagccaggttgtataatggttaagttcaaatctccgatcatactaggttgccttgcattttttaggagaaacccgattataggcgattcctatagtaatccgtggattgatgaactgcaagtcaaggcttcgttatgtcaaacatgaagtcaaatatgatacatgcctctaatctacagaattcaagcaatcgcataaccatctcggtggggttggttgcattacatcttgcttcctgcctgcttgatttttgtgcaaggttttcttgttctgggaatttttttccctatttttctttgatatgccttctgtgtttggaagcaggctttgttgaaacctgttacttatgacgccgttattgcttacatttcttttgattttgataaataaccatagctaggttgtgaaatcttgattatatatatatatatagcatatttgatagtagattgttttgctcgaaccgcataactattcttcgacagacagctatgctgatggtttactagcttccataatccaacatcattatggtacaatgaaaatgtagacagttgcaaagctttctcttgtcaatatgtgaaaccctattctgggtcaactgtttgtccctgttaaggatccagtgacacgaatgttcatctgaaacaagaatgatgctcaaatcttttggtagaagatatataagcatctaaatccatatggatatacataatatgttaattattcaatctcaaactatgcatggattaatggtggaagaaatagttgaacggatttttttccttcatagatacgattcaaggaaaaaaaattggaaattgttattcctaatttctcatatactgtcaagttttctctttcaaaatgttgtagagaattcgtacatcagctataaaaacactatataaatttactaagcagcaaaatcatgttgttgtgcaacagc

SEQ ID NO: 7131 - DNA, 2772 bp, Populus trichocarpa
  Intron number 3 from transcript POPTR_0017s10510.1 (locus POPTR_0017s10510) derived from phytozome v7.0 (chr-ID scaf fold_17; pos 9956206 to 9958977)
ggataattcatcgtgacctaaaacctggtataataaatttctggcttatgttcatgacgtttgagcatatgaatattgaacaagtagtattttatgacaggcatgtaaacttgctaaccaattccacatggttcaatggacatttttcagtctttgtgagcttcggggcttgtatggtgcatacatttagtgcaagttttctactaacttgctgcataaaacagttggaatactgtctactgtaattattgttctcttttgcctttccatttgaattgtaaagaatgcatgttggcatgcttttataataccagcacacaaaaaaaattaaaataaaataaaaaagctttcatataatactcaacttttttgtttcagtttttctagtgaaactcatcccacctcaatatgacaaagttagttccttcgactttataatttcatgtatgattattttgtatgagcattggatccataatatctttgtggtgattaaactaagttggcaacacaactaagctgcaattgtttcttgcaattatgcatgttgacattttctaagccattgtttgtttgacaacaacctgcccacagtccatgtcatataccttactttcacttgaaagatctcaatgagtttctttctcaagataacaaaatatctgatgtgaacccggaaggcaaaaccctagaatccacaatcaagaacagaaatacttctcctagaaagctaaaatcagattattaaacctcaacttgtcgattttttgaatcaagaaccaaaggtatatggttaaaacgccacaaagatgatctctttaataagttctgaaaagtttaatgaagaaccaaaagcaagagtgctcacacaatttttattcaaaaaaacctatctgtcttcacatcccaaaaataaaaggtatttatatgtttgacttaaacaaaataaatactaattaactatgggctgaaatttaaacccaaataactaacttaaaaagtatgggtaaaataaatacaaagccaagtcttaaataaataaaagcccaattcgaatagtaacttttgggtcttatcagaaggtcttcttgatgtttgattgctacgaaattctaagcctataggaaatagggtctttcaaatcttctaacaaaattttaacccaattcaacggttagattgaaagttatgatcattaacataaaaccgtgtagccaagctctagaacatgttaatcaacctcatctcttacttggatcacgttgatcaagacatgatcatcctttgaacttaacttcatgcttgatgccaacttagaaagaattctcgaagcttgcatggcccgaatgtcatgaatcagcccattgaatgactctttgatcctcttagcctctcgcccttgtaaccaatccaatatctcatcaatatctcttggtaaacaatcccttgagttgtattaaattaacccaagtgtcagatcaattatttggcttgtgcatttgaaagttaatgaattatcacaattttatatgagaatagaagattctattctggtcaggtctatattgattgtgctacatccacttgtttttcttgtgtgatgaaccgaaacttgatgattttattttgcgattattttgttccttgataaggaactaatcaccaaattgcaagatagcaattagattcgacttatgttatatgcttgtactaagttttacatctgctgaatagagatggacatatttgggaaactggtaaaaactacatctaagctttgccgatgatatttttacaaatatgaatgcttgatccacattagtatgcagccaagaattaaacttcaagaaaggtttacatgatgtttgatggaaccagattcaaagcattgaaaatgttgtcttggattcttcttgtttcagctctttgtttctggacctttttacttgatttcttgaaattatacttcacaaagatgtccttgtgcagtgctgacatgaattggtggccttatagcctctagtttgtggaattcaattctattagggcctttctcttgtttagaaagtttaaatttgcagatttcaattctacatgtcaaaattttagatttttgcacaaaagtaatctgcacttgttcattagtagattcgattttgcataatttgtcattaaattcaggtgtttggaatgtaattgaattcaattcaattaagccggctaccagcattcccatattgtaactgtccaaagaaggaaaaaggaaatgcaccatcgtcactgcatttagacaaatgactagatacatgagcaaaaacataaatcatcttctagaaaaaagttaagcttcatcactgtctgccatgaaattctaaaatatgtttttgccacaaacagtcccttttcttttctctgcaaaaaattagttatcaaattgagagatataggagataagaagacataaagataatttagctagagaggatagatgtagcagacagctagagaaatggctgtatatggttttcttgtgtgcctagtattgtatcgaactcttgattttataaatatatgtaattgaattatatcttcaagacaagtaggttttcttggcaacaggctgtcaagcactgatacagtgtgatactctaaagttaaaaaaaatgtttgatcacttgcttttggaatcaagcatcaaggatttttctgaccccatcatttcctttcctatttacagagaatttgatcttgactgcagaccataaaacagtt

SEQ ID NO: 7132 - DNA, 955 bp, Populus trichocarpa
  Intron number 1 from transcript POPTR_0014s13300.1 (locus POPTR_0014s13300) derived from phytozome v7.0 (chr-ID scaf fold_14; pos 9799867 to 9800821)
agcgtagtcccgaaacccctaaaacctcctccaaggtacgattctgattcattttacctaacctaatctagggcttctatttccgatctgttctgttcttttcaatactttggttgttgagatttatttatttattttgaagaaaagtggagccttcttgatagctaagggtagaaatgctacgaccaagcgaaatgttgtgatttctcttttttatctactaaatgcaacacaaactgttttttcatttgataaaaagaaaaaaaattcaattagtattttttttgagtttgataaggaatagtagttgaaattgatgatatgatattttattgacatgctggtttacgtgttaatcttgtcgtttggagcctcgaggtcctcatttctcgatgattttttggcactgtacagtttttcttatgatgaacaatctggaaatcttgcaagatttatttttctgctcttgcccttaattttgtgtcttcatgtcataaactgtggctataagtagggagaatgtgagctgtgtgtgtcaaatggtttcaatggataataaaaagacgcactttttttcttttcccgttgtttttccaactcaatttttagtggtaaattgagttacccatttagtttccaaagctgatgattgcctttcctagtggcaatctaactttttaagatgcaccatagagagagcaaaataaaatacatgcttgatgataactgtttccgtcacatagatacattattctcattcccttttgatttgagtaattcaatatttcagaatctatgtttcttttagatatatgaacctaatctgcttaaacagctacagatttgttaacttttgattatgaatttgaggaaaataaaaaggaaagagatggtagttaagttttaagttgtgatgacagaatccacgagttgcagtgcgatcaattgatacata

SEQ ID NO: 7133 - DNA, 1450 bp, Populus trichocarpa
  Intron number 1 from transcript POPTR_0007s02520.3 (locus POPTR_0007s02520) derived from phytozome v7.0 (chr-ID scaf fold_7; pos 1492121 to 1493570 reverse strand)
ggttttcttgctttgtttctcaatctttctgtcaggtaataatccatagtttttctagcctggtttcttttaaggttttgttttggtttcatcttgtctttctgtttgtaaatattaggttttggttaattttgtgttttgtctttattttttcgtaattggatttttttattgttttttgttcatgatggtgttttgtattattgtttgtgattgttttttgttggtttttgcgggaaaaaatgattttttttaaaatattggtagaaatttctgtatggtgttgaagtttttcttattttttcatttctagcctggatgatgagtatgtttttctgtttgtttgataaggatttgagggaaaggagctgaaaaagtaactgcatattaacattcaaccttttctattggctgatccaaattttaatgtttagaatccagcttatgttgtgtgtttctagctctcttaattgtttctagcttttttttttttcacttgtggactgctagaacacagttcctggaattattcaatcaattacaagtttttggttatgttaataatgggtttatttgaggaaaagtttgaaacttttataggctgtttggaaacttaagatttgagtatagggtattttgatagagaattatgaagctacagacttgtgcctcagatggcatgagggactggtgtgaccaaaattcatagtgtcttgttaggagatggaaggagatgacccttaattttctgtagtgatataatggaactagtacttaaagatgtttgttcatcagttgacaagaaaagatatgtttgatgaatggggtgatccacatgcattttagattttattattttggactgattgttgatgataaggtgtaacagctgccattataggaatagattgaggaaatagatttgtttctgaaaagataacccattttttgagtgaagtcggaaatcattgagtggtctacaggaatacgtggctatgacgctgattaagatacacacatctgtttgttaaatggtggtgtagactgtagctagaaccatctgatgtatggataatctgtagctgttttagttattttagtgtttaacagtactgattttgttttttaatttttttttgcgttattcgatacagaatgataaaatttaccattcttgcattttaatgtatagttaaaatctttcatggttattttacacatccaaggattttaccttctcattgcttggtttgtcgtaaatgtgaaattagaactgatgattggatagtaaagctttctaagtcctttagcacttatcttgacctattaaattgtaggattctctggatcttgatctgtatctctctcctgtggaaccttccacccttaattttgttttctggcatatgtttcagctcagagaaatttgattaatatcaaaagaattgtt

SEQ ID NO: 7134 - DNA, 2964 bp, Populus trichocarpa
  Intron number 7 from transcript POPTR_0002s01250.2 (locus POPTR_0002s01250) derived from phytozome v7.0 (chr-ID scaf fold_2; pos 652693 to 655656)
acaccaggaagaaacatatacttgtaagttaagtgctatactgtaactctgttttttttttataacaaaatcttgattggtgttttggaactgctaattagcttatgtcttaccattaagacagatgcatttcaatcatgtctaacagtatgatttatgtgtttacctctaggaatgcatctctgcgtcgatatataatctcatatatctgcagtagtgaggaaatatatttttttgtagcagttgaaggcatcaaatcataaactctttttgatgaaaattgaattttagaaaagtgaattatttttttatgtttggtagtgtaatggaaaataagttggaaaacactttccagtatttggttatgttatggaaaatgagctggaaaataacttattaatattttatttttttcaagtttattaaaataataaggaataaatcttacaaattaaaaaagttgaaagagaatgaaattgaaaaaaaaaatataatttcataaattatctcaaataaaataaataataatcaaaataatagagatcaaatctaaaaataaaaaaattgaaagatgaagaaattaaaataataataattaccatttcataaattatttcaaataaaataagtaacaatcaaaagaatgaggaccaaatttgatagataaaaaatttcaattaaaaaataataagagaaaagcaaataacaattataaaaatgaggaccaaagttaatataaaaattaaattataagagatgaaattgaaaaacaaatattcaaaaaaaaaatatatatatatatatagcaatcaaaagtttgagaactaaatttgatataatcaacaaataatatgatatttttaattttttcacaacttccggaaagtgttttccgctcaaaataaaaggaaaacactttcctggaaaccaaaccaaatttttctttgaccggaaagtgttttccgttgaccaatttttctaatggcaaacaaacacaggaaagtttggaaagtggtttctcataaaccactttccgagaaacaaacgcaccttttattttagaacgatgtaggtggctcacatttcattacgggctggatcaatattctataatgtaaaaaaacaatactcaagtgttgtcaatgtattttaaagaaaagaaaaaaattcacgacttgacattataaaaaaaaattaaaaaaaattacaattgccaatccccaagaatcaaaacatacaaagatgaaatctgtaaaaaaaaccagttaacaaaaagaaattttaaaaagcaaagaactagtaaatttaggagaagtcgccaaaactcgcaagaaggatcatgcatacatgataatccaatataagaaaaaataattggttgacatgtgacacgggtgatttgaggcttaggaccggttgggtttcaaaagaaatttggtgaaaattgacccaatgtggaaggattaaaaacacaggttgatccgtgacctaattaacccgtggcaaacctagtcaaaacttgttgataatttttctttatttttttatttcaaaatagtgttgtttttactttatatatatatattgtttgaatttggtcaactcgagtcaacccacttgacatatgacctcgtacttgcccgggtcgattcctagaaaatgagaggatgacctaaaattttaaattgaatggcaaaatcaaaaagaaatatccaattaacataagaatccaaaacaaaataataaaattcaagagaatgagaatcaattttgaaaaaataaaaaaaccaagattatggatttaaggataatattgaaaaaaaattaaagtttgataaaagtattaagaatcaaaatttaaaatcaaaacattgatgaagaatcaaaagacgtgctgtcttccagtccagattttaaccaccactacagtggctggaaagtcgggcctacatgttttttacttaaagaaactatttttcaaatcttttcaaccacaaaacacccttagaacaccaagaaactaacctatcaacttattaaacctaaaatatggtctaaaccactaaatcaaactggaaaaaatattgcatccttgacctagattttgttttttaggttatattaaggcttaaaacaaccatcataagactcccctcacaaagtggaacccattgacaccaattttaacctgtttggtggtcagaatcgtcaccaacaaagagtttttttttctttgctggaatctaacgactgctctctcttctctcatgaaaaaaaaacttaaaatgagaaaaataaagttttgtactaaaatatatttttaaaaaattaaagggactggtcaccttgtagcataaaaagttaggagactaaaatgtatttcataaacaaatttgaaagcaccttgtagcataaaaagttaggagactaaaatgtatttcataaacaaatttgaaagcaccatttatattacctgtgtttttcacttcagtcctctgtctttattgtctctcccaaaaatacatgtaattgggtgctaattttggttgaaaaggctcacttgtgtaaagaaaaaattcaaagattaaaataaaatttttttaaaaaaatcactgtttgagttcatagtgatttgtaagaaaataaacagtaattttatgcacagagaaaatgccacgagcttaagtttttgttaatataatgacagtccttcagggatttgtctagatttggagaaaactacaatggagagcataagggcattggtctttcggaaatgtgcttctaatgcaaagaataattttccgttataaagttaattctctcgtgaaacttcgtgaactgaatctgtgaaaataaccttgttagacgataatgttgttctttggcaataataccatcataccactgcccattgagatctattggcattaatgaattaatcattgcaggttaccgcagagg

SEQ ID NO: 7135 - DNA, 468 bp, Populus trichocarpa
  Intron number 2 from transcript POPTR_0001s26000.1 (locus POPTR_0001s26000) derived from phytozome v7.0 (chr-ID scaf fold_1; pos 25100436 to 25100903 reverse strand)
atcacaagtaagttggccttttctttgttaacgacttctcttttggtttcgggaaaactttatgtatttcttgtgcggggactgcaaattgttatgatcttgttgtcttattctttggaaatgaataggtgttttgtttttgtttttaataagttggttgtatcttgtgattcttttgatgtaattgtgaaatttaatgattcgtaatgtcattgaattcaggttcttacattggtcagcttaatgttactaagattttttttaagtcgatttctttttcatatggtagcttatgaattgattgagttttcttgttctagtcaaattgaggagtggtagttggttacgggtacgggaattgtgatttgaaattaccatctgataatcgctgattgttcgtagaatatctccttttgtatggtttctcatatagtgattgttggagaggttgcaaactttgttgcatat

SEQ ID NO: 7136 - DNA, 944 bp, Populus trichocarpa
  Intron number 1 from transcript POPTR_0001s34280.1 (locus POPTR_0001s34280) derived from phytozome v7.0 (chr-ID scaf fold_1; pos 32451277 to 32452220)
gtgatcgttcaaacgttgttaaggaagtttccaaggtaatttcattatagattctttcgattaatgttcttctttttctctccttatcaatcatattttttggatcttgattatagaattattaaaaaagaggttgttttatcaatcttcctttcttttatttctttcaatatttgttttagttttatttttattctggtgaattaatgacatttgacgatcttattttgcacctgttattttcctttcttttgctgtttttgtagatgataatttggtgggaaaaggatgtttgcttagcgtttaagttccccattaatctttctttgattaaaagtagattcaagaagtaataaatgtatatgaaattaagcgtatcagagctaatgagaagaggtgcattgacattttacccagtacccattacagaatctttccaaattctgtaatgttgtcttgatttcggtttttctccctcttaattggcaatagcattgcatcaatgctgtcatggattgtcgaaccacctataacttaataaccagagtggtctccatggatttaatgtagctaaaaaatcaaaattccagtttttggaggctatacagataggtgcaggtccatcataattcaactttattagctttgctatatatccatgcattgattgtgtttacacttagcaactctaactaagcaggagttgagtatatatatgtatgtatgtatataatgctactcgaagcattttttttataaattatataatacattatactgtcccttatgagagaacaagagttcagtattaatcaatgctgttacatttcaactgctggataatttttgttggaaatttagttccttttgccggaagacaaacttactttcgtttgaattccacttcaggtagcactaaattttgtgtacttggcaattggatc

SEQ ID NO: 7137 - DNA, 855 bp, Populus trichocarpa
  Intron number 1 from transcript POPTR_0003s18430.1 (locus POPTR_0003s18430) derived from phytozome v7.0 (chr-ID scaf fold_3; pos 17513681 to 17514535 reverse strand)
aaatattctaccttcaggtacttaccattgcaaaacaatgtgaatgcacatgtgcaagaagtaggctgatacacacatacaatctgcagaaactattggtttacagatgtcttccatgtggtagacttgaataccaatatacctgcacatgccccataaaatgatatttttgttcatgatctgtatagttactaaagtgtttctctagctcgagcagtggtctatttggtaacgagcatgcccagtcgttttgtctgccttcccttttcttttcctttgggggtgggcaggccaaaggtgattagggcaaacaaagtgagaaaaaccctaagctgggaaacaagacctgtaatttactcaacagaaagttcaatggaaacgtctgggtgagagaggccttctgaatttgttagacgatccctcatggaagggaactgagcagaaagaactttggcttaagcattcaagacatgacttggcattatgtatagtagtaactcataaaacatttcaagatgtggactcataataaagtcaagtagtttctttctgatttgatgttatgttgcaaacttgcccaaattcttttcatttggatctcctgtcagtgaaatagttgatatttgtatttgaaactttgtacaagtaatgtgaatgtcattcttctgtgtaactttacatgatttgtttctccttcctacaaaattcagataattagtctcttgtaaaatccaatacaataagcctttttatgattgcaataattagcaactgtgaatgactgttagcggtgcctcttgatttttctgcttctaatcaggtttggtacagcaatccagctctaagagattggtt

SEQ ID NO: 7138 - DNA, 855 bp, Populus trichocarpa
  Intron number 7 from transcript POPTR_0003s18380.1 (locus POPTR_0003s18380) derived from phytozome v7.0 (chr-ID scaf fold_3; pos 17481619 to 17482473 reverse strand)
aaatattctaccttcaggtacttaccattgcaaaacaatgtgaatgcacatgtgcaagaagtaggctgatacactcatacaatctgtagaaactattggtttacagatgtcttccatgtggtagacttgaataccaatatacctgcgcatgccccataaaatgatatttttgttcatgatctgtatagttactaaagtgtttctctagctcgagcagtggtctatttggtaacgagcattcccagtcattttgtcggccttcctttttcttttcctttgggggtgggaaggccaaaggtgatcagggcaaacaaagtgagaaaaaccctaagctgggaaacaagacctgtaatttactcaacagaaagttcaatagaaacatctgggtgagagaggccttctgaatttgttagacaatccctcatagaagggaactgagcagaaagaactttggcttaagcattcaagacatgacttggcattatgtatagtagtaactcataaaacatttcaagatgtggactcataataaagtcaagtagtttctttctgatttgatgttatgttgcaaacttgcccaaattcttttcatttggatctcctgtcagtgaaatagttgatatttgtatttgaaacgttgtaccagtaatgtgaatgtcattcttctgtgtaactttagatgatttgtttctccttcctacaaaattcagataattagtctcttgtaaaatccaatacaataagcctttttatgattgcaataattagcaactgtgaatgactgttagcggtgcctcttgatttttctgcttctaatcaggtttggtacagcaatccagctctaagagattggtt

SEQ ID NO: 7139 - DNA, 2715 bp, Populus trichocarpa
  Intron number 14 from transcript POPTR_0013s08030.3 (locus POPTR_0013s08030) derived from phytozome v7.0 (chr-ID sca ffold_13; pos 6930786 to 6933500 reverse strand)
ggactaggtaaaacatgtcataaagatggtttactttttgcttttgccctttgttttctgtgtccactcacaaggatactagtaattttaacacatgcattattcaagttaaaataagctttcattgatttataagaaaatacattgatttataagaaaataaaaagattaattttcacactagcttatatatatatatatatatgtaatattcctaatgttggtagataaatatatgtaccaccattagaaacatgataatgctattttttttattcaaaggatttttaaacaatatgaattgttttcttgattaatatttctgtccttttttatacagaaatagtttagagatcagatattttgctgttttggcaaaatttgcagttttgctcagattttgaatcataaattaattatctaatttatatactaaaaatgtgaagaaatatgaagaaaattccatgacatgttgttgttgttgttgttatcatcattattatttatgttattcttacatatttttttaaaccttctttattgaatatggaataaacaatatggaattatctattagagaccaaagaattcttcatattatgggaaagaaaagacttaaatgaaggtcacaaagagaacaaaacgtggtaaaaggggaagtaaccgcccttttccttgtgcatgtttgagagtgtggtagatgttatttttcaaagtgttttttgtttggaaatgcatcaaaataaagttctattttattttattttttaaaattcatttttgacatcaacatatcaaaacgatctagaaacacaaaaaaaaaattaatttgaagctaagttttttttttttcaaaaatacggctggaccgcagtgccaaacatcaccttaaacagcaggaacaatttttctcctttgttttgaaactaatgtttatggaaagtagagtaattttatcattaatcttggccttgtttcagttgaaaggttgaattaatcaatgtaatataaaataggtagtttagtctataatcaaatgtttcaatagagttcctgctctctcgcgcgcgcgcgcgcgcacacacaaagttatgaatatcctatggcatttagtagtgcatgaaacatgtttattgttacttagctaaattggccagtttagatactcttgattaataagagcagtggctgaaaattatataactctagaaatctcctttctccaaagatttgtatctgaggagagaaaagaaactccatggagagcacacattgatttaggggtgggattctatgagctatatatggttaatatacattgctccaagccaattttaaattggaaaagatgttgcatagccttaagagtctttcaatgtataacttgttcccaaagatggaaagggagctcctacctccctagggttacatttactctagcactgtcaatacccacacttaaaacatcctgtgtagactaaactattgatctatcgagaccatcaagtcagtctcctccaatgaggcacaaatgctttagatatattgtccatatctatattgagctcatatgtaataactatatttgcctgataaaatatcattgccttgtatacctaatgaaataatgaaaagtagttgtactcgatacatattaggtgtgtatggatatgttccaaatgcatgagggtacatttaggatatgcctcggattcgtgatacattcttgaggcaattttctttcttctacctatttcattgatttattttcatttgtttgttttgtaaatggtctattatgatatatatatattttaaatatttcatgagtttaaaagtttataatggcgagttttattttaaatacctcattttgttacttttggatgaaaacagcttctttttttttcatttttacatgatgaatttgaaaacacttccaaacatatcacattggctaccattggtatccctgtaaatataaaaacaggcatatagctttaataactggaattctatcttgtattacacccatttgacttgacaaacacttgaagagtctaaaatactcatgccagataatgacactcagattaaaaaaatgacattattgggcgcttcaaaccaatggaaagatccaggacattctagaaaaaaaaccaactgtaacccctgacatgctcttgtatctgttactcgtatgaaatcctagcaacttggattaataatatttcaaagttagagaagttgatttttcactcctatttttcttgcctatacattttgtctattgtagtacatataccatttttttttagttccaaatctaacctaaattacatcatgtcttgtcagaaataaaaattgcattgcacaatgtttcaaaactatcttgccttagacattttattctatgttatggattctgtagtcattttttttttttgtattccatgtgtccgtgatgtttaggtttcctctaacctcctttgttttagctcaagtagtttttcagtagactatttttgggagagattactgtcctgggcttgacataaaccctgctttgggcactatcttttccttcaatgccacttgtattatcccttacaaggtgtgaatacatgaatataagcattcaaaatggtatgggtgatgtattgctgttccatttttgcaggctcttctcttgtggaacaagtaaagaaggtgaat

SEQ ID NO: 7140 - DNA, 607 bp, Populus trichocarpa
  Intron number 1 from transcript POPTR_0001s06000.1 (locus POPTR_0001s06000) derived from phytozome v7.0 (chr-ID scaf fold_1; pos 4699247 to 4699853 reverse strand)
ggaagtttgattttcaagctaatttgaggcctaaggtctgtttttgaattgattttgtttctggtttgattttttttgctgaattttaatgggttgttttttttttccttgttgaattctgattggttttgagttttgtgtttggactcgcattggcttctgaggtttggtgatggatctgtttctgggttttgggtttttttattgaattttggtagattctgtgagattttagctttagttatgaataattaatggttaactatatggttttatgtttttttttttttttttttttgctgtgaaagatgtgaacttcgctgatcctggtttgcaagatattttggaattggaactgagtgatgtactcttcttgcttgttgaataggatttggtttcattttatgagttaatttatctgtgatctgtttgctactttggttgatgagggaagggaaatgagggaaagttttaagctttgaatgttctttaaaatgttaatgctattttgattttgagaaatgaaagattaatcaagtgaatcaattgtctgtaagttgaattattttatttgacattttgttggtttgttacttaatttgcagat

SEQ ID NO: 7141 - DNA, 955 bp, Populus trichocarpa
  Intron number 6 from transcript POPTR_0009s13930.1 (locus POPTR_0009s13930) derived from phytozome v7.0 (chr-ID scaf fold_9; pos 11001988 to 11002942 reverse strand)
gaacgtggctatagggtgaaggtattttccccctgttccaattaaattgtctgttttttattagtttcttgtcatactatactttttaggcaatttggtgcattcagtgttgtttgatgatacttttgttttcttccatatatcaaagaagaagaaaagaacaaaaccgaacaggcatttcaaacccttaaaccatgttttgtttttatccttgccttttttttcttaagtatagtttgtgaagaatgtcttctttgtatatttttgtaaaatactaggtttctacctagactgcaagaggatatgctgccatgttccactttgagtcggtcaccagcatcaggtgaagagggtaaagctttgtaaatcttgcacaactgttgtcattagataacaatgtcctctcaccacatgttttagagaaattttgtgctttcaatttagaagtttacttgtcgccataaagtttgtagataaatcttcaatggtagttttaaaggttgcttaaaaagaaattttaatggaaagaatcagttgccctgaagtttggaagaattatgttccagctttatgcttcatttggctgcttggctgggaaactcttttttaacatgaaccgaattctgcaaatattttcaacagtgatccagtattagatttggtaagagagagctctaaagagctgttgtctcatgcagcaatgtacaggtaaatgttcaattatttagccaatgcccacggatcttggatgcatgaatggataaatacctacatgaacaaccagaggcttctcaaatttatagaattgcaaaaatgcttgtttcaccaaatgcatgtttggcatatgttctgccctatgtgtcttggatttttaagatttgttttcataataattgtcttcttttatgattttgaaacagtgtttggtaattggtagtcgaaaaaagcgttcaat

SEQ ID NO: 7142 - DNA, 1530 bp, Populus trichocarpa
  Intron number 1 from transcript POPTR_0011s05040.1 (locus POPTR_0011s05040) derived from phytozome v7.0 (chr-ID scaf fold_11; pos 4996430 to 4997959)
agctttttggacctgatccttgggctttttttaaggttccctactctttcttcctatgcattgttgtttttctttttggtttcattaaatgcgtttagatctaagataatgttggtggatttgtggggttaatctcgaaagttaatgttgtttgtttgtccatgtgttctgctttgatgtttatgggtgtcaagttgttaattttgtttgttcatgttgtcttgtacattcaattggttataatggtaccctttttggtttcagattcaatggcattttattattcttgggatttttctttttggagagaattgaatcagggtgtttaatgtttggccagatttgatggatacattttgtttttggctcgaattacttttgtagcttgatgttttgcaagttctaaaacgagcacttgctttatttatgtatgtgctaaaatattctgttaacatttggttaacagtgctctttttttttgtcaattacagatatttctttttagttggattcagaattttgcatgtcgtaatgatgtaaattcataacaaaacataggatagcctcccaaattacctggttattttcttcagaaatttgaagccaagcatatgtggcctcatcgtggtaatgcttttgtttgctgataattccccagagcaattgctgctatagatttcttgttatttacatgaacatatattctttcttatttttgcaatagcagagctttgttttgcaacttctttccataatgctttgtgttagtttgacctgttttctttttattttctgagagcatgagaatgtcagttttttattcgtttattaccttttgtgcatacaatccaaaatgggtggaattactggataatttctgattgaaccatttaagcattgtttgctgaactgggaatgcatctggttgcctttcggttttacatcaagaactagctctgatttttaattgccttgtcctctagtttctccaatatttctggattgacatttcatcttctttggtttgacttgttttgaggttctgagggaatcgaacaaggcatttcttcgatcaaaatcatgcaaggttttatatggtttaacgagatcttaaagtagacatcaccctcaaggcacttttctccctttcctttctactagggaacaaacaatgtgtctgacatatgccttgcaatgccatccatttttcttttgtggattggtttgatatgttttaataccaaatcctgcaaaataaatgaggagataattaaaaccaattgtgtttctctattgcatgatttcccatttaatttgtacaagatgaatttagaactgttgagcaattatacataaaaatataaacagtgctcggaacctagtttatttggatcaattatgcacactattttgaggaaacactcataaatgaaaattgttttggttactgtatgctctttacatggttcatgatgttaacatcacggtgttgcagattactgtggttgtttcactccagctttggaccgc

SEQ ID NO: 7143 - DNA, 1079 bp, Populus trichocarpa
  Intron number 13 from transcript POPTR_0008s16030.1 (locus POPTR_0008s16030) derived from phytozome v7.0 (chr-ID sca ffold_8; pos 10693444 to 10694522 reverse strand)
ctttgcaatctcttccagggaaagttggttcacaggtactcattcttattaaagtttatagtcgaaggacaaatttactcccaaagtgttatgtctatcccaatggagccccccatatatggatatctcaaatgagtccccatcctttgagaattttctgaattagcccctgcgggtgcaagctcttttagcctgatttcgaggacaaaagtgagcctaaaatattttggagttaaaaatcacacccgcatgtgcaagactctttaacacacaaaataggctataacctctttttatatttgagcattaacatgcatcatgtggggtgacttttagtgtcaagatccttgttaatgaatatatttggcaccacaatgtctgagggagcatcagttttgtgcgaatacttgcctaaaatattggcttaaactgaaggcacgggagtcatgttaaaaatgaacagaccttttcactgtagataacattggagatgatttaaccaaccctaataaatggggactcaattgattggtggaggattcatttgggacgtgcataatgatttgagggcaaatctgtcctttctcctaaattttgtttggcatgctttttgtaaaaatcaaggctttatgcatcaggttcgattatttttctgagtcctttttttatctatgaagggattctctgatgtagtttgggaacaagaaagttacctgaactcaataagaaataaatatcctaataacaaaaacaataaaatcctagaaagttatcaaaataatctttaaactctaagcagtactaaactacaaacaaacaagtcaactttcttgttcctatatcgcatatttctctcttactttctccacttccctttgccccagtgttgattcttcatttttaataatctcttgcaagtagtatcaggacacattacctgtatttcctggtttcttgttctttttcctcgtttggaaaaaatccattttctcctagaagacatacagatatctactcaagcatctcaaacatttggggagtttgtgcaaattctaaccttatagcttactatgcacagg

SEQ ID NO: 7144 - DNA, 774 bp, Populus trichocarpa
  Intron number 1 from transcript POPTR_0012s06410.1 (locus POPTR_0012s06410) derived from phytozome v7.0 (chr-ID scaf fold_12; pos 6783725 to 6784498 reverse strand)
ctattgtttggcttgcttacgatactcgatcctctgtatgtttggatctgtttctttttctttcttcttttcttcttaaatttaaatcatatgatattttcaagtttaatgaaaaattgattaattattgatcagtaaagcttactggatcatcattaattaattatagttattgcaccttttcttttgatgaagaaatgtttaattattgatcatcaatagttaatgatagttatcgcaattttttattttgatgaagaaatgtttaattgatgaatttacagtaagaaatgtttatttatccctttttttgctttttttcttcttttaggaaatgtttgtttttctatatgtcgtaactttttttttttaattaaatactggttttggatgtgttttgttttatgagatcaatgaggccgttatttgttgttttgatgctagttatttcttgatacgaagggtcgttgtagtttaatctagtttttgaaaaatacgatacaatgtaatacatattttaggaggtgggtttatgcggcaatcatggaggaattaacctagtgaaacggtgtttctggttgaagtctcggtttgtctaggttagccatttgtgcgcgcccgcgcccgcccttgtgtgcgtgcataagtatgcgcaatagttggaatagttcttcaaccttttctcttattttacctgtcttagcttgatttgagattctgttgatttttccttcttattttgttctatcttatttaattcttttttccagaaat

SEQ ID NO: 7145 - DNA, 2048 bp, Populus trichocarpa
  Intron number 1 from transcript POPTR_0006s12420.1 (locus POPTR_0006s12420) derived from phytozome v7.0 (chr-ID scaf fold_6; pos 9574473 to 9576520 reverse strand)
agattgcacgttgccttaccagctcccattttcaggtttgtgattgttacaacttgctaagctcgtaaactttatttgttataaattttgataagttagtacaaacgtgcctttggatgtgtttccaaatggtaaatgtgcatttgtttccaagagagcaattcattggttgtttgagataaatggttttttttatgatgtatctattgcttgttctgtgtgtatgatgaacttttattcttattcttttttatttatattttttgtttctttctgcgtgcaaaattcctctccttgctacattttcactttcgcattatacatataatttgtacccttgtcagtcataacatttgctggtctttggtgaatcagtattatacctagatttactggcaatccactttgttggctactgcttttccccatatagaaacttgatcatggacccgccattgtcttattatttttatgtcgctagtgaggtgtttaatgttagtaatattacttacattctatttgaaaggacaaatcagaagcttttaccttttattttccatgggaaactttcttcttcattttatctaatggctgtggtattctttgcccatgtgtgttcttcttactgtccatgaattatttgcaactgttctaaactccagttgcctttcatgatcatactaggtttatccctttcttgtttcccttgcaatcatggagaaagtagacttgacaattttatttatttaattttaaaaaaggaaatatgtgggttaatgtgattactaactgtacccatgtggttgcgtgttgttgttcctgtttcttctgaactgaattggatcaaaagctagttctgttgtaaggtcatcaactgcagttttaaagttcttattcttccatctcagcactggctcttagtgtgtttctgaaatctgagttgcaaaaatcatttttgtcatgtattctcttgcagtgaatgctgcttgatgcttatgactgttgtccatttttgtctcttcttgcttacaagatttccaccttcgatctgctagccatgattaatgaaagtgaaaaccaaaaaagttttattttggagctgctatcttcccactctcaacttttcgtttcaattttttttttttgaaagcttctcgtttgtagaagttttaggtcagttctagtgtttcttgagaatttgctgagtcacgagttattgcttcaccataattgtattttaagatcctgtgtgttcaagatatattattctttgggattaattcttcatgaagtcaatcgatggtggttgttgatttgtagctatggtgtttccctgatgggagcgcacagggttgcttcttaatttcctttgatatcctgtttctttttctgtctgaattcactttttcattgttcttgtgttcattttcagaattttcttttagccaaaaaacaaaaatagtttgtcaataaaagcaaaaaaaaaaagttagtttgccaaaatttattgtttttaatttccaaattacacatgggatttgatatttaaaccaatgtttggttgttgtattttagtggtgaaatcattcacttggactctttaaaggttccagataattagcaagggtgattgcacctgctgattcagtaatgcatatttgtatattgctgctggaaatttggtttgtggttgagaaccatttacccagtttcattttttttaaaaaaaaaaaagtgtaaaatcaaagttatgtggtggatgcatgagactaaacctcaactttcatgttgtcaaggattctttgagctgtactgcaattgaccttgttgccacaagatttgttcccatctatttggcttgccttctttctttttccagatggccttctgtaattgttgagaagcctgtcagatactctccacacatgtacttgacattgattttagtcactttattggaatagcaatagcgtattttattttagaagtctttgctcaggtaaatttctgttggcaggttgctgaacgagctctttttttgtggaata

SEQ ID NO: 7146 - DNA, 1821 bp, Populus trichocarpa
  Intron number 1 from transcript POPTR_0013s03950.1 (locus POPTR_0013s03950) derived from phytozome v7.0 (chr-ID scaf fold_13; pos 2585258 to 2587078 reverse strand)
acattttcatcgaattcttcaaggttcttccttaccctttgtaattatcatgactaggggtgtttatgatccggtttggacgggttaaaaaatccaatcgaacctaaatatgatatttcttgataatatgatccggatcaaatcaagaaccggttttatccgaaccagtttagttcgattatggtaggcttttagtcatgaaaaaccagaaaaactggaaacctattaaatttcttaataaattttatttcggctctctcacaatccagtacagaggaaaaataatagaaatcagagattctatcaaaagagacaaatctttaatctttttataggtcaaattggtgctttggctaattgatcgcttgaaagcatgatgattattttgggttatatgagtggatgataatgttgtttgatctgtccaatcctttcagtattcatgaggttcatgtatcatatattgagactattaggcatatttattgtagtttattttgataatatcttagtttatagtctgactcttaaatctcatttaaagcatttacgagctatttttgacgctatgaggaatgagcggttatatgagaaccacaagaagtgtaagttttttattagtattgttacttttctaggttttactgtgtatattgatggtgtttagactaatcaatctaagttttctacaatcatggagtcaacgattccaaggagagtggtgtttaaggttgatgtctagtctaggcaacactcactagtggcagtttcagtgggcgagtataacaagctaaaggaaaaaatacaagctcttgtgaggtgttacagaaggtaaatgacaatgcttataggcttcatcttcctaaccatctgaagacttttaatgtctttaatgttcaacatttgacaccctatttaaaaaaagagcagaatttaaggaagagttctttctaactcaaggagaatgatgtagctggacttgtagaaactgaaggttctaacgattcaagtagggatctaacacgaacagactatgtggatagcttaacaaatgctattatgaaccagcacagatctaggttcaagaggaagtatggttttgcccgaatagactaacaccttaaaactgtgataatgagagatttgaccattggatctaaattagatatataagttgttgttttggctaattttattattttttttagtttttttaatttattaatttattatgaattttgttttaattccccttgtttttcaaatttaagctattttttagtagatgtagagttttctaacatatttaaagatcttgtaaatctttaaggaggcaaacttcattatatttattttcaaagaataactgcaaatatagggttcataaaacaaatcttaacctttaacaaattattttcatgttatggcaatgatagtcacaaccaattcctgctttgccgattctacaataatatttgactactgtcttgatatgaaaaagacagacaatgatgaacgagaaaacatgtctatttatactttatgttttaaaagtataaaaattcattttaaaattgtttcgaaaacatttttttttttttatctctgtctctgtctgtatctcatcaactaaacacgattatatctcttacatatctatttcttctatcctgagcactaattaaaagtaacctgaaacatcatcatgctaaggctatgtaacaaacaatttttcttctgtcctggaacactatgttaaggctgagtgacaaacaatcaggggcagaaaatagagaaaataggaagtgccttgctaaaagc

SEQ ID NO: 7147 - DNA, 940 bp, Populus trichocarpa
  Intron number 5 from transcript POPTR_0003s06800.2 (locus POPTR_0003s06800) derived from phytozome v7.0 (chr-ID scaf fold_3; pos 8319042 to 8319981 reverse strand)
tccggaagctcaattaaaggtaattttttttttctgttaatattctacgctctcaattcttaaatttcttcacaacaaattgattgacatgttaggctgttggaatattctgttaagtcatgtttaggggaggcatccgcacaccatgttttcttgttgatgtaggattcaggaacatgaaacttccactcttgataatgctttgttcaaaatcttcatacagaattgagtgcgtgcccttttgaaggtgttttgagtggtaggtttgtttatgagcatggtctctaggtccagtgcatgtatgctcatgttaaagcctgcatgtgatccatgacctgtgctctgcctagaaatcaacataagagtcgtagtttgtgtgagtgtatatgtttgtaatgttgtgccaaaaaaataagaatcatttacaagattgtatgagtctgtctaagggcacatgagtggttcaagtcctccacagacccattgttaacgtgtgttcaagacagcttttgttcaatctagctacctgacagaaaacaagaaataaagaacacttgattagttcgactcttgccaggtgcaaaaaattccatggggccatcagacttgggcaaagcccatgaattaaccattgtgcacttgcaggaaactccttgccgagggcctgagcacccccaggattagtcaggccttggcctggacacctggtgctaattcaaaaaaaaaaaaaaaacttgattgttcatgatggaatatttacaatgtgttttaagtacatttttcgtccagtgactaacaaccttttaagtaaagagtcgcctacacaaggcatggaggaaggccttaaagtttctgtttgaaatttgattattttgatgatttgcttacaaccttaaattttacagcaccacggtcattcttctcactgacatcgttcaga

SEQ ID NO: 7148 - DNA, 2569 bp, Populus trichocarpa; identical to SEQ ID NO: 6795
  Intron number 7 from transcript POPTR_0005s12550.1 (locus POPTR_0005s12550) derived from phytozome v7.0 (chr-ID scaf fold_5; pos 9319256 to 9321824 reverse strand)

SEQ ID NO: 7149 - DNA, 832 bp, Populus trichocarpa
  Intron number 7 from transcript POPTR_0014s08590.1 (locus POPTR_0014s08590) derived from phytozome v7.0 (chr-ID scaf fold_14; pos 6381189 to 6382020)
tgttgctgaggctgcttcaattgcacagaaattacgtaagatgacattatgttcttacaagctttgaaattgcataattctgcaacctcaagttcttgttatgctgcacgagccttttggactaacttaattgtttttctatatcagtcatgcattcttcttctttttgttttttctttgagacagtagcgagtacccttgcagcttagctgtagctttccatctcctttaattagtctgctttacttcagtcctaatcctaactttatacattgaatcatttaaatccactgccgctccctccctcccctcttttctgtgataatatcttcttgttttagtacatgcttctaaactcatccaatactattgtcacaccagattaagtgatatcctttcatccgacttgattgctagaagttttattcatctatattgtcatttggattttcattgaaatcttctcttaaagtgttcctggtattttggttggatctattctgatgaaatacaaaatttttagtagatttggaatgttgtagcttttccataaattaaggaaaatcaatttgacccattcctttggataatagtaaggcattagagtgctgaattcacagtgaaatttgttttaaactatgtgatttatttaaataagcacaagtagaaaaaacaaacaaataatttgtgaattgtgaaattcttcaataacaaagaatccttttaaagatttttgcaatagctcttgtttgcttttcacagccatgtgagttttttggtacttttgtgttttttagggtcatttgctgaggaagatcttggaagacaaggc

SEQ ID NO: 7150 - DNA, 917 bp, Populus trichocarpa
  Intron number 2 from transcript POPTR_0002s06420.2 (locus POPTR_0002s06420) derived from phytozome v7.0 (chr-ID scaf fold_2; pos 4282439 to 4283355 reverse strand)
ctagagtaagtgaaattgaacttcttccttaaattaatggtgattttgaagttcaattattctattttattaccagttggcatgtataaattattgccttcataattatgcattttctttctttcgtttgctgaagtatacttctgcttcacataaatttgttgaagaacatttctgcccctggaggttctaaaagtgccctttgaactaaacgaagggacacaaatggagtttcagagccctgttccgttggatattgaccttctttctcaaaagtcaatcaccagtaaagctgttggattagtcattagaggttaaaaccaggctcttatgtacagtactgtagtctcatcgtgtttttcaacttccatgaattttgggattttcccatatctacttgtattttttttgcagcaacatttcatatttccagtatgggatcagagtcaaatggatactgttgccagcagtatatgttgtagcatgattggatttgggagcaattgctatgtgttctcgggattaatagaaacaagctccgtagtttaactagcaaattcacacaacgaattgtaaagagcttatcttcagcccgaattccacgtattatcgtaaattagctgctcaactgatagaaattttttaatctgctcgtgattctgttagtttttagattttagattgaactatggcttggaatcttgtgttggtcttcttagattagatttcagatattagagcttctaaattgtgtcttcataatagactaaatagtgaagtccaatcaagaattattaggaaaccagtgctaagatagacactagtaattcttgttatacatcaactgatattctgtttatttccctctttttcctggttgaatgtccagacactatcagctgctgatcttcgtgacc

SEQ ID NO: 7151 - DNA, 2718 bp, Populus trichocarpa
  Intron number 4 from transcript POPTR_0019s10860.1 (locus POPTR_0019s10860) derived from phytozome v7.0 (chr-ID scaf fold_19; pos 12352531 to 12355248 reverse strand)
ccttgattatttctattggctgcttgctggtcttagtgctttgggattctctgcctacttgtactttgctagatcatacgtttataacagggaaagagcaatttagatttattctctcgccgttactgccaatcggtaaacaaaaagagatttcgaaaagatcattattatttaaagggaaaagaaagaattgaagattcatctgagctatgtggatttgttttttactgtatttagtattgtgatagctatagtttgaaaaaaattattttagttgaggttggtttgaaaaaatagatgtttgattaaaactgtggttgaaatcaaggttaaacaaaaagtagtttaatgtgttaggttaagaatacttttgaaattgaggttataaaataatttaaaaatatatatattaatattgatagtttttaatttaaatattatagatttaactattgctattacatcatgaaataaataatattttatataaaatattttttattgttccattaaaatatctacaattccatcacgtatgaaatacatccgacaaggactacaatttttttggtttcttaagcgcgcaataacatcaggtaaaatataatcaggaacaaaattgggattgcgattaaattctgcaaatgttacgttatcaagcgatctctgtctaatttatgtagtgtcattgaataatgttaaacactagtttttcaaataaaacacaattaaaaaataaaaaaataacttttattttactgggtcggacctagttcaatgcattttaagctttgaaccggaactggtctggtcggaaccggtccgactggaacagtatagctggctaattaagctgcactgttcatgcactgctcatactatttcttaatattatttctaaggtttagaaaatttagctcttattcatggaaaatctcttttttttttcccttgaaacgacgccgttttgtttcctgaaattctaatatttagcaatttgacccttattcatgaaaaatcccttttttttattattcttttcctgtgtgaattacaattatactcctctatattttagtgccatttacagaatatttttttggtttctaattattcaattcaattcttgattgattcttaaatttttaatttttttaaaattattcctgaaaaaatcaattaaactctctatagttgaatttcttgccattttgcttcaaatcaacttgtaaactttggtatttctttaattaaatccttgatttcattaattaagttaatttcaagtttcattaaatcccaaaacttgtcaattcttcaattaagctcccgattcattaattaaactaattcaaagtttaattaagctcccaaacttattaattgtctcaatttctaccaaaattgattttcaaatttataattcgatccttaataatcctcaaatttatactgtcttgacctaaatttcaattcattcttcattcatttcagtttttttatttcctttattttttcatttttcatgatttttttattttaaaaaataaaaaattaggtttaataaaataaaataatattatttcattcaccaattagattttcattaatttcataaagtagttggaaacaaaacctaaaacttaacttgtgaggaggagacaattagctagcaatcaaacaaatcaaacaagtttatagtaatctgaaatcaaatcaatttatataaactataaggtttaattgaataatcgatcataaaaccaaaagatcaattaagttttgaacaactgcagtgaaatcaaacggtaaacctttgagtttacttaattcagaaataaataatatttatacaagtaataaatgatattaatttaagaaatcagaattgttcatcaagttaattgaccacaacggctacccatgcttcattttgatcatgccactcgccttcatgtgtcaatgaactaaatgttaccttctaattgaacaattattaatcacgtatcctatgtttattttaaatgtcaacaatgtatctcatattaatttatttgatatcatatattttggcacgtactcttccttttcaaatatataataatttaatttcctatattataataggaaataattgcacaaacaaagtttactctacgtttatgtaaatagccaattaattcaagtcacaacacaacatatatatacacctcttttagtggttttgaatattatattatataggggttaacattttttatttggttcggttttaataaaaaaaaaacaaccaaactaaaatttatttttgaaaaaaaaaccgaaaccggttcaaaccgaccagtttcgatttgactcggttttttcagttttttactttgaaatcctgtcctatacaagaggtggtccacacaaaaatttaattttgaaatcctgtcctgaattatatgaaaggagacccttttataaagtagttttaggagctttttgaaaagttgatgtaattgtctgccatgaaatcccaccactaaaaatttgatgtcttcttcagcaagtggggaaaaaaacaagtcccgcaagttaaatctagtataaacgggtaacaataactgggcgtgactgctgctatcacagaacagaacaagcaacacggaggacatgtccacctccaatcatgctccagaactccgaacttcacttttatacgacatcgttgat

SEQ ID NO: 7152 - DNA, 939 bp, Populus trichocarpa
  Intron number 2 from transcript POPTR_0014s08450.1 (locus POPTR_0014s08450) derived from phytozome v7.0 (chr-ID scaf fold_14; pos 6282412 to 6283350 reverse strand)
aaaatgtaagtttgttttcctttgttattctcacgattcttagctcaactgaagttaatatctcatgattttgtagctcagctgaagttgttgctcatgatttcgtagctaaactctgttataatgctaacaatcctcattaactcaaaaagatatacacaagtaagtccgttaatgtatgtgatatgcacaatgggttttgtctgctcacagaactcatattgcattgcatcctttctacttgtgtattccgcttgtcttgtgacagggaagagtgtaaagaaatctcttggtgaggggaaatatttagttgctaagtaaacacgagtaaattaatagagtctgacaggaggctgagctgccacatggggactggaaaattttaacaagaaaaatcctaccctgtgacaatgctactaagaacctgagttctgttgcaattgagattctcttatagggagtgggatttttgttaaattgttccgtgtttaatttattcttattatcgagtgggtgattccttgataaattaaacttttaagttttgctttcacaaagcatgatgatcttggtgattcagaggccagttgctgggtcgactagagttaccttggattcatttgattcacaactttcttttgtattcgacgttgtcctttagacatgtgctctggtagctcaggattgactagattatcatgattgctaagttccttaacttatttgttcgacttctttttatcctcatttgagactagtttgtcaacactctgtaattacgtgcatagaagcatacacagcatgggtgcttgctgacgttgtaccgcagaacctgtctaatttattgtttctatggtgtttttttttgtatctatggtcgtgctaatcatttactgctcctcaggttattgctatcaaagacatcatccggcctcccca

SEQ ID NO: 7153 - DNA, 2113 bp, Populus trichocarpa
  Intron number 1 from transcript POPTR_0006s25260.1 (locus POPTR_0006s25260) derived from phytozome v7.0 (chr-ID scaf fold_6; pos 23670441 to 23672553 reverse strand)
aggtcgcctccacgaggaggtccctgtttgatcaggttctctacaccctctttgcaatgcatgaactcgtcattcttatttggattgtttcctttttttaagaggaaaaaaactatgtacagtttgatgatttgctataagacctcgcttaacctaataggttttaacttggtagcctgccagttataaatttattctggtttagccagtcaataaagaactttttcttatcaaaacaatgttgatttggattttttttatttaaaagattaatagttggattaatccagatgaactcccgactcactatctaaatcttagaccgagccaattctctatcaatcttatacctataatttaatgccaaatctctatttccttttacttttgttctacaaccctatttgcgaataccattttagccaatcttttaaatgcgctttttatagatccaaatattttgaaaaagacataaactacttttaattaattagatttacctgttactgtttttagttaattagatgagtggttaaccaactccaaacttttgtatttcatttaatatttagatatgttatttatttattgttatatatattatactgctatactaataaatttctatacttttttaattattttataataaatttgttttgtaccttaattgtcaagttttctggccggcgccaagcttaaccctatttatgtcttcaattttttttgatctcatgcatacaaactagttaattatatgtatctcattttttgtataacggttattttacattttcattcttatatatttttgattatatctttttataaataaattcaaaatatttttatcattaaaatattaaaataatttaaataagttgatgggtaagataagagttaaaacggtttcaaataggtatacctatttatattaataaagaaagtaaagaaaaattctcatattatatatctaggtttaaatcaagaaaatgaataataaaaaaaagaaacaaaaaatttcgggtttgttctcctttcaactatgcttggtccaattaaccttagcttaaagccatgcttggtaattcaaagtaggaccccgtttattttatgaaaagtagttttctaaaaattatttttcaaacttttttgcgtttatttgtcattagaaaagttagtcaatgaaaaatacttttcagtcaaagaaaaatttagtctggtttctaggaaagtgttttcctttatcttgggcggaaaacactttccagaagttgtgaaaaatatagaaatgtcatgttatttgttgattatatatatcaaatttggtcctcaatcttttgattactatatattttgttttgaattattttttttcaatttcatcatttagaatttgatttaatttgatttttataccaactttagttctcatttttatgattgttatttgcttttatcttatcatttttttaattgaatttttttatctatcagatttggtccttattcttttgattcttatttattttatttgaaataatttataaaattatatttttttttaatttcatcatctttcaacttttttatatgttatatttgatctctattattttgattgttatttattttatttgagataatttatgaaattagatttttttttcaaatttattctcattcaaccttttattttgtaagatttgttccttattattttaataaacttgaaaaaaaatattaacaatatattttacagcttattttccatgacatagtgaaatgctggaaaatattttctaacttattttccataatactaccaaacatcgaaaaataattcacttttcaggaatttatttttcaaagaaatcattttaaaaaaaaactattttccagcaaataaacagggcatagattgacccggtttgcaactattaagcaaagagaggttaaactatgaagctctgaattttgaccagaaaaaagatagagaaacacacgtaattgcccgaagagaaaaagtcacgctttaaactaatagaaaagttaaactttataatcgatgattgcagggataccttgacgaccaattcattcagctcgagca

SEQ ID NO: 7154 - DNA, 1740 bp, Populus trichocarpa
  Intron number 1 from transcript POPTR_0017s02340.1 (locus POPTR_0017s02340) derived from phytozome v7.0 (chr-ID scaf fold_17; pos 1723027 to 1724766 reverse strand)
cctgctcttcctggtaggttttttgactttttttatctggctttttaatttggattgtcaatttggtggaattgagtgaaatttgttttagtcgtgagtaaagatcggaattttttggtaattcattgttaggattttccccttttgtgtttttttttccttgaaatgattagtttttttttttaattatgagtggaatttgttttaattgtgagtaaagattggaaattcttggtaatttatggttaggatttttcccttttgtgatttttttgttgttgaagtgattagttttttaatttgttttgtaggtagaaatgaatggtaatttatgtctgtgatttggctgattttggtgattttaattagaatttggagtgttggactcttcttttttgggtttttgagctggatggtgaatttggtggaaatgagtgtaatttgcgtggatgttgagtaaagattggaaatttttgttgtttatttggggctttgctttaattgttcattttgtaacttgtattttgggtttttatgacttctttggggtttgattttttaactggtttatttggtgtttaatttggtaaaaatgagtgcaatttgtatgattattgattgaagaacagaacatttttgataatcgatggtttaggcttttggctttttgtgatttgggttcttagttctctaattactctattggtagaaatgactgctaacttttgatggtgatcgtgtgatcttgatgggcttaagtggtaattggtgttcatgtggtttaactgggttttcaatttagttctggatatccatttaccaatcgaaaatgggatttaattttttatagatgggttattttattggaaattggaatcttatcgatcatttcattaaaaagataagatttaatttggcatctgtttgctcatttgttataatagatttgggtctttgatgccttgagtatgaaatgcaatgtaacaatgtggtacatttgggggtctagattatggtgtgctttaattgtttgatatattgaacattctattatttatgatttttgctttctcccaaacaagtcatgatgggtaattcgtttttagttggatgttgttcttaaagctattgtttttctcgttgctttttttttccctagaggttcatttagatgtgtattattttgtctcatttttgtttagttcaccttttcaagtttgcaggtgatctcttttgctcttttgattttttccttgttttctggttttgtgactgagaaactagttggttttagtttcttgccatgtgctcagcagaaaattttgtttttattttattatgattgatttaatgtttctagttttttggtttgtttttgctctcaatgtcaatgttaatgtttctgatttatttgctactttaaaagcttcatcacacacacacacatatatgattcatctcagatttgatttatggcatgcattgtatatgcaaatgcattttgatttgcttatataattataagaaatggctattttatgatgcaagctctttgtatgaatttgcatgtatccttagtttttcccttttgtttcattatcttttttttttaggatcttttggtttcttaatttgttgattgaagtttcaggattgcatagtttaagaatatgtattctctttagcatctgttttatttcataatgatgtttcatttatcagagggtttatattgtagga

SEQ ID NO: 7155 - DNA, 1457 bp, Populus trichocarpa
  Intron number 3 from transcript POPTR_0014s14580.1 (locus POPTR_0014s14580) derived from phytozome v7.0 (chr-ID scaf fold_14; pos 10666200 to 10667656 reverse strand)
caaaagatttgactggtttactcatttccgtgaaggtaatgattttcttctgtctgttttgctagaattgaagtgcaaaagaacttaatttttcctcatgtgggtgttagactttatttagttttataaatgcatgtagcttgtaagcttgcacatgtcttttggtgtacctttgtcctgttttggtagttattaaacagtgccaggaacatgtaaatgaaaatcccatgatcatatttgctgttttcctttgtaaaacagtatgatggatgtgtttcttttttctttttttatataagcgattagaggggaaataactcctctctcaaattaaggaaagtgactttagcataaaaaacttaaaatgggacaaggtggaaaatattatgatattcttgtgctggaatcaagccctatttggctcttccgtgaagggtcttgtactgaagtcctggcagtgttttgctaacagtcttgtattatgcaaagccatgattttggatgtctttcaaatgcattttgaaaggcccattcagttcatgttaaaaaaatttcttctggttaattgttgtgatcgagtcattgagttatcacattgccattatttaatgaccatggctcatgattgccctgtgataggcactctgttttttgaccacttctattaggtgactaaatcattgttaggagtatccttttggtggcgttcggattgtgttatcaaaaccatgattctaagtgtgttgtaaatccaaatcatggtttcaatttttttttaaaatcaaacctgcttcttcttctttttttaactctcccacaacttcaaacacaatagtttaaacgagtaaatgtatgcataaatgcattgtccaataggatagagagaagatgaagccaataacatggagacttacaagcaaagaataaatgcagaacttaatatagtatttaaatacaaaatgactacaataagagaaaattagtggttgatcaaactgatgagtttcagcattccagatgatgaacaccttacttagtagtgcttagatttatttcttcttgaactataggtttgtgtttgttatgatgattttctgaagattttactttcttcacttaacactgacttggaagaagtaattgctgaacatggaggaactgtttgctagtgatgtttttaatcacaatggtgataataagaaatccagaacacctgaaataaaagtgaaaatggtaaagagcagacttcttagagaactgcttttcatttcatgtcaagatgcttcagttcctcccgatatgtttcttgtaactgcttttcatcttgctccttgttcttttattccctgcttctccttgcctggtaacaattcgacatttcattcaactttagtgatgttggtatacttctcaaacatttaggtaatccacgctgaagaggagaacaggaaattgat

SEQ ID NO: 7156 - DNA, 1796 bp, Populus trichocarpa
  Intron number 1 from transcript POPTR_0013s10400.1 (locus POPTR_0013s10400) derived from phytozome v7.0 (chr-ID scaf fold_13; pos 10626355 to 10628150 reverse strand)
ctatattttgggaatcccaagaggccttgcttcaggtatttaattttaattacaataatttacaaaaaaaaaaaagagattataataattataactaaagggttggcattgcttccttttgttcttatgtattttagcttctttagaaatgatatatcatgcacaatgctattcaagttcagatgtttactatagtagctacctgatcaggaaatgaatattcttagtatttgcaactagtaaaagtaattaaaaaaacaggaaatgaatattaatagaatttttacaattaatctctttataataggatggttagttctccataatctctcatcctagcctctaaccaataattaagtgttaagtttttagcattttgtgttatctttagactatggatttgagacaaaattgaaatcatgcaatatctacttggattgcaatacgaaattatatatatttgtctgggtataacgtaggatattaattggtatagtaatgccaacatacagggaccaacctccattatgttttggggagcttggcaccctcaaagtttgataatattttaattttagtatatatttttttatatttttcataataattatacattcagcccattttaaagtaaaatatttactctccaaccttataatttttacatgatggcaccctcagataaaaacttttagttccgcccctagcaacgatatatagtccagtagtagaagcttgttgtgagatttgttttttcttaatactagtatttatttttgcagtggagcaatgcttttaaattaatagattttttaaaaattaatttttaatgtttttgaattattttattatatttattaaaaaatattattttaatatatctttaattaaaatatactttaaaaaataactattattacaggataaaatactctaataatcaatcttttgatacagagcatatgtacttgtttattctaagatgctaatcggagtactcttcaacgcaaaaaagtttttgtgaattaaagtgaccaatcattagttattttttctatttctgtagagatatgattttgagatttttcagcactgaatccaccattgaatggacaagcaacaccaggggacttcctggaaactacgaccaccagattgatttagatttttagacaaatcaggtccttttgtccagagaatataagattttttgggggcagaaaatataaacatcaaaataaatgtgttagatattgtatggttgtcaatgatttggaaatttgctcaattttggcatcattttcgttacagacaaccttaattgtaactggtaataatggtgccacgtgtaccgtcgccaacctccggttgttaaacaatgaatcgtgtgcaaattgggtaggtatgaaagcgatgtccacccataaaatcttggaaaaagaagacaaatatatcaacttttagagcttcgattgggctatattttacttcgttgaaatttcaatcgtcatttcggtagtggggtgagacgggcgatgaaaaaaaaaaaaaaaacttattactatgacgtactgaatcgatcacttctataaaaataaataaataaataaaaatacagggagtaattttagccaactcacgagctcattacctcgtgaaaactcttaataatgtaacaggtaattgcatgattacacatgtatataacactgggaacttgtaattgagagatttagcgaaaccgataaattgtttttgcaggaagtcttgaaccgctgtagcaaaacaggttcaaa

SEQ ID NO: 7157 - DNA, 1313 bp, Populus trichocarpa
  Intron number 17 from transcript POPTR_0002s15100.2 (locus POPTR_0002s15100) derived from phytozome v7.0 (chr-ID sca ffold_2; pos 11212337 to 11213649 reverse strand)
tcttccctccatcagatttatagccggcggtaaaattttatttggcttttattagtgtaactggaattgtatttcttactgtttattctttaatttcaacaactaagaatctttgttaatttttttgaagatgaacaatttgagtgtcttatattctgataacatgtttgattactcaagttgtttgtcagaagaatgcaattgtagtgtgtaggtgggtcatgagtctatgattttaaattgagttacgacaaggaaatataataactttggcttaccaaaaaaagctgacacactcttttcttttgtaatatgtgggggatgcaagttgatttggtttaacgggtcatctgttggttgactttaagactcttggtttgctccagctgatttatggttttacatgttctgggttcacatgttgcactagcattctagcctgatatgcaagcatcaatgatagaaagtttcttaacttattttagaaagataacaccggattcatgcaggttgcctctattgagatgctttatttattgttttcccacacgagacactacatcaaatgtcatatatttgagtaatttgtatcatagatataatgatttttagcaatgtcttctgaaacacaaccttgattttccttgatttggaaggattgatgtgtgttatttggcagggtccttatctttccttaacctttgcaaaatgggaataaggaacctgctgtcaagtgactgtactcgccttaaagctttttacctgctcagtgtttatcacattctgtctggtcatgaaatcattgtgctttctcaattgctaacaactatgaaatctttagatttaaaagactttaggagtcattctcggagttgtttttttctgaattcagaatgtaagcagcttttctattgtatactattaaatgcattctggtcctactaagaactggcattagcacattatctaaatgtcagtcctacattccagaaattcagttgtttagcaggtgtgattcttggttgacagacattagaagtgtgcattataacctgcaacatgcatatccttttgctcaacttcatatgctgccttgcttccagaattttattattttttcaactcatttactgaccataagaatatcttctggtatcattttatatgcacgaagttatgacactcgcagcagaaattgttatattgtgtagcaaggccataatatcattttgcttttgttcttcactcatctccatactggtttgctgccatcttcaggtatttgctaagaagaagtgctctggaattgttta

SEQ ID NO: 7158 - DNA, 963 bp, Populus trichocarpa
  Intron number 1 from transcript POPTR_0019s12930.1 (locus POPTR_0019s12930) derived from phytozome v7.0 (chr-ID scaf fold_19; pos 13971096 to 13972058)
gagcttagggaattctgggtaagctcttgaaaatcccatgagaaaatgttcgttcatttgttgaggatttgaaatttaatttaaaattattgagaatgatgagctctgtgaatccatatttattttatttgattttgaaaacgttgtagcgaaacacttctgtagatattatgtggttggttgttctgtgtattaaaatatttgtttttttatttaaataattaatgtttttagattattttaatgtgcttgtattaaaaaataaaaaagtattatttgtagtcaaatatttgtatagatattaagtggttgtttgtttttctgttttaaaatgttttataaaaaaattaaatttttttagtgtttttatattattttgatatgtttgtattaaaaataattttttaaaaaaattatttgtagtgaaatgtttgtatacatattaaggtttgtattgatatcaagtggctgttagtttttgtgtttcaaaatgttttttaaaaataattttttaaaaaataatttttttattttaaattattgtttttagtgtttttaaattattttaatgtatttatataaaaaatattatttagaagatattatgttaatatattttaaaaaataatcatcactattttcttgaatatccttcagttttagaaaataaataggacagtaaatgttttcttctgtcgttaaataatattctatttatttgagtatttatttgaggtgaaaaggataatgcaataataaaaaataatattgattgagatatgagaaaacatcatatgcatttgcatttcattgattttcttagataaacaccgattacatgtagtttccagtttcaaggattggttaactcatacgtgcctgctactaaggagtgagtatgtttatatgtgttcttcttgtttgtcagcccggagtctgaatttattgagaaaatcgttggag

SEQ ID NO: 7159 - DNA, 913 bp, Populus trichocarpa
  Intron number 1 from transcript POPTR_0006s03550.1 (locus POPTR_0006s03550) derived from phytozome v7.0 (chr-ID scaf fold_6; pos 2318280 to 2319192)
ataagcttagaggcctccttccttgcaattccaaggtaatatatttatgatatatgatcttgcgtttccttttcttttcctttctgaattgatcatgtttctacttatgaagtttaagggattatattaatactctttccctaaaatttcttgtgagaggattgttttataagagaaagggatcacgaaaactaaaaagattgtaagctttaaaggggttttcatggaaaatattgtaattttgttcttgctgtttttacttttatttctcttttgggttcatacagaacttgaaacgaattggtattgatttcggggttttccatagtgttttgcttcaataattttgattgtttggttgctgagaatgcagtggaaaaagttgaaatttcgagttttagacttttcagtcattaattacctttgacccacaaagccgaaatccctgctgacagacttgacgcttgcccaactcaaatcgtttggcatttgttgtttacttgaatacccattttttgaagattaacaacaagggttttatgtgcttcactcattgaattttttttttatccgtttctatccctcattttcttggtaaccaaacgggaaggatctatacaaggcttatcgctgctacagtaaaaattcagattctgaaaccttggatctacacaaacaagtcttctgaaacttttgaattattgtttaaactgcaagtacatatacctgcaaaagcaaaagcagcgaacccttttctttgcttttctttacatagggtttgtgcttttaggaaagttgcaaggctttttacatttcgaatctactaaagctagctagggtttctaatcgatcctgttactttgtttcaatttttacagacagacaaagcttcacttctagcaaaggttgttca

SEQ ID NO: 7160 - DNA, 527 bp, Populus trichocarpa
  Intron number 1 from transcript POPTR_0015s02100.2 (locus POPTR_0015s02100) derived from phytozome v7.0 (chr-ID scaf fold_15; pos 1440467 to 1440993)
tctccagagttgctgtttttaaagacagaaacaaggttcagcattcattattcattctgttgattctaaaagaccattcctttttgcatctcagattcggattctcctctttttgaaccatcccagattagtacttggatcctatccattatgaaataaaataaactcttgtttttctattaaaaagatttaaagtttctttattattttcatttttttggttgttaagctcttttattgttattatttgatatctcagctccattagtaatggagtataatgatttagaggtaagatgttttttctgggattggtttgtgtttattttggattaaaatcaatgaaaattaatgcaaagagtcaagattttgatgatttttcatctggggtattttaattctatttgataatcatgtacctcaaaagggtcatgttagaattattgaatatttattatttggatttgattttttaagttttgagggtgttttttggtagttttgataatgttattggacttgtgcag

SEQ ID NO: 7161 - DNA, 4375 bp, Populus trichocarpa
  Intron number 3 from transcript POPTR_0019s12400.1 (locus POPTR_0019s12400) derived from phytozome v7.0 (chr-ID scaf fold_19; pos 13448541 to 13452915 reverse strand)
gccactccctgattcaccgacaaaccaaacagacggtatgttttctatttcaattctgttgaatgctataataaccgtcattaatgaattgctagactactgggattgattaatggcaaattacttggtgattttcttactagtacagcgagggctggccttgtcttttcctttctttgtttttttgaaagaggtttgtgatttggtgttgtagttgttttagggataataatttgaaaaaataagtttaataaaatttataatatgtagtttttttcttaatttagtgataaagacagaaactaaagataacaactaaataaaaaacacaaaatttatttatgggtgaaagggaatacaacattaaattcataagtttattctctgaaaataaaaataataaagtttgtatttttagaaggtttgcaaactttaactaggtcagaaatcttatcctatctagaaaacaaaaataaaaatctgaaattacaaagaaaaaaaataaaaaattcaaaaatagcatgaaattcaaaaataataagaaaaataataaaactagtaaaaccagggtcgtggggcgaggtttgtaaaatttaaagatctaatagtccacaaagcaacacagaaacaacttcaaaggaaaactgtaataccctcaaattataatgtcatgaaatcttaaatatttctttactaatatcaagtattgaataatatgtctaagattatgagattttttttttgaaatttcggcagagttttctttgttttttgatgttaccaagttattaactagacttcattcaatcacaatacacaaattttccacttcgatccaaccatcctggatcatatcccatctcatcatacaatattccacataaccatacttcgttgtgctttctcaaccttacatcatcaacaaataaaatattaactacaaacaaatataaactcaaatgattcatattgaactaattattacattagcatgcatccatcttttaaacatgcatgattataattactaagtattcttttcgaatagtttactaatattagttccttactcatactttctaaatgtataaataccaaaagcaaatatctttaggatacatatattaaaatctacatataatacaaattacatataaaacaaaagatattacatcccacaaaataaacagatttaaacacaaaacccatatttaacgctccgcatcacctcgtgaaaaacctgtatacataacattaataagaaataaagaagataacacattaaaaatgataaagctattatgttaacaattcttcaaaatatatcaaattgtctttcatcactaacttactacatatcaacattaataacccattcataatttattaatcctatacttataggacttctgcaattaacactcattgcttaacttttaatttgataattcacaattttacctcaaacccgactaaccctcttcgataaccaacaatcaaatcggtaatttcatacacattacccaacatccggctattctctaataataaccaatatgaccggtaatttcatacgaattacccaacattcggctattctttattaatagtcaatctaaccggtaattccatatgaattaaccaccatccgactattctctattaatagccaatttaaccgataattccatatgaactacatccggttattctctaataatagccaatctaactgataatttcatatgaattacccaacatccggctattttctattaatagccaatctaaccggtaattccatacgaattatccaacatctgaattataatacaaacaagtttcttcttctgcttttttcataacaatatgtcataaacaactcataactaataatgaaactttgaattttaaaagaaagtgatgaatcacctatcgtctgctcgtgatggcatagcttctcctgcctgatgccttgctcccgaaacaactcttgaatcaatcaaattgcactacattattaatccattattatttctcctatgtgcctacattggaagcacgtaatattttttatttaattaggttttgcactaaaattttcattcatttgtcacctcattttcaacatatagttttaatcaattttcttcttttaactcacttaaagaattcttccatgaactattcctagcatttatttattccttcttttcacattcttatgatgtttctttacttgttatacttcaaataattaagataaaggacgtcatttctcaaacataaaacaatcaaaacctctttcctttatttcctcatccttagttacaagttcatttcttcaaacttattcaatttattttttatttactacttacattcactatttctatactattctacctcaattccatcatgtttactacttttcttaaaatcccaaaattctcataagaaccctaatttaaaaactcaagaatataagaaattaaatcaaatttaattgtcattgtctgattacttaaataaactcaaaaacattcattcaagtaagaatcttaatttttcatgcttaccaatctaagttctcccaacttctcttctcctcctagtgtggccagccctcctctcctttcttatatctttcttcacttgattcttccttaatttaatgttctaagtctttcaatcttacaagtttcaaagctttctctcactttttcttgtttttctcttgatttctaacgttcttctcttgtttttttcttttcacattttgtttctgcccagttggcttataatagaaaaggagctgatttgttttatttttaatggcaaataatcattttacccttaatgagtctttttgcttatatttgacggtcttttttttactagcactaccgagtttcgttcatcctaaaattttaaccagattttattcaatatattttaagattcctcataaaatttcagctcaatctgattgtcggattgaaaattacatccaataacgtaaaactagtcaaattgtgatttttcatcaaatttccaaatttctctaaaaattctgaaattttaacccaagctaaggcatcatatgagaaggctccatgcaaatttttagaattttttaataacccgatcgagagttatgaatttttttattttacatgaaattagtccatttatgattttttacccagaggttttaccaaaacaacctttggaatctcctgtaaaaatttgacagcaatccaatgattgaaataaaagttatggcccttttgaactgttattctggtatgatgctaccatatttattcttggtcatagacatgtccccttggtctataaatgtatcttctaggtcatccatataacatatctgagtcagatccttatatagctatgatagacccacacctaactgctcaaatcacccgttatcgtaggtccggtaacattatctagttttcaagagagagtttccagttggatctatgtaatactataatatgtgaataaagattaattccaacaactgaatcttatggaaattaattttcagaccgaaacataattcataccattagagggttcactttaccgtgaataaagattgcaaactgaccgataagaacaccaaggtgtcatctcaattgtagcccttttgaataaaccaacctctgatgtacaatgaaacaagaatggagataacaaatcacgttgacaaattcctcgtgtgaccttgaactctctagtaggagacccgttaataattaagaactgataattgagaagtaaagagacatgcatatattaaacttctccatttagcccccaaacccatatatcccataatatcatcaagataattctaggatacagaatcaaaagctttatggaaatccactttgaagatcataccttgtcccctcgagctttgcaaatcatgaaccactttattgcttatcataaaaccatcaacaatctaacgtccaatgataaaggcaatttgattatcactaataagatccttgctaacatgtttgagtctgttggaaagaatctttgcaagaactttatatagaccattaaacaaaccagttggcctataatctgaaaattcaattggaatcttataaaatcatacacatgatttgtttgatagccaccgtacaaatgataaagcctaatgactaattgagatatatatatatatattcatcataaaaaattattctcgtcacaaaaaggtgagatcgagatttttttgatataaaggcctttacctagtatatagcgattctctcttataaatctaaagttatgcacttctcaccctttttaacctaaattatcatagttg

SEQ ID NO: 7162 - DNA, 554 bp, Populus trichocarpa
  Intron number 4 from transcript POPTR_0014s11600.1 (locus POPTR_0014s11600) derived from phytozome v7.0 (chr-ID scaf fold_14; pos 8590948 to 8591501)
tgcatcgcacacacaaccttcttcgaaaaattcaggtattcaaaaaccatcgtttcttgcacgattcatatttatatactgataacatcatgcttgcaggtgacttttgagaaaattttcaactaacattgaattgtattttatgaagattagagaatgttccttgccaagtatgctgaattggaactgtataacgtcgatgttgtatagtcacttttgtttttgacctcgctagttgacttgtatgtgatgtgcacctatttacgctgttgaactttgagcatgttgcatgctagtctcttgccagtttttacttgacagtaatgatcacatgtatcaacatttttgtttcataagagtctctataatgaaggctgcaatggatttttttagttaacgctgggtcttgtagttcaatttttttttttgataattttagtcaagtttttaatggattgaatggaatccgcttattctacataattaaaacttcagtttttggcattatactagtcatacgaatttcttcctctctggaatagagcagttcatat

SEQ ID NO: 7163 - DNA, 1725 bp, Populus trichocarpa
  Intron number 2 from transcript POPTR_0012s03970.1 (locus POPTR_0012s03970) derived from phytozome v7.0 (chr-ID scaf fold_12; pos 3185983 to 3187707 reverse strand)
agaaatctgtaagttgatttcatctgatttgctgatttgttctccttcttttttttttgctctgtgtaagagatgtgttattggtttttggcgatttttaattattactaagcgttatcaaagaaacgttggattccttcacagaaattaaataaaattaatggaaactgggattagggtccggaaaaattacatttttattctccttatatatatatatagagagagagaggctgccatgatttgttttgtaatcttaaaggggtggcaacttgctaagaatctgatgggatctttggtggccagggatgtagtgttttatgttatggttatgaaatgttggggtgtgattttgttttgcttattgcgttcttgaagcgttgttggatgctattcatgacccttgttattgcctcagaagttttgtgtatatgcaagcttaccccattgggttcttgcttattttcttacagtcttttgctgatatttcattgtaacctcacttgagcagttaactgagtcattaaaagacatgctaaattatcaaaacagaagaaaaggtgttattgggataaaaagtggtttagttgtttgtcgtttgtatatgtaaagtgtttgcctgaatttagattattacttctagcatcatgaatgtccgaacagcatgattgtcatgaacctgtttgaaaggtgggaaattgaagaggtgaggtgctaatgtgaaacattgagtgcaaaaaagaggtattccctgggaatatgtctgcagttggtagatgccactggatctgaaagggcagaattgagccagtaatctctcttattcaggactccctggatgtgtctccgggggtgacgagcagggttacagttattgcagttttatttagtttgcattaacacataacaagaagctagattctgcatgagtattgttgtcaatgcagttagtttaagaagaaatgactccattaataacaactagctccttacacaatgataattattccatttccagtagattctgttctgtagatgctggattttcagttccacaataacatatgaacttctgttgcatgctccaatattttagcaagttatcaattccatgtaagcatagcaagtaatgcacacgctagcaggtacctgtaaaacatgcacacaacatgcatcacctctctgagtagtggcatatacctaatttttgaatttctggtggagtgctaaattaaatataaaaaaaacttaaggtttataccccataattatttttcaaaagaatatgctagtagttatttccattacttctgttagacatgaacaaatgtataagaacaaatcatataattttttacagctgttgtaatgtttgttgtgcatggagatggttccctttttaactgtcgaaaatcacttgaagctgaaatttctagtatgaagattgatcatttgaaatggaaggagtaaacaaacgctatcccccctccctgactagaaccgcgtctcataaatttacttagattgatagattaagcactgggaggtatattacattgcatattctgaaaactaccagttcaagcagggaaatgcatctcatgaggctatatgttagaagaatgtatttgaattaaagttgtaaactgctattgtttattatcattagaatctacacaaacttaccattgaagtctgctgtgcagatctacaaagctcaaagga

SEQ ID NO: 7164 - DNA, 974 bp, Populus trichocarpa
  Intron number 1 from transcript POPTR_0019s12570.1 (locus POPTR_0019s12570) derived from phytozome v7.0 (chr-ID scaf fold_19; pos 13619588 to 13620561 reverse strand)
gaccttagggaattctcagtaagctcttgaaatatatcccatgagaaaatattcgttcttttgttgagtattgaaatttgatttaaaattattgaaaatgatgagctctgtgaatctatatttgtttcatttgattttgaaacgttgtagcgaaacacttctatagatattatgtggttggttgttctgtttattaaaaaaaaaaatttagtgtttttagattattttaatatgtttatattaaaaaatattttaaaaaataaaaaggtattatttgtagcaaaatgtttgtatagatattaagtggttgtttgtttttctgttttataaaaaataaaaaaaataaaattaatttttttagtgtttttataatattttgatatgtttatattaaaaatatttttaaaaaaaaattatttatagtgaaatgcttgtatagatattaaggtttgtattgatattaagtggttgttagtttttgtgtttcaaaatgtttttttaaaaaataatttttttattttaaactattgtttttagtgtttttaaattattttaatgtatttatattaaaaataatattttaatatattttaaaaagtaattattattttcttgaatatccttgagttttaggagataaaaagtagatttatttttatgagggcaataaatgttttcttctgtccttaaataatattctatttatttgagtatttatttgaggtgaaaaggataatgcaatattaaaaagtaatattgattgagatgattctataagatacgatgatatgagaaaacatcatatgcatttgcttttcattgattttcatagataaacaccgattataagtagtttttccagtttcaaggattggttaactcatacgtgcctgctactaaggagtgagtatgtttatatgtgtttttcttgtttgtcagcccggagtctcaatttattgagaaaatcgttggtg

SEQ ID NO: 7165 - DNA, 1067 bp, Populus trichocarpa
  Intron number 1 from transcript POPTR_0571s00210.1 (locus POPTR_0571s00210) derived from phytozome v7.0 (chr-ID scaf fold_571; pos 9669 to 10735 reverse strand)
ttgtcaagcagcctataatcgatcacttccacaaggtaactttctcaaatccaacttcaatttatcattaattcttgggattgcgttttaaattcttgaaattgatttcgttttcttgtatttctggttaaatttacttttgacaaacccaaatcgattttgttttcttagaagttaatgtcatctgttttttctcagcaaacgaacaactcagtccctctccgtgcgcttgtaatgtgtttgtgattgatctttacttgaatcataaataaatgtgatttttttttaattgattttgctgttgttgtttaaaactctagtagtttggtttagggttattgtttgttgcacttaatttcaattgaaaaataatctctgtagtttaatttaaacatgaggcaactgaaaggcaattaatgaatcttttaagttgatgggtcttgtattctattgagtattccactatcatagatatctgtgattaatttgttatctccctttcttgaacgatttgcttcttgtgtttagattctggaaaatctatcttgtttcttgctttcacactcaattttcagtttcgttcgtgttaatgctcactgttgttgctagattttttattatacagtgtacttccaaatctcaagtactttgaatttttgaatggttctagtgttaagcaagagattaatgtaagaggggtggtggtctccaattccatgttattgtgttcgatagaagattaaaaaatagtttaatttgtcatcactgccatttttacctgatattaaatttgtttcacgaattcgtccattttattgacaagtagtgtatggtagagctatagagatcacagaaaaagttatgtaactgtcttagggtttatctgatttttcatgacttgcttggtggaggggttgtgcttttgggaataattccttttagttacattttgaaacttaatttatggtataaatcattcattttccttattttgcatggtttatctacgttattaatcagttccaatgattttgcagaatattcctttcaactcattcacagcacca

SEQ ID NO: 7166 - DNA, 1603 bp, Populus trichocarpa
  Intron number 4 from transcript POPTR_0001s12900.1 (locus POPTR_0001s12900) derived from phytozome v7.0 (chr-ID scaf fold_1; pos 10009822 to 10011424)
ggttttcctttcttctgaattggaaacgaagattggtaaatttggcttttctactttctttttcttcctgaattataaatgaattgtattttatgaaattactttatccccaacatgatactgttttctgttcttttcaattgtttagtattttatgttgttgattgttccaatcaatttcatagacttgcatataaccacatgtttttttatatgcttgagtatctttctgttgttgaccattgagtgagagtacggatattggctgcgcgcctgtgcctgctggaatcaagagacctgggaaaatggctataggaagaggtatagagctggatgttgacaccagggtctttagataactaagagttgaagtggtgaaggttgttgtagatgtatctatatcacaaataaattctccatgtggatttttcccataatgctgttgaattgttgagagctatttgcatcaaatgaagtcagcactttaaacaagggaaaatatagacaagaaagaaaaggggaggtcatttctactcatgatcagtatcttgtctcatggtggaatatgaattagatagcaattgaactagtagtttgatgaactctttagtttacctacgaattaaatttttatcagatttaaggaggttaactctttatctaggcatatggagagtgatactgggatgaaataaaaatggtcattttaatgtgattcttctatagagtttgtggaaggactgttccggtcaagcattgaggtgaatagcaaggtagcaacttctcgcagaggaacttaaaggttaaaattccaaaataccctctgtagtgtcctttttcacttgggagctgccttggagtatgttttaactattaaaaaggtgctggtaaatagatactttataaaaaacggctgaatctcctactcttttgtttttggggaaaaactttatgagaattggtttttgaagctgttgggttttgtgggggtcgagtcaggttcctgtaagtttggaggggcaaggaagaggagagctttggggttgcatttcattagcatattttgatggttgtgagaataatgctgcacaatcaaggggaagaatcatgtttgtcctcctcactagatttaattggattaaggtgtttttgcttctttgcatatcatgaaagaaatgtattgctatactatgtttgtgtcccccccccccctacctataatagggctatatatatttgatgccttttagtaattattaaaaaaactattacttctatgagcttggaaccattgctcatcaaatcagttgcatgcaagtgtatcactggatgtctagtgttttaggtgtcttaatttaacatggatgccatttgtttgtcatagactgtccttaatcaacactgtgcaattgattattcgtccctgattattaaaatagtccaaaaatatacatccattgttgttgttgtgatagctttgtgcactgttgatttaattctgtgaatccaatcctgttgtgttaaaatcttatttaagcattacctgacatggttatctgcactgatagttggtaaaatttcaaggcaagtttcgcttgtgcat

SEQ ID NO: 7167 - DNA, 1181 bp, Populus trichocarpa
  Intron number 1 from transcript POPTR_0004s16900.1 (locus POPTR_0004s16900) derived from phytozome v7.0 (chr-ID scaf fold_4; pos 17288599 to 17289779)
agactgtttctcagcctaaccggatttttgttcaggtaagtcataagtggcatgggacactgtagtttttctctctctttttggtaaatgccagggggtagttttgtgattttctggatgggtaggggtagtctggggagttggggtatgtgagttgcgtcgggcgaggttgaactaatcaggagtgagtgaagaaatgtagatatgtggccaaattgtgtaaaacttggtcgacagaatcaaaatataaatacattttgtttgatgttttattttgaccaaaataatttgatttggctgtttaattaatactaagttccttaagctataggtgggggatccaaatgtagaccatatttgttgggaaagaccagaggacatggatactcctaggattgtttatgctataggtatgagagttgcgtcgggcgagggtgaactaatcatggagtgagtgaagaaacgtagatatggggccaaattgtgtaacacttggtcgacagattgtcctgtactgactttttggcccccacaagtcacccggtgaaatattaggtttgaccagattaagatttcacctgccttcacactgcatttaagtgtgtgcttgacactctctgatataggtttggctaagttcatggatccaaatccatgatttggaagttaatgaaagttgtttaatcaactaaagccatctactcagagagtgtttatttattttttattcaaattaattttgttttatgactttagattgatttaatatatcatattaaaaataaattaaaaaaaataatggtagctggggagggggccatttccttttcaattttcattgccatcatcggttctgcaatgatgcacgacagtactctgttgtcctaaaaggtccaggacttgtatgggtcaagaaattgggcccatcatgtttatgtttcgtggggaataagaatttagcctacgctttaagactgtataatgcgcttcacttcccttgacgggacgattgatctaccatgattgttttgttaatttcaaggactaattaagcccatagtgataattaatcagaatcaaaacataaatacattttgtttgatgttttattttgaccataataatttgatttggctgtttaattaatactaagttttttacgctacaggtgggggatccaa

SEQ ID NO: 7168 - DNA, 1646 bp, Populus trichocarpa
  Intron number 2 from transcript POPTR_0001s13670.2 (locus POPTR_0001s13670) derived from phytozome v7.0 (chr-ID scaf fold_1; pos 10765787 to 10767432)
ggctcctccctcttctcctcgaaaggagattcctggtaattactcgagaattccctgttttgttctgtttagtctgttatgattcgtatgctcttttttttttgtctgtttatgcattaatttcatgaaatctttttaagggtatccttgctggtatttttttggatctctctttttctttgtctctgtttgttttctatgtaaggctgtgattggtgaagagaaagggtgcctagaatattcacctgtaaaactcatgaagctctgctttgctattttggacttgaatatgtgttggttggtggaggttgggaggtttttggcgatcatgaagattgataaattgaacatggatgtgccatattctgcagatttttatttataatgtttatgctgattgaattattaaaacccaaagagagactttttttttttaaaaaaaaagaaattcctttacacccttgcctttattttgatcaataaggtcgaactatccataattcttttgagttctgttttgggatttttgaaacgataaaagatgttttcgtggatccagccaattcccctctttctttccgtttttttaactttagtctcacacgcggctgaagcttagattgacaggatttcttgaactgattctccaaagcacattatcattttgtatcatgtgacattgcatcccatttatctgtcaattctggtaaacctgctttcttgatgcctgccttgcaatcttccatttaatatgttgctgctatttggaactcaacgttggaatgctggctagatactaaagaatatatactatacaaggagtgaggtttaagttaatttagggcgattgttattttgggactacggttatggaggcaaagagtgaattttctttaatatcataaatatgtcttctgctagttgtttgaatctcatcttggaaatataatttggatctttcaaatgcaaagagactgtgatatcccatttctgatcttttcactgcttatatatatatatatatatatatatatatttttttttttttttttttttttctgttgtttgaataccaaatttcaagttgctgaagaatttgcagtcctatttgtctagtcctgcaaccacaagacaatgttttatttgtagttgggtgtagttaaggcgtgaaaatctgtactgattagccttcaaggcacctccaaatctgtaattggtagagtttgttaggcgatggctattttgtcttgtaaatggaaaaaactgaagcttgtgttcctcttctaacaaggcaagtaaaattgagatgtgtttgtatggtgttacactttgttcacactttcatactgtatgaggatatatttagtgcaaaataaatccaggaaaattcagaattgctaggaacaattaaaaacatatttgacaagtatttcagtggcatcagtcatcctgccttctctgcaataacacagaactataggaagctgtattaacttgtgggaagatgatacgtatggcatgttctctatcgatccatttctctctacttctgtttccgttcgtgttattatactttcctttggtgaacgcatatatatatatgttgatttgttaattcttttttcctcgtttcttgtgaccgcagc

SEQ ID NO: 7169 - DNA, 1927 bp, Populus trichocarpa
  Intron number 1 from transcript POPTR_0001s45920.1 (locus POPTR_0001s45920) derived from phytozome v7.0 (chr-ID scaf fold_1; pos 46425056 to 46426982)
tttctcttactcgtaaggtaatctcttctccctatcacttaaaattgagtgatattccggtagttcaagcttttttaaattattttttatatcgatgtttttttatggatttaatatcttgatgtcaaaaataccaagaacacactaaattatcataatgtttaatattccgggcggtgagagattgtgtttttatccatagattttgcattttgtttttaccaaaggacctcattgatttgatgccataagagagtgatgaaaaagcgtaagcacgcatccaattatcagcctccgacaggctagtaaccacccaaattctaaagtctaagtttgtgggccgtcggtgaaaagccgagttggtggccgtaagtctggatgcatgtgatggcctgtctcgtagggtttttgtttttttaattattattaccattcacaagtcaaatgttgttgaataaattttaggtgtatatgaattaatacacgatgcaagtatttttataagaatatatttacgttttccagattcttattaaaattatctaaaaatattctaaaaaaactttgaaattgatttttttttcaactcaagcacacccttaaagaattattaatcatagcgaagctcaaaacttcaaatttaatttaatttaattgcatgggaaattgttatgacatgcatttttccggtgtggtaccatcttacaccaccctttgaaaaattatggtgaaatcaggccataaaatttcttgatttgtcttcatgaccactcggtgatcaggttgcatgatcgttttggtaagttaaatatggttttcaaattaaataatatcagaaaattaaactaagatgaggtcggggaatttgtgttctagatttattctgataatttttctatagtacgtaccttaagtttgtggctggaaataaaacaggtgacataggtgaagaaggataaatatgagtaatttttgttttgacaacaaaaaaaaaaaaaaaaatgaatggaattaatatatagtcctggaagttgaaaatatagttgaggaccatagaatataacaaaataaattataattttgaaatcatcttacctgctgaatagagtatggtttggagtaagatcatcatgtgctacaagataagatgtctatctgtctcttgagaacaagctaatcaaacattagaaaagtaggattggaattaatgacctttctatagtgttcgtgagtatggtagtttttgttttttttgtgttttaatatacttgaaaaaatattaaattaatattttgtagtgatttttgatgattttgatatgctaatattaaaaattcaaatgataaataaattattttaatatattcttaaacgaaaaatacttttaaaatcatcatgcactgtaattcttaacacacacttaatcatttggttttatatagagccaattcatttgtagctaaattattaacctcccttttgttttctcaaattattttaaatgattcatgataatcaatcctgttatattcattccaaatgaatttttcaaataatatcaacaattgatgattgattccaagtgggtatcaagcgtttaattaatataccagcaaatagttgagacattattcaagaaattaattaggattgaaaatgaaagaataaaatagtgcacagtgtattgaactggttgcctttcatcataaagtaatgattaacaaacaacacatcattgatcccaacagtacttgtagaatatttgaagattaaaaattgattgcaattaatcttagcaaagcattgtttaaatatgtgttcttgagttttagaaaattagagatttttaagttcatccttgcattgtaaacattgattttggttctatgcagctcggagcagaatttgtgggaaccttcatcctgat

SEQ ID NO: 7170 - DNA, 1292 bp, Populus trichocarpa
  Intron number 12 from transcript POPTR_0016s12570.1 (locus POPTR_0016s12570) derived from phytozome v7.0 (chr-ID sca ffold_16; pos 11987638 to 11988929 reverse strand)
tgaggtgacattttgcacttccatacatgtaatattttgatctggaacagatatttggtagtttgatgaaaactatgaatactcctaaaaaatcatcgcagtctttactttgtccttgttttaatcaatgggtaagtcccaaacagactatttggtgcaacatgtttgcatagcatttgttgtcttccacttgatagacttttattgcacataatttgattttatcactacttgttctgctaatatgctgtcttctatgtttcagtttgattgtagttgatatttggattttgatatattatcttgggcaaaggtaacgggaaaaaatattctggggattaattattggattactatgacttcaggaaggcatatttactctttttagtggaataaaactggttacttggaatattgatgattgaggacgcagaataggatgccatgatatatgttgtagcaatgtttatgcgatggatgtcgttccgtggcatgagcgcgttcatagccatatccctaaacctaagccttacccgctccaagctaccaaaggaagttagtggataatagtgtgggcctcttgtttccttcaaaattcaggcctttcttcactggtcaaggcaaaatttgatctcatttctctggaattactcaagaaagtcattgtcgacggttttccatgttttgtttctcaagagggagaaattttaatataagctttcttcgaatttgcatttgggaatttgagaaatgtaaattgtatggagccattagaggactgtaggaagaagcctacatacttattagttattgagtttcatttgtacgcgatagattaacaagagtgcttattatagctaaccaactttcatatgtcaggaaagtcactttctgactgttctcaattttttgtttatcaagagggagaaatttttaaagaagctgtcttagaatttgcttttggaatttgataaatataatatatgatgagtaggagccgttacaggtgtgagaagaagcctacaggaatattagttattgtgtttcacatatacaagataaattaacaagagtgctcgtgatagttgacttaacttttttttaactgtttatccggcactcgtttgtttagtctgacaagtagtttctctcttctcaaatgaagcagtattttatggactgcagttttactatttgtcaatgaagtataacttgtcttcagaagccaatgtgcttaaaaaaaacctatgttttgtgatttaacttaaaacttacatgtgctcattgcagat

SEQ ID NO: 7171 - DNA, 2543 bp, Populus trichocarpa
  Intron number 4 from transcript POPTR_0013s04450.1 (locus POPTR_0013s04450) derived from phytozome v7.0 (chr-ID scaf fold_13; pos 3044506 to 3047048)
ttaatagcaccaattttgtgacaaggtatgtgccttttgtcttagagagagtgagagaaagtggtttcagggataatttgtattttaaccatagtttattgaacctatgaaaatgataatcatgtttcacattgtaaatactttacagtcctaacctgatttagttgtcattataccggcatttctcttcgatacctgatgattcctactgtgttggatatttttctctcgtgatctccttctgcaacttttatcagactttgcaacaataattttaagacttaaaagacagctgatttgtcatggaagtttggacaaatagattgatggggacagaagttttcattttgagtggtgtttgagagtttatggtagaaacatggagaaagacttttctgtctctatcatacttccctatctttaggatcagagaccggtatagaaaacaagttccctacttcaccaaccattctcttttctagtttgatagtagccctagaatgaaattccttgattttggcatattatggccaagctctcatgtccctcttgtccccatgatttaccaagtcactatgcaagaactggttattgttttaccagtaggaattctgtagtacattgtctattgctcctcccttcaaaatcctccatcccccttccattgtattgatgaaccaatttaacatgttatatgccggtcaacaaggattgccatacagtttttagactgccaattggactgatagctaataatttgttattaggattttagtatgtgaatttctgtagcttttttagtcacttaaaattcatcttgcagttctctctctctctctctctctcacacacacacacacacacgcacgcacgcacacaagtgcatttgtctttgacttttagaaactggtcattttaaggtagattgatctttataaaacgaatatcatttttaaattgcagttacagttgaagtcatgaccctgaatttttcaagtctttcagtaatttatcttggtaaacagttgaaatatttgatcaaaaggggccttttttttaatatttggttaatgtaatttcttaaagtttaatattaacctcaactcatgatgtcttttattacattagtggttcaggataggtgccatgttttttgctgtttgtggcatatgatggattttgccaagtagggtggatttgttcttgatgcattttgtggatttaaggagggggaaggattataatattttgaggagaggtgctatcttttatggtgtttagggatggagtagagttctgggagatgtgaaacatgccttttgttattgtggcaaacaacggattttgccaagtagggtggacttcttcttggtgtattttgtggattttgggaggaggggttataagattttgaggacagtcgctggttttatggcgtttggaatagagtgcgagaattcaaggtttgtttctctccaggcaaatgtcctggaatgtgatgatctttttggattctttgtggtatacccttgagggggctctttagagtgttctttcacagatatccaaattgtttcatagaactttcaaaaagcaattccttttcctttctttgtttaggcgtggtgctggacatgtccaggggagatttgtagttggttgtgcttagggttagggcttagattatggtgtttatgggcattagaaacagaaaaacagatctggaaacttagagaaaaacagtagcctcacactagtagattcaaagactcactctttgaataagaatcataacctcacacctagggtttaaggaatcactcaatgaaagcatcacactcaatttaataagtaaaaaagcttcttttttcgtaataaattcatcctactccaattgaaagactacaagcatatatgtgtatatgcatttaggtttaaattattagtaatcccaacggggcttggattccgatgtaggaaaatataaggattcctatataagaaacataaaaagtcttcacttatttaaggactaaatatagcatctgaatcagaaaataaaataaatagtctctgctgttgacattccagcaattctgtaaaattacagaacttcccctgaccaactaaacatggtgcagcctctgctggaactgaaaacagcatggaaaacctaaatcaactccctacaacgaataatctttgcctttatcccaccaaattaaggcttcgtttgaatatttccttttgtcccttgcttaaatattcaccaaaagtcaaatttaaacccttaggccacaacaaggccttcacggatatgaaattagcacagaccctttaccttgacagaagggttatttcatgctgcgttgtagctaaaagtcaaatttaaacccttaggccacaacaaggccttcacggatatgaaattagcacagaccctttaactagggtgcatagtgtttcattttaggagttgctgcctcccaaaacaatgtttgcattatcgtgtcacttaacttcttcataatctatgtgcaggg

SEQ ID NO: 7172 - DNA, 900 bp, Populus trichocarpa
  Intron number 11 from transcript POPTR_0013s07630.1 (locus POPTR_0013s07630) derived from phytozome v7.0 (chr-ID sca ffold_13; pos 6465842 to 6466741)
aggtaagagaagcagaaagtttaactccttccatttgattattaattttgttttgaggatatatggaatacagaatttaaggaaatgatggagtattattccttcattgccttcctggatgctggtctactccctatcttccataaaaaaatgtgcaatacaaacttactaaaatgctgcagtagaaagctttttagaagggttacagtagctataccaaagtgttgtcatgttcctgggtactgtttaagtgctactcttgtaaccatagcagttaagaggaaaataactcttgttttatttctttttcagattttttactttttaattaagtctttgaattattttttcctggtgaattggatttttttatagtagtcctttatttctgagactttattattccttaactttctcatcttcaagaaatcttttagtagatgtgaatttgatgattattctttgaaatttttattcaagcatgttgatatttggtagaaatgtggtgatttatttacttaaatcattgctgactggtgttatttaccttaggattaaattgatcccttttgtttgcccttgtgctatcacttcctcccttttctctatttctatgcatgtgcgttggaaattttgaactgaaccagtatacttcattctactgctcgagttgcattttatttaaaaaaatatctagattctatcccgtggcttcttagtttagacgtatgtgtcatgaagtttatcacaagagattctgttacttgtagagtttatcaaaatgattgtgatttgaattatgccaataatcttttacttctttttttaactagttttgtcttggatggctttgaatttgtcccaggacctactggaggctctgaaccaactagaagaggg

SEQ ID NO: 7173 - DNA, 409 bp, Populus trichocarpa
  Intron number 2 from transcript POPTR_0004s06370.1 (locus POPTR_0004s06370) derived from phytozome v7.0 (chr-ID scaf fold_4; pos 5078766 to 5079174)
gcattagtggaaattctcatttatcaggtacaacttccaaaatgcatgcaaatgtttggatgctaagtttcatcaaaatgcatgcaaaggtcgacaatcttggcatgtatgctcatttcctcctatctagttaaagaaataaaataacaaggtaacctaccactgctcatcacatatagattcaaatctctagaatcaataaacctcaacttctcattggctttgtaaaattaagaaaaatatagctctcagaatcttgaaaagtagttcttatatattggttgcataatcaagtatttatttcttccttcaatttactgctgacctcctagctagtgagtaatcgatctgttaatctatgttatgttatgcagcacgaatacgaacgtgctttgaattgcgactgcct

SEQ ID NO: 7174 - DNA, 967 bp, Populus trichocarpa
  Intron number 3 from transcript POPTR_0019s10600.1 (locus POPTR_0019s10600) derived from phytozome v7.0 (chr-ID scaf fold_19; pos 12147455 to 12148421)
tgtttgctgaagaggtatagcatcaaagcttacttgcttaatctagtaagctcatttaaatgctgattcaattaataaaatcatgataatttgctaccatgccatgtgcttccagagcatagtaaaacaaattacaattctgttatgctactattggattttgaaggggatgggttaaaatcatggttcaattcttataataactgaaggtaaaaaaaagtatctgaatgggttcagataactgtatctgtcttcagctagaaaaaaaaaagtgctttcttgatatagaatggagaaatccaatagaaatttggcttcattcttgaggtctacatgacctccttaagtcacaactgtaaggataccttctttacagaattgttgactcttcaagtttgtgacccctattatggaagagaaagttcgaagaactttcataaattatgctttgtatgttgttttgtgcagttagatgccatgcctttgacatttgcaagcttcctctattctgtgatgaccaagatccttacatctgatgcttaaactgccgtatgatgttatgctatctacctacttctatttatccaattgtcctatctcttatgtcaaaaccctatctcagataggaagcttcctgatctgctccttgaaactattcctaaaaccttacagttgtggactaaataaaggatgagatgagattgaaaactctgaatcaattcctcatagagctaagagcttctataaaagaccaggaattgtagttgtggtccagctggaatgcagtttggaaagggaaaattttgacaaaacctttgcccatctagctatccctagactcttactgttgcaccaagcaatgaccttttttaacaggattctgtcgaacagtttttattgctttcaattctgagttggatgttctaactagagaatcttattgcagcttggatctgcagaacgtttt

SEQ ID NO: 7175 - DNA, 500 bp, Populus trichocarpa
  Intron number 12 from transcript POPTR_0492s00210.1 (locus POPTR_0492s00210) derived from phytozome v7.0 (chr-ID sca ffold_492; pos 6557 to 7056 reverse strand)
ctcattcaaggccaaaggttagcaattatctgctttgttcgtagcttttgtagattcattaattcttttgctctctccgaagagtcatatgggtctatgtctagttgcctcaaagatattataacttgtatcatccatcacctttactttcaaaggcttcttctaatttatggtcacttgttctttgccatttactctctcgttttgttaagtgaacactttatgtgaaatggtctaactgctaaatgcattgatacaatagaaagaaaaagaagctagaaacttatttggttctttagctgttgtacttcttcagcagccaatattctttggattcttccttctggtagaacatgaaacattttattgattgattatgattttacaatctatctccaacgagctcgggatcgaggccttgttattctcaaaggttactcaatattgaaatttctgctctatttcaatgtgcagaactggttggagttgcttctaggaaa

SEQ ID NO: 7176 - DNA, 803 bp, Populus trichocarpa
  Intron number 1 from transcript POPTR_0004s08270.1 (locus POPTR_0004s08270) derived from phytozome v7.0 (chr-ID scaf fold_4; pos 6810552 to 6811354)
tggcagcagccttgctgccattgcagcagctgcaagtgcagcagttaagagctgggagttgagagagtgaagtgatcctcctcctctatatatgttgtaatcctttctctatatatctcaataatatagactctcccgtggatgtaggcggttttgccgaaccacgttaaatattgtgtccccgtgtgctttaccctccgtttgagcacttatccgtacatccccgatcggaatccccaacatatatatatatatatatatatatatatatatatatatatatatatatatatatatatatatcttaacaattacagctaccaaaatttatgtttttcttacttttctacaaagatgcttttatcacaagcctattatccttagctatggagaaacttccatgtagcaaaattttatgtagcctattttgaattcgtagctgccttcggccttaattcatgatttgatattaacatgacttgattctttctaattgattacttgcatctaaaatcatcaaattgggtttgtagaatttttggactacgtagaaaatcccgaatttcataaggacttgaagtctataaatacctccacatcccctttggagactccaagtttcaacacttaactagatttcagtactagcttgtcgacctcccaaactcttagaaagtttaagctaaattacttctctaataactcttcgatttctaggtctcctaattttcttattatattttcagcatttctttctcaatattgctcatatggaaactccaagatcactcaacctccaactt

SEQ ID NO: 7177 - DNA, 747 bp, Populus trichocarpa
  Intron number 1 from transcript POPTR_0019s13030.1 (locus POPTR_0019s13030) derived from phytozome v7.0 (chr-ID scaf fold_19; pos 14034075 to 14034821)
gagcttagggaattctgagtaagctcttgacatatatcccatgagaaaattttcgttcatttgttgaggatttgaaatttaatttaaaattattgagaatgatgagctctgtgaatccatatttattttatttgattttgaaaactttattttgtaaaaactttatttttttattttaaattaatttttagtgtttttaaattattttaatatgtttatattaaaaataattttggaaaaaaaatattatttgtagtgaaacgctggtataaatattaaggcttgtattgatatatattaagtggttgtttgtttttatgtttcaaaatgttttttttaattattctttttattttaaatatttttttagttttttaagattattttgatgtatttatataaaaaataatatatttttgaaaaatattttttgatccttacggtaaattttacaaggacagacaatgttttcttttgtcgttaaataatattctatttatttgaggtgaaaaggatgatatgagaaaacatcttatgcatttgcagttaattgattacatgtagtttccagttttcaacgtacgcttgattaatatagaatgtcatgtatttttacattagcactatccttgccaataatgatgctcaattactcatacgtgcctgctactaaaaagtgagtatgtttctatgtgttcttcttatttgccaggctggagtttgaatttattaagaatatcgttggag

SEQ ID NO: 7178 - DNA, 1213 bp, Populus trichocarpa
  Intron number 1 from transcript POPTR_0006s19870.1 (locus POPTR_0006s19870) derived from phytozome v7.0 (chr-ID scaf fold_6; pos 18880245 to 18881457 reverse strand)
gttacatagtcattaagaaccgcccttgcaaggtctatctctgtttttattttttttttcttgttacggatttctatctggttttttgttgtttttaccagatctcttgcgtgttctttttaatttgattatcgttttttataaagttcaattttaaagaagttatttctagcaaatttaatgtttggatgtattgagaattaattaaatctgtgtgggtatgttacaaaaaagttgactttgattttggtgttgatggtgtacccgagatttgttgttttctagttggggttttatgtatctgaaagctttcaatttttcaagcatgtctgtttggctttgttatgtgtgtttgtgcattttaatggtagatttaaaggttgatgtctttatgtgctatttgtgtcaagatttcagattgggaactatcgtatttaaagcttagaaatctttgcgtgtcaagatttcagacagtgggaattatcgtctcaaaagtttagaaagttttgagctttcacagggtgcacgtgtgtgatgccctcaagtctccctcgcttttgtgactttagtacctgagactcctcgcaatgtaacaaccaaaagaaaatacacgagttgtcccaaagatggctggaagtaattttgctccatcttgccatgccttctaatgaatttgatagggtgcagccatttgagtgtcttttttgtgtttatatacaacagattagctggaatcatagagactttttcataaaagtaatgatactagtatctaaaaaattatggatgcaagtaatccaattccctcacggaaaaaatagtatagaagcttttgtacctcaacatcgactgaaactttgaggcatgcaagtatagtactcttcttagtcttgattttcatagaatattttacttactaaaaccccatcataactgaaaccatcacaccttagctagaatagaacaacccaaaaacggtaggtttatggtgggctcagtttataatatggcttttgtatcatattatgagaaactttcttgaaagaggtgatattgtattggaagtttttgtatttggtatattgtgattccttaatggtgtcaatgtttcaatcttcacagttcatgtttccttttcatctcttaacatttacattttgctttctaaaaaaaaacaggttgttgaggtttccacctcaaagacaggcaagca

SEQ ID NO: 7179 - DNA, 602 bp, Populus trichocarpa
  Intron number 5 from transcript POPTR_0011s05790.1 (locus POPTR_0011s05790) derived from phytozome v7.0 (chr-ID scaf fold_11; pos 5815826 to 5816427 reverse strand)
agagacaaggacactggattatcaattttcaacaggtatgatcgattgatggtcacgatcttgtttggtcacaaaattctttgttgggccacgttagttttgtctcatcaataaaataaatgctgtggccgctgatggattaaacattcaatgaacacgtacattctcgatggttcaagctcaaacctttttagctacaagcaaacagcattcatagctatgagagaattgaatattatcaacgttctcatctaagacttgagggacacacaatatattgcgcaacaagtgtaagaacttcattggaaaatatcgtatctgagaatgtgtttgtagttcaatatcatttaaattttcatgatcaaagaataaaatttaaattttgtgattacataagttgcaaaaattcaatggatttgatcataatttcacaagaaaagaacacctacctatgaaatcaaagcaacagaaactcatcattccttaaagtatataaaaagaagtaacataatgtgctactgggttataaagatttgtacttattttgctgttactaatcacatacagatcccaggaggttccagctcagtcatcaaacatca

SEQ ID NO: 7180 - DNA, 4898 bp, Populus trichocarpa
  Intron number 2 from transcript POPTR_0004s06300.1 (locus POPTR_0004s06300) derived from phytozome v7.0 (chr-ID scaf fold_4; pos 5000233 to 5005130 reverse strand)
agtactctaacgataggtaaataaatctaattttagatatttgcttctctggatcttaaattctccatgttacaagccctctatcttcatgtggtcactttttttttttatcttcctttctgccccaaagagatttttttatcctctctattttgcttatgttagtgttaatttttagctttaattggtttctttcattttcattttctttctttcatgaatgatcattaaatggttttcaatttctaaggtgggaaatttattattattattattattttgtgtttaatctctgggtaaaggatttaaagcaaaagagacacaatcattccttatgctgcagtttagattgagtttcttatctaactgagattcacttgtctttctttctttctttctcttctcttaccctttagacgatgctgatgcacacgttattttgagttcttggtttggtaaaaacatagatctggtataataaacagacatagaagcactatatgagtgtagtatggtagcagaaataagtataggtctgtgagatcagcctctttatctcctcccttgttgttaattttgttgtttccgtttttctttctcttccattattcctcttgcactctctatctctcgcttttttttttgcacatacttgtttgtttgtgtcatctacgaggctaaagagattgcctatagccaaagctgtcatcttctcattagtccaaaccctccatctcttttcacttcctagttaaatagcacgtcaattagacatcaagaaagcaaaagtaccatgtcaaataaccgtgaaaaagaagaagaacaaagaaaggtttttttaatttgtcatgtcactcaaacatatattattagggtttcaaatcccaaatccccagatgggtttttcatcttattttatttttccaaaccaatccagggtttttcccctaatcacacgaaatttcccaaaatctcagtttgaacccacgaggggatagtgaaaacctttctgttagtcaatgcataaccccagttagggttcatagttagggttcatattcaagtaaccacatgaaatcatcgaaatcgtacattaacattcaaggaaaactgttaaatcaagcaagtggacccttccacaaccaatcaaaactcagttagatttcacctagatttttaccccttttttaacctgggtaagtatggtacagtaatcggttagggtttagtagccagtcaaatagatcagattgttgttcgggtttatgaacagaatctttggtaacgtcacacacgatttttcagttcttgcctactgacaaaaggctttatgtcatgattccttaaactgaacccaagatttttaacttccgatccccctggaaaaaatatgaaattccaaaaattgtccatttcttctccttagatctctctctatctctctcccggttaaattgtttccatggtgaaagcagagagatggatcaatgagaatgggttaaccaaggccataatgatggcactgtttaagatcttgtatagatatatttatataagttttttttttttttaatttaaagagagatttagccccatttgtatttttacggtgagaaaacacttttataaaaaattgatatttttttaaaaattattttttatattttttagattatttttatgtgttaatattaaaaataaattttttaaaatataaaaaatattatattaatatattttaaataaaaaattaaccgttgatgacaatattgagagaaagagagtcgtgaagagagaatgaacgacaactgttaaccagtggaagagttctgtcaattttggtttcttctatgtaatagaaagcctacaactctagctggtattgtacggctctgcttctctcagagtttcagtctgagactaataaaatgtccgattagtacaatattttattacaatgaaatagaatatcgaggtgggtaatagagtgagtttaaggagattatccactatgtaatgggttattgacacgtggagaatatttgaccgctgatctaccttggccaatcatattgtaggattcagtgacagcttggcagagacagccaatcaatgtctcgacgaagttaaggtataaggaaatctagaaaagcggttcttgtctgaattgacaagatgtgttcacattttactgagattattatggcaaaattttaggatttccttcgcattgtgtcgaggaaagactggataatcagactgactcggagagctgtggttttgtcattcatcttctttttagggttttctacgagttaacttaatggagttattcgttgatttgactgtttaattgccttaccgtcaagctttgttataataaggattttttaaattgttttttttatttataaatatattaaaataatattttttaatttttaagatggcatatcaaaaatattttaaaaaataaaaaaataatttgaaataaaacaaaaattaatttttttaaaacaatatttttaacgcaataacaaattcttaattttttactcatatatcttaaatttacgagagttttttccaaaaagataaagagatatatgtaagcgataaagtattagtaacctcacataaaataatgtacaataatagataaaaactaaattttatataaaaattgaatttcaatccactttcttttttcgtggatcataaggagttggacttgcttttttcacggtaatttgaccaaagaaagagttaatacaaataatattaattaagatattatctcttgttgtttgttcttgttttgaaataatttagttttttttttaagaaaaaaaagtttttccaatacataagcaatacaaaagtgtttgaacatggtaattcttcttcttcttagttgaccaaattacatttaatagactaaagttgttcatatatatgctaccattgatagagtcattggccaattatatgtttttacgtcattatatttgaattcttttgttaatagtaattattaatcactgaagttattgcattcttgtcagctgataaactccaagttgtaattttatgtttgatcttgtaattaagagcaagccaggaggacatctctagtgttcgaggaaattgacaaaatttgcttcctcaaatatatttttgtttttcattggacaaaaatacatgttatatatatatatatatatatatatatatatatataaaatgcctatattttgtgagtagttccataagtttaggatatgtttgaggtagtttaacataagcatttgattttttttttcaatccttatatcaaaattatcataaaaaaattaaaaaaaaattatttttttttattaaaaaaaacacttataaacacaatattacccaaatacagatttatgaagccgccatgtggtaaaaaaatacatgttagagataccagaagtttacaagcatgtttatatgcgttaatgtggcatatgaaatgtcatatcaattgcgttacaaagcttttcttgtgctaagtgtggcgttagtaataagcaagtgtttgtaagaattgtcaacacgtgtgtttacttacttgaaagaacattaattgctaattttattaaataattaatccttcctattactatcttgggataggttgaagagcataaggaaaagggttaccatgataaatacaaaaaataaaaaaggaggaaggagtagttttcaattttattttaattgtcaatactatgtgcttggtgaaaagttatctgtcctcatttttatttattgttttttacaaaaagcatagaataatgtgtgtttcatgtgtttggttagaggttatagatgaaaagctttaataataaatagtagctaaatatacttcattgtttgagtggtagaggagatttttaaaatttatgaagactacaattctctttcatttcaaataacatccctattttagtggtgagattaatgtatttgtttctctttttctattttcttttatcaatattatatataaaactaaaatgcatcagtgttttactatggattgatcacaatgcaattcactataaaataattgatgcttcccttaaaaaaccaaataattaaacaaacactcagggttaattttgtattttcatatctttattgcatagtgtaattatttctatgtccttgaaaaaagaaaaaaaacactggggtttttttaaaaaaatttcatatttttttgtatagtgtaattatcccacctttgaggccaacttttttttacctaaggtaaaggggtatttttggtttttttatgtttgtttttttgcaattattatatggggtcaagagtgttatgatctttttatataaaaaaaaaatagttgacacgtgctctacaattccccctcccttttcattcctaaccttgaaagtctgagtgaaacatatagttataataaagaaatattatctctagttttgcaaattaatttcataacatcaattaaatattctgataaggtaaagttatttaggatggagaaatttacataatgaagcctccttctgcctgagtagtgcatttctatggtatttatgagcatcaattctacaatccattgaagcaaaagaactaaccttcttgaaaccctcttgcagataattgtgagtgaatgtaagtccactacgaaatattcacacgattacgcacttagttatcattaaactttgtttttggtgctttgcattttcttaattagattcttccacagctttccaatgcacattttgatgactttttttattttatttttcttgatggaaatgttgacatgattgcagtgtcaaatcaacaattgagaggtacaaaaaggcat

SEQ ID NO: 7181 - DNA, 1367 bp, Populus trichocarpa
  Intron number 1 from transcript POPTR_0010s16940.1 (locus POPTR_0010s16940) derived from phytozome v7.0 (chr-ID scaf fold_10; pos 15717273 to 15718639 reverse strand)
tgggtctgaggtaatattttttttttcatttttttcagtataatttgatttatgggtttttcttcttcagtgatttggttaactgggttgtaattcatttcatgatttagtttataagtagttttgattttgataagttgttcggattatgacttccgtaatttgtttttccatttgctttattgtgtttgtgtttgtatgtttatctgaattttgggtttaattatttattttgagtttctagtgtttctggattgctttgatgggctagtttagaattttgtatgatggattctgttgctgttatttgctaatatgcaatgttagtttaggttgtattagtgagggatctggtgtattacttttggtcatttttactgtatacctaggccatctctattgatccttgaatcgaaatgaatcagaccctagaatttgcctaactgttatcctcttcctggggatttaagcatgtgagcaatttaatcagtcatggggcaaccattgcatattcattgatatagtacaatttcagttaaatattgttgttttgtagcttgttagaaatctttcctttatttttttccttatctaagcagtctcttaatttatttttattttccttttatatgatagtttggaattgggggaagatattaattttctagagattgtaagccgtaaaagttttattctgtcaaatactatttagaaattcatctgtagtttctactgcatcttagtaaatgtggtcacccattttcttatgttaaatatgttaatggtcatttgagacaaatattcctccgtttaggaaataactttcttgatggctgtagtatgcagactttttgaactcatcgcccttccttaactgcagtttttgatgcctaataactggcatagcttactgctttttgaaaagaaccttggttttctttcttattgctgatcagaacaagatttaacttgattaagcagtgtggttattgatctatgcctttctgtctagatatgttgatgtcacagtatttatattaatggtgcaatgacaatggatgtgaaatgcttgtatttgtgaatgagccaagcatgtaactgcatgttgcgtatatgaatcttttaatttttggattggttgtgacattactgttgaatttgtgaaaccttgtcattattcacgatgattgtcgaaggttgaccctttgtcaatgaaaaacatttgttttgctaccatgaaaaatttgtagagaaaacctgtgatctttctagttaaagttcttatatctgctgctaaactaaataatagttctgcttgatggttatgtatctcacattggctacatatctttgactgattgccagga

SEQ ID NO: 7182 - DNA, 1906 bp, Populus trichocarpa
  Intron number 1 from transcript POPTR_0016s13180.4 (locus POPTR_0016s13180) derived from phytozome v7.0 (chr-ID scaf fold_16; pos 12424653 to 12426558 reverse strand)
gttccgacaatctcttcttcttttacggtgagaattcatataccccatcaatactttgcttaactgtattaagcacttataattctatctgttcataatgcattttgtgctctagtatgatatatgctatttaaagttttctaatgaacatcatgtattttgataattttagactgaattttaatcaaagaagtgctttatgatcagctaacatttaaaaaagtggaggctttttagatctcgaagttcaaaagagagtaggacaggaacaactttgttggaacttctgggcagaaacttaaccctgagatctaggttttccttaaacagtttaattagcatggaaagatttggaaaatataggttaacatttatttaatgattggatgagttcagaagccagttaaaaagaaaaaaaagaagggaatttgggggctgtccagcgaacaatatatgtactgtagttaaagaagaacaagaaaagacaaattagagaaaagaggaaagaaacactctactcatgcataccttccaaattaaatcaaaattctcagaattttactatcaaaatccttatctgtttgactttgtttttaatgaagtggttttggaccaccatcctcaattagaaactgggaaaggattctgaatttgtgttgaaattgcaaaggcacagagaagatttatggaaagaagtatttctttgtcatgaaaggtttttacaataaaatctatcttcagaacctgtaaagatgtgatggaaattttccctcttgctttacaactaaaccattaattattagttttgattgtagatcaaattttgtagatatttatatattagactagtaagaaatgatgtctactttatcatcacaaggcatgctaaacataacaaagttttcaaggaaagcgtagagttcatataagtttaaacttataagcatgcaaaataataactcatggcaaacatgttttcaacataaatataatactgcatactaaacatatatctaaacttataattgatattaattcaaagtcttagcttgcatactaataataaaaatacatatgcttaaattaaaacaaagaagggtacttgttaaaataatgagatttttgttgttgtcaaagatgaattctttgtccttaaagctttattgcttatcacttgtgcaactaagatgtatgcgatatgtttttcaagattccaactacattaccttggtttagatgctcttctaaaccaaggtctttgaacaaaaaaatatgaaactcaaatatctctcaacaatatgaacataagctctagatttgagaggaaaaccagagcataaaatcagaataaaacgctaaaatatgaggtggggaagagtgtaaaaatctgaaaaattcttggtttaaactcttccttcatccccctttttatagtgaattctagaagctaaaaggttgaaaaattaataagaattaattcccaccattatcaactattgattagccatcataaatcaataattaaatctagaaaaaccaagagttctttgagtggtaaaatcaagggttttttgagatcaatttctcgttcacccataatttgtttatttaaaacaaatgtccacaaggttttcatgctagtaatataaatggtttagttgcaagttgaggcttttttcttaaagtgttaagtgctctttctgttttatttttggtaacatttttccacctcccagtctctttaacatccaatggtaccaaggaaaaaggtatatagaaaagacaatgtctttgtgatatatacagttgctatatgtggataatcaattctaggacataaatatatctgtattaatggagtcttgttgtttctcaatgtcaaaggctaaattgtcaaaaggctgcg

SEQ ID NO: 7183 - DNA, 5032 bp, Populus trichocarpa
  Intron number 5 from transcript POPTR_0003s15280.1 (locus POPTR_0003s15280) derived from phytozome v7.0 (chr-ID scaf fold_3; pos 15121595 to 15126626)
aaaatacggttgtggaagtgcttttaaaacggctagtaagtgtttctccattctcttcctttgctgtttgttgtacaaaactacttacattttataaacaaccataaatcaacaattttttttagggggttctgatagaaaaatagatcagagaaagtaaaatgtcaccagaaatagcaaaggtttcaacccaagtaatgataggatgtagtgaaagcaatacaagagtcaaattcatttacattattccacctggctagaaagtataagcttacaaatatgatggaatactggtcattcttctgccttttgataactcaagtatatatgtaaaggctcattgtatagttgatttctgaagttaacatccttatcaactaagcttttaacagttcgttttgactatggtcaagtagttttttctttatgatacatcgatcagattgattgaagagagaagaaaaggagtagtaccatcaagaagatggcgcataaaaaacccaaaccagcttactagacgacacccttgctttaaactaccaaagccaagttacgtaatcaaaagaacattaaacaccttgcttagttaaaatatctactgctgtatttgctaccctttttgagtggctaaaagtagcaagttgcaatctcttagagatggagttggttaagaagtaattagtcaaatggcatggttgttcattttagtgggatatgtaattctaggcgaaccactattgttgttattcatatttccgcaacatcttagaccatcatgaaaaccccagaaaagttttcctacatatagctttgaataatcaaactcagaaacattccatacctgaccgtcttatcatgtccttttgtagattttatctatagtaaattatgatttagtttttcagatttttctgattttgtatgcaagtttttctagttttgaaaattataagctagtcttttaacaaaacttaacaattattttttttaaatgttcaaattgcattttaaaatgtattttttaattttgtttgttatttgattggaaatgaaagatatttccttgaaaaaaaattaaatagaaaaaatcaagtaacaaataaatataaagatattaaaattcaaggtttgcgtagagggtgtgatcaccatcaattgatgaggttcacataaaactttacaaagatcatggtctttgtaaagttgccttctaaggttgtgatggaatgaaaggcgtagaagattggatttgagtaactaaaacacttgaataaccagtcctctcagggttctaatggatcatatgatgcttaaattagtactaatggtggagaagaaaaataaaacattaggaggttgtgttatgtttgtttccaaaataaagcttaaaaaggaggaaaatgagtctccaatctctaggagaagcttgaaccaacgtggatgtgtccaagttaagatgatcaatgtgtttgtccgctacagttttgtacatcttggagacagactttaagtgacaacaagtcactacaaaagttgttttaattctgggttttgtgagttatggattgttgatgacaataacaggaccaacccctaaaggacacattatcaagaggtgtgctttcatttaaatcgtgtactttttgcctccgtggttgatggagagtagaccaggtttgacaagggagtagaacatttggggtagcgagtggatttgagcgcatttgagggtagcagttggattcaggtgcatctaggtctaatagctagattcgagtgtataagccatgtttggggttcagtcttcatggattcagggggtatgagccttgttcggggtattgtcttatagattcaagaggaatattcttgttcgagagtattgtcctcatggactggtagtgaggcttttatctgatattattgtcttattggtcctgtaaacactcaaagtccaatctagtgcgttttgtgggaaaccaaaatttcatccctcagacaagaatccatcaaataaatgtcatctcatgagaattgttcgaaaacagtttaggatctatgtcttcctactcaatataaaaggaagtagaagtttggttgggagtctaatcaacaaattaatttggaaagagtatgctaaccaatatttgttggtttcaccttcttctattcagttcattgtagaggaaatgataggaagtgtacttcctctaaagattaacgagggccaagtgcgagtagtagtttattatcaaagccaggccttgattacactaattgagaagttttatttagccttataattctctttcaccaagatattacttgcttcttatagtagtctatcctcttttacactacataacacaacttaatcaagcatgtaatagcacatgcagccacctgcataaagggaaaggttggcttgtggaaaccaattcacttttatgaggcaacggttctctacttctatggttgctcgtgtaatttccctgcgctatataactgcatctgatcacttagacttcaattgaaatagcatttcaaagctatctccactgactgacactgatcagaacatttcaaagagaaaatccaaattttggccctctttaagactggtggggaaggacgcattgttggtaacaacatgcttctcagtctaggacagccctgtattctaagacatgtcagtcgtcaaaggctctcctagattccatcaatccctttgattagcaattctggcaaggcaaaaatcctccctttccattgaagggaaacttgttgaagttgccatttgcatgaaaagaccgaaatagctacttgataacttgatgaagaagtacattcatgtcctcgaagtgttttgtcaacaacattttccctcctagaaaagaagggggcaatatgaattaatgagacatcaaactagcagtgaaacaaagaataacggaagagagtaacataaaatcattcattagactttatctaatagcttaagttttcaagtcgagatggtttttcacatagttatcaaggtgtaaataaccaaggatcatgtgtaaatttcaagatcaaaaggatttcacttacaaaccccaaaagatgggggtgttagtgaacatgtctcacactaaaaaaatataagagcatacccaccttgaataaatataagaatataaagtaatataaaagattgagaatgggttatccaccatgaggttttaagtcttttggatggaacctaaattcaattattaaattctatatacttgaggggggaataagagagtaatataaaataattactagcacttgctattagtttttgggttgagatagttttttgataaggatgattggatactagtaggcatatgttttgaatcatatttttaactttgagagctaccctgtagaggtcaaagcgtttcatttttcaattcttatttgactttggcatgttagttcaacaatgaggtgagcacccacgagattcggtttcaacactctctttggataatagggggctcctgctttcctcctggacagtgactatgtagtttaagcttttgttgtatgtttttcaaaagtcgaagaccaggtgctgtttgattattgatgtaattatctttttaagatatatttacaagcaagttataggatattcatagggatggtaattaaactcaaacccgatggatacccacctaatgatacttattgtcatccctagatgtcccgattctgctaattaatatatggcctatatggtgattcatttttacaagattagccatgataaaatctcttccgaacaacaaattcatatactaaaatgttctctagtcaatttttttcatggtagtgaaatcctatgtcagagcagtatgggcaattatagttgtgtcataaattaatgaatagagaaatttagcctgacgacattgtgatcaagagtgtctctttagctccatttgtttgctggaaagtagtttccttttagaaagtgaattccgggaaagtattttccgatatttgatagtgtaatggaaaataagttggaaaacacttttcagtgtttggttatgtcatggaaaatgagctggaaaataacttattaatgttttatttttctcaagtttattaaaataatgaggaacaaatcttacaaattaaaaagttgaatgagaatgaaattgaaaaaaaatataatttcataaattatctcaataaataaataataatcaaaataatagagatcaaatctaaaaaattaaaaaaaaataaaaggtgaataaattaaaataataataattaatatttcataaattatttcaaataaaataagtaacaattaaaagaatgaggaccaaatttgatagataaaaaatttcaacaaaaaaatgataaggaaaaagcaaatagcaattataaaaataaggaccaaaattaatataaaaattaaattttaagagatggaattgaaaaataaatatacaaaacaaattatatatagcaatcaaaagtttgaggatcaaatttgatataatcagcaaataatgacatttctaaatttttcacaacttccggaaagtgttttccgcccaaattttccaggaaaacactttcctgaaaaccaagccaacttttcctttgactggaaagtgttttccgttgaccaacttttctaatggcaaacaaacacatgaaaatttggaaagtggtttcccggaaaccactttccggaaaacaaacacagccaaaagggaaaacatttttctggaaactaaaccaaatttttctttgaccggaaagtgtttttcgttgactggaaagtgttttccgttgaccaacttttctaatggcaaacaaacacaggaaagtttggaaactggtttcctgaaaagtgaatttcagaaaacaaacatggcctctggcctttgattgctttattggtttcttatagagtaactattcattattttgtttggcagaccggctccaactataaagatctccagcgtgaaaa

SEQ ID NO: 7184 - DNA, 3197 bp, Populus trichocarpa
  Intron number 4 from transcript POPTR_0018s11630.1 (locus POPTR_0018s11630) derived from phytozome v7.0 (chr-ID scaf fold_18; pos 12283882 to 12287078 reverse strand)
gtgaagggaaatcctcatcccaggttcggtttttatttcttgaattttccatgtatgtttgacaattttgacttaataaatcaataacatcttatcttatgacaatgctatgtaaaatccagtgtgatcttgcattgtaaagttttagtttgttatcttttttttttttttgtagtgcttatgttactaggtgctcagttggtttgatgatgtgtggttgaacccttataatatcaccatgtttttgttcgttgctagcagacattttcttggccaacaagtagccaatttcagatgacatatacgttgagttgcatttaaatttggtagatgtgaaattattttccaacctataaatactgaagcatggcatacaggatgtttctcgtaaactcatgtcctctagatcagtatttgtggtagtatattccttgtaacatgactggtgcacttacaatactgaacaaccaaacgaagatgctaaggtgtttcccacaattatttcaatagggctgtcaagaacgaatttgggacttgtgctatattcagcatctccgtccccttgatggcttgattgtatgattgatatgcagtgacagtgcagcgactgcctttggtgattcttttgcttcttcctctttttttcctttacttttcttattggggtaggaggaacgggcacaaggggggcctgaagttcactcttgaggattaagaagtagtgtttgaggtccctttttagattatctgcagagtaaagggcagtggagttgtattatgagccactttcagatgctaaatttcgaggtgaacctgcctgatttttttttcatgagctttgaaagtaaggggctgtttgacaagatagtttcaaggcttaaaaatgtgatttttgaaggtctcatgctttgtgtgaacaactgttcttctaagtgttcagattgtggatataaagtgaggcagattctcatgagcactgctgtgatggtgacttggttcatcatctttgatgctgtcctattgataagttataggagttctgacagcttgtgttccctttttgttggtggggggggatgtgttggttgctaagatctgtttttttatagctgccatggaagcttcagatgggttcaaatattatctaaagtaggtaaaggaataactgaacccttgatgttttaagggatggagttgacttattcatattcatgtacgtacttttgcaccctgtattgttccattttctgcagccatattgccgttttcatatcttcaagtgcattcatacttgggataaaagggggggggggggggggttggttggtatgtcttctgctctttatgcacaatagtgctactggacatggctcaagctaggcatgatctttgtcggttaatactgttttgacccactcattttctgtatgctattgtcataggttgtattgtcctagcttattctaaagtttgaaagtccaaacacatcttcaacccttgcttgaattacaaatttaatgcccttaaaacttgatggttgccctgattcctcgtctaatccaattggagagcactcttcatggtaaagctcattagaggcctcaaaacccatccaaaactcccagttagaaactgaaatatgtaactcaacttgaatcaagtaagcctcaattctaactggttgatggcacttctaattctgaaaaacgaaatgatacctggaaaccaagaaggaaaagggacacgcttgaaagttgctgaagatgctgaaagcattgtctcttgtaggattatgcccctttttatgatctcatggcatgcttccttatatgccaattaaagagcaagcctcaaatataactagttcatgactaacaccctgcaaggatttccagttccccgtcatttatgtattatgagcagtgaatacagcatcatttcattttaagatgtcaagaaggtggttttctggtgttcagataggtaaaatacagcgacctgttggctttaaggtttggactcctatgttcaagttacaagttggttccctggcagtaattcatagaggatctggaacatcatgagggatattgcttccttagtttgacctttttcataaggcttctcgtggctttaaatgggtaattatgatgtgaattttcatttctttaaatgaagagaaatattttttaattcatgcctagttgggactcaggcatagacgtttcctctcttattctcagcatttgttccttctacaaagggcaagatgatcttccttagttctccccttgtttttttcatttgatacattgtaatttttatatcgtggatgtatttcggcccactcaatcccttcttcacaagatcagcatctttagcctgctcaaataaaaactctataagaaccttaggttttcggtcaacacttgtggcctcagctatctttttatgtaaatgttagaggcacttccaatcgaacttttccaagaatccaagttcagaaacttagaaggtacttatttttaatataaaatagatggtttttcatagttggaagaataaaaaaaattatgtacctattctggtaactgatatcatttcagggctatagttttttcctgtgagaaaatataatcactaatcttgcatgttgacttgagttggtttatcaatcaataacaagtccaagacttcaatactcactgggattgtaattaactcttaaccctgcaactgcatatcctgcaatgcatggcatgtgagtgtcttgtaaagtaggcatacgccagatagaaactggtcctgtgctcatttcctccagattatgacttgtctgtgcctcttgatgtacttttgagttagcttcctgaatgccacctagctgcatgtgctttacaacatcgtttttgcatgcacatatccatcctgctgtatttaaaggattctttagaggaggtgttttagagactgatcaagaatttttctcgtgttagaatattcacagatgtgactctatggaatctcaacctcattgaactgagggagtaacttccaggataaaaaccagttcaaaagctttacattatgcgtttccttcattaatctgagttataacttccaaatataaactggttcatgcatcaaatcttacttgtgacctattgcttgaatgaattttacaggaactattatag

SEQ ID NO: 7185 - DNA, 1709 bp, Populus trichocarpa
  Intron number 18 from transcript POPTR_0014s14940.1 (locus POPTR_0014s14940) derived from phytozome v7.0 (chr-ID sca ffold_14; pos 11010191 to 11011899 reverse strand)
aaggtttgccaggtagtgctactctttacttttcataaatgctctctctagcagaaattaatgtgctttcgtttatattctgttgattttttcctcaaatcattttatttagcaagtttcaaatgctttttgtgtactcaaaataggcgactctaaacaaagaaaatacaatgttacactttttttttcaactacatttcagagaatgaatctttttattgtaggacataaaaaaagggtctggatcttctatgggaatgattttgttgtgacataaattattccctattccctttttctttaagaaggtgaaattacttgaatatgtagtttggccagtagtgggacaagaaatattgaatggcaatatgggtgggggtttctgaggacgacaccggccttgatgtgcttttgcatgttcatgttaatcattctaatgttcttgttcatcttctgctctctctctctctctacaagaaaacagaattatgaaaaatagaacctgattcaattggaaaaacattcagcagaagcaagaaaaataaaaaacgagtagaaagtaagatatggggattggggaatgttaaagtgagaaggaaaatttggaaccaatgatgaaaaaaatacgccccaaccttttatgctcttttttttttttttttaagcatgccctttcagtattcatcagggttgcaggcttaatttacagttccttagatggtgtttcttttacaattcatcttgaatggaccctttgtcttagtttgttgagcaattacatgggcttgtttgggtttcacaagatttggcctgtttcatctttctgcctttcaaatgttgaattggtggaatcatcatatggtaatgatgctacaaaaactacagcaatgaaaatggagcttccaccaaaatagccactctttatgtgattcagataattttccatctatgagactgtaagattggaggatcttataaactgggtcataatttaaacaactgtgatatggacaactatgtttcctctagtttcaagtcttttgatttggaaatggaggggctgcgtgtatgctggtgccatagtgcattgaataagatggtgacattggaagtggtacgagttgacacttttgtgccattgagtcattgattgccttggaataatggaaatctttgtgcggtgcaagatcattttcaagatctaggtttcacactttgttaagatctgtaaactaagaataattaattttgccaagcaagtttttggatgttatgatggatgaggggacagtatcttgtttgtgtcagcccttctacttctggtgttttcattttctttagtttgttgtttaattttgtatcttactatattcttgtagtttttctttgttttttttatttgtagttttcttctcttacgacaacagcttaatatgcatgcacttccattagctgctctttgaaattgattgtatttagcatggaagtcacctcgttaattaaatgctgtcctccttcattgaattgcatgttccatgagtgagaaccctacctccttcattgaattgcatgttccatgagtgagaactctacacaagggtggtttaaggcaccttgggtctgtgttgagattaatcaaatcactgcttttgtttatttatttcatgttgcaaatgtgctctggtgctaataacaagagaacattgcag

SEQ ID NO: 7186 - DNA, 1923 bp, Populus trichocarpa
  Intron number 1 from transcript POPTR_0013s14240.1 (locus POPTR_0013s14240) derived from phytozome v7.0 (chr-ID scaf fold_13; pos 14519029 to 14520951 reverse strand)
gtcgtattgaatcaagacccacaagctctattaaggtaaagatatgtgctttacaggatttttcaattctttgttcagttgcatcgtttttaatgtgtttaattgctgtgaaatgtgggaattttgaagggaatcagtgttttgagttctgagaccttttttttctgatttgggatttgaagggacaatggggcttaattgggttttcgttggtactgttattgggcttaatgaaggttgagatttacattttttgggacagtagcaatattatgacatgattgttagcttaaattgctattttttttttgttaatgtttttgtgctgtcgggtttgtcttttttgtgtagattggaattgttgtctgatctgtgcctttgcttgagctagatggagttatactgcacctgatgaaagggttgctttaacaagtagacgcggataaattgttttgaaatcttaagctcacaaattgatttgtttcatttaaattttgaagttgtatttttaggatatgcaatattattccaatagcttaatagttattgttcctttcgtagttatcttagtggaggcattagcttgatccagcttgttaatttgattcaggttgttgaattgttttaaatgatcatattaggttttgatttgaggaagttatgtttaaggcattgtttgtgtcatacattgcttctataatgtgcatgtgaagcgtaaacaaagttaacaggacattgaaattctaagaattatgtataaatacctcaatgttctattcactccatgtatatgtaatgttgataagagagggtaaaatatttaatgaggaggttatgctgtatgtaaaattaagagaagaatgagcaataagtcatttttgttatttctatgctgaacaaattgaataatattttttgtagatgagtttgataacttgtatgagttctatggtcaggaattttggtacaagcaaacagaattatattggtgaaagatctgttctttttagcatttctctctttaagtttccatgttctgctaataaaattcaatttttttaagaaaatgagacttgtaaagaaagatgactagcttgctatattagagaaaatgtgtgttttgaggtcagatttattagagcatcaaacatgttgtgatctaaaggatttgagttgtgtttttgaggaccaacagtatgaaaagttcatcatgttttaaaatgcacctcatgtgctagctttgtgatggtgttatttaggaaacagctggtatgccatgtattcatatgatatcatagaatggctgacattttggtgactttaacttcttctttttttggtgtgattgaatgttctatagcaatcggtgaaatattgcaaatgtataacaactgtatggacaagtttatccctggttcctctcacattttcttcaagtgtaacttatactacagaactgagcaataacaaaatttgcaaacctgtgtcagacatgaactgcaatgctgaactgtaattaggcaatgattaatttaaatactagatgaactcaccaaccaggaaattttgaaattaatggcagctaccccactccatgtttgtgtgttttttgtgccaccaaagttgtgatctccagcatcacgcagcaaagtttgtcaggtgttaatatccttttagaagtgatggcatctttttctgtattcactataaaggcaattccttctaaagtatatgtattggatttacttctagatttataaagtgatcttaaactgtttacattttgtgttggagctgctgtgcatttatccttaatttttatgttgataatgatgctatcttccttgtattccctgttaccactttcctctctttgaaactaaaacccttgattctttttctttctgcaggactttaccaagt

SEQ ID NO: 7187 - DNA, 988 bp, Populus trichocarpa
  Intron number 2 from transcript POPTR_0005s17260.2 (locus POPTR_0005s17260) derived from phytozome v7.0 (chr-ID scaf fold_5; pos 14489545 to 14490532)
gacattagttgcttcaaatttagcaccacacagtaagtggtgcctgaactttcatggcttgttaactcacttggggcatgtctaacattctccttttcatccaagatggtgtccaatatacttaacaccccccccccccccccaaattgacgcctttgaaagcacatatttcatttttcttcattcaacgtaaggtcgagtttatcaatatatcaagctggcaatcacttatccttgcacgatgcagctcaatgaatatcgcaccaagtaaaactgatttgtagtgtaatacaaggcagagtatgtgtaatccgtctgaaatttgctgccatcagttgacattagtaggttagtacattaagaatcaaatacatcattgattgggattttgatttgtctggtgaccacttttattctttgataatttagttggtctaagcatgctgagtctggtaagagactatgtacaacttttttccattcattgccaggttcatcttggagtctccatttttttcttacggttaccttaaattgatttcatagagatatattattttattcttggagattgcttgcatcatttacatgcacctagaacaaacacattgcattcaattgtattaattaggttgctcattatggtaccaatgttactcaaaacttggaatcagaatcgattggagttttgttatttggaacgactgtttcctttatgattaaaagagttattgtttttgttttattttattttggtcattgcactgccaattgtgacttggaaagcattctccagtctttaattgtctcactcaattgggaaattttgaatgcctgtagctggcttatgatctgcgtaattgtagcttattctttcaaaagaaagctcaatattgatttatatattttcattttaaatctagtgattggttcttttttcctttttctttcagggagtagtgcgttttatcagctctataagaacata

SEQ ID NO: 7188 - DNA, 1753 bp, Populus trichocarpa; identical to SEQ ID NO: 6731
  Intron number 2 from transcript POPTR_0018s01700.3 (locus POPTR_0018s01700) derived from phytozome v7.0 (chr-ID scaf fold_18; pos 1554369 to 1556121)

SEQ ID NO: 7189 - DNA, 749 bp, Populus trichocarpa
  Intron number 1 from transcript POPTR_0012s11040.1 (locus POPTR_0012s11040) derived from phytozome v7.0 (chr-ID scaf fold_12; pos 11662911 to 11663659 reverse strand)
acaacctgcgtcctcacagcttcaaattttctcctgtaagaagattttctgcttcttttgatttaaatattttattgctgaatagaaaactttctgcttcttttaatccaactttttttattgctgataaactgtgttgtctcaatcagttctgaatatatcaattcaaagcttgtttatgaataataatgttggatgccgactggattagtttagcttcttgggctgcttttagaattggttttctctgcaagaacagtaatcttaacaatatcttggtggttttgtctctttttttatttttcaatggtattgaaggatttttttatatatataattatgtgcatagcagtgtaaagggagatattttgtgcagcattgtcagttttgcatacaaactctttaactttggagaatagttgataaatttgagttttagtttagaaagaaatgacttgatgtgtcaaattttgatttttttttcaagtttgttgatgatgtatgtaatttattgtggattgaaggtgattgatgaaatctattgcgtagctgcattagtaatttctcttcttctttttttcttctgataattaaatatatatcttctttggaaaaatgtctgttttctttataatttttgaggtttctttgttttgtctcttcaattacgttggaaatacatctgtgtctgaacagcttgctatgacattgtaggtttgttgaattcgtaagtaatctttccagtgcct

SEQ ID NO: 7190 - DNA, 4083 bp, Populus trichocarpa
  Intron number 2 from transcript POPTR_0019s01470.1 (locus POPTR_0019s01470) derived from phytozome v7.0 (chr-ID scaf fold_19; pos 1292892 to 1296974)
gataactggccttgtttgcattactcctggtgcaggtaatttcgacttccctcgccgtgttatgtttgctctcggtccaatcaccgtgcatgtattttgactattgagatttttattggtcttggagctagaattaagcatttaataatctttttcttgaaaaatcaaactacctaaaacattaaatagtgtggttgttttgctggagttcaatctacaataaaatatatcttcgcctgcagtaaaattatccttgcatcctttggtccaaaacaattaagcttcttggtgggggcaatgatactttttttttcataataaaaatattatttggtctctaaaatcaacaaaatataaaattatttactaataattttcttaacttagcaaaagcttcttaacaataaaatatatatttacctccgggatcaaaaaaatattgtgttgttagataaaagtattttgaggttttcaattttaaatgtacagtgaaattacatctttaactttgaaagagacaaaacataagcttagcatttatgggtattttgtacttccacatatgtattttgtgtaattgtcgaggtcgtgggggcatttcagtattttcataattttttcaaattttgtaatgcttaaagctgctggagcgtgctcgacatgttctggcgcgtgggtggcatccacaccattcaggcggtgcgtgtaacgctacccagtggacataactgaccttttatcatctctctaaatgcgtcatcatattcttttccatttggagtggtgtgtggtagcttacgatggtcgaattgtcactaatgatcgtttgatttttctctctctcttggcatgtaaagtacttcattgtcctttttttcttactttttaatttcagccttcattctattaatttcttatttcattcctttttcatttatagaagtttatattctttttaatttagtcttttaattgcaatttctcatatgttctgttttttattccagtcctcattttttttttaatttctaattgtgtcattaacacttttgttgaagttctttttctttcaatttcatcattcaatcaaattttttgttgttttaatttcatcagtttgacccttattcttttgattttttttcttttatttaagctatttttcaattcaattaaaccctccaattgaaaatttttatccctctaattaatgttttttctcacccttattttttttttatccttttgtgtaattatttttttcatgatttcatttttcaacatttaatttgttgggaatttagctttatatgatcttattgttcaacattagtttttttttaatattagttatgtaattatcttcaagttttttctatgggtttatccggatctcatgatctaggtcatgatttttacatgtcttttttaatataagttttttttaggtgttttgtttctatttcatttttcaaaatattattctaattcatctataattttttttacagatgaagtttattttttaaaataaaaaatattcatttttaaattgtattgctaatgtgtttgccttgcataatattttttatatcgtaggtttattcagtcaatttcatttgtatttatctttttattcatgaattttttagagtgtggatttatctttagttatttaaataaataagttcagtaaatacaattaaatgcatgtctcattttatgttatagaatatcttgattacttagactttttaatttacactttaaatttttttatataaaaaaacacattaaaacaacttgtatacctaatattttttttaaaaaaaaagtataacccacaacaaagcgcgtgttaaatgagtagttctcactaactagtatcagttgacttttccatctctgttccttgccatagcaaatttgttcataaattatttaacttaaagaattatttcataagttctaatttgttcgttcataactttcattcattggcattggaaggaaacatgaaaaaggaagagctagctcaaggattaatttagttcaatagactttaaaaataaaagattagggagggaatactgttcacgtgggatccaaccatgtagaacgatattttggtaaagaaagttgaagaaaaaattaatcattttcctaaagcttagatttcaatataaatttgatgaggtacaacatatataggataatccaacttatcaaaagttgaagacaaagctactaaaattgcatttcttcggggcttgtttgttattgtgattttttttaatagtattttttacttaaaaatatattaaaataattttttttattttttaaaattcattttgatttttgacataaatatatcaaaatgatctaaaaacactaaaaaatattaatttaaaattaaaaaaaaatattattttttcaaaaatattttaatttaaaacacaaaaataaaaaggttttcgtatattagatttgaagatgaaaatatcatcttttggagatagatgatatttaaagtttaaaagtttcttaaatattttttatgtagactacttttaaaaaatatttattaattaaaaatatatcaaaataataatttttatattttatttttatttttaacaataacatatcaaaataatcaaaaaattatttaaaaaattaatttaatattattttaaataaaacattattttaaaaagtaaatactaccatagagtgccaaggaaagtgaaagatatattaagtaccataactcatttgttccaatcataaaaaattatagagatcacataactcatttgttccaatcataaaaaattaatttaatatgattattgatgatattgctataaatttgcacctgactaaccatttcaaagtattgtttcaccttaaactcttgattttctagtatatttttttttttaaaaaaaagtttttaaaatgaaattatggtgcttgaagcttacaaactttctaaatcttttcctttcaatccatataagatattaaacatctccgtggtgttgggaataccgaagcttcgatgccactttattagtaacttcaaagttctaataccatagacaatcctattgatttttgcccagaaactaagcacaacaaatttaatatgttcagtaatttgcttatatccatgaaatagacagtattaatgaacaggagaaacaccacaatttacaataataatggaggacaaagaccaaacctcatacccacactctcttgcaagtgtctcgtctttctctatcacccacattttaccagcctacacaagctgctgctcattacagctcgtgtcgctgccacaatggcagaacctctctctctctctctctctctgtttggctctcgttgatacgtatgcttctgctctcaacacaaccttttataggcttttcaaatggcagctagaattcaacaaaggtaggctgcattatttcttcattaatgcgccgaatcgtggtgagctccaactcactcttcaacttttagtggccataattattgccacgtttttgcccatttcttttgtcaaagttaggtaacattcagtgcataattcttcttttagtcaaaatatgcagctccctcttaagactgggatcgtttgcaaacagggcctaaatgctattcggcaaaattttgaattttttatttaaaacccaccaaatttaagatggatgaaaagtttataaactgggccaagttaggctaaattttcaatgactgtgctatatcttgatctgaaatccatcggcctcaaaactgaggccttcatcataggggcttgatactgaagttcaaattagaaatggtattcttttcttagacgttttgctacggatttttgtagcactaaaatcctatgttgtaaaactacaatccgcctgccagttagatttgagacatggtagatttggagttttaattgatttgaattggaaaaaaaaaagagtatggaaaaaattactggttattcgtaaaataaggttgatttggagtttctataatgatatatttttcaggtcttgttcaagg

SEQ ID NO: 7191 - DNA, 3462 bp, Populus trichocarpa
  Intron number 7 from transcript POPTR_0013s09570.1 (locus POPTR_0013s09570) derived from phytozome v7.0 (chr-ID scaf fold_13; pos 9323129 to 9326590 reverse strand)
ctggaaggaactgtgagtacatgaaactatactgcttaccatttgtttactagatatcttgctactgtttcacctctgtgaggctgattgcagaaattttactgaatgatttgtatgaaattgtacttgtcccatatgatattcttattgtattctggcttcatttagttgctgtttctatcaagatatttggattccttagcaattatgctgataataatttaagatatcatgctggatatatcatacaagtcagaggtgacatattgcaatgtaatgaatcttaagttaaatgtcataaagttttgaaagagtaaaaggtatgctggatatatcatataagtcagaggtgacatattgcaatttaatgaatcttaaattaaatgtcataaagttttgaaagagtcaaaggtaacctcttcatagagaccagtagactggtgaacaggagtactcttttgcagatacctttaacaacagcgttaatttgaaagagtgaattggagatggtgtaagataaaagagattcgatggagtctataggtggacatttaatgggaagacatttttcattatagggatgaattccattttttattattggaatgcttgaactgcaggttcagctaatgaagtaatttattcactttttggacagaaaggggtcaaacaaaaaagttggttgataatttatgatctttcagaaagcttcagggagaatttgaagttgaattgctgttaactttctgacaataagggattgaactttggaagttggtttagtaacccagtatgcttggaaaccactgctgagctttaacttcaaaatttgtggtaattatgatggtactgtgctacttttttaattaagaggaagttctgctcttctgatgtccagatgatgcaggatcttaatattctgctcctaaacactgaggtttacagaagttatagttggttttgggtgtaactaaagagatgttttgtagtttaggtagatttttttaaggataattatactattcaggaagtaaacaaatcaagaactaaagatcttcaggagaagtcgattggtaaaaggaaaagaaacctagaatcacaccagggatcctagaaatcactcctaggtattcttaggcatcacacctatcaaagtttgctgaaatttctataacatatatattccttcctttaaaattgggattatgagttctatatatggataagccaataaggaggtgacttgtggaggtgtttgaggaggtgcagcatagctagtgttagctggccatttaacttcttaatagtgaagtggtgaagtagctaactagattttacaaaatgacaaaattacctcgatgaaaatgaaaattacaaactgccatgttaaaacccccaaatcctacactactagttaactaaaaatcttatttaaacaagttctagatgagattctagccaaataatgatgttgatgcagacaatacaagaagcagaattactgtatttctatgtggtttttgtagacaagggcaattctgtaattcagatttcttggaaatattcaaggtaaggtttatttctattagcattttattagttctacaagtaaacaggttttttaggtttttcctattctaagtatgaatgatactcccactggtcaaacattgtttcatgaatatgtggctcttatattcaagttttgatcttaaatttaattgaagtgcagggaccttttatggccacaacaaatctcaatgtattggtactaaattaatgtaataagcttatccatgatagatttgagatcaactcttcaaattcaagagatgatagtttgattctaacaatggtcaaaaagtctccattgctttgttcatttttctttgttgaatggattgcttgatttttagaacggaaaagctctttgaaagtttaacctactcaactgcattgtatatcatacctaactataactaatcagaatataatctgttttaattactagaactaaccagaatacaattaatttcagttagttttttttttttatcctttcccaaaatttaagaaatccatatccttcattttgttttttcatccatggccttaaactctattatttaccatttctctttatgccaattctcatcttccttaataattttaaaaggaaagacacaatagggtgtgatgcgtgatgtgtgctcatttttttgaagttgtgttataaaggcgccatgcattagaacaaagtggtgtgtattataatccatgttttaaattatattaagagtagtttttacttaactaattgaaaaaagaaagatataatgctacatttaaataagggatagctatagaaccacgtagaattaccagactaaaattagaatgttgggaccaaagttagtgggtaatggggagttatgttttttcccttgaacctatatttttagactcaatgataacaaggaaaagtaaaatgtgttcttaggtatccatttatattcgaaaattttaaaagatccctcatgccatcacctattctctaatggctaggaaattgagaattcaacgctttattatgttccctaagggcacaagttagccgaaccaagtattatattatatataattgttgtgtcaacaacttaatgctttcattggcttacaatttaaattattatttttatcgaaatcacttttgtgatcaaaacttatcatggtttctttgacatggcagtattacttcttgcttatcatattccacttctgtttcgaagctaagaaagatgatttattattctggatgtgaaaaacaaaaaaaacaaaacagcattgcacgattttgctttctgctagctaaattttttacgctttgcaaccctctgattacattatattgaggagttggtacccctgaaaaagaaatgaattctaatatgttgacaggtattcaggcatttacaggttgctatgctactgacatcatgcaattctataatattcctagcacatggcaagtcctatggttgtaacttttcttagttgactaagaagaatttttcatctgcattttacactataagtcttgcccataaaaacttaatttaggtgacgaaagacaaggattcagttgccacatttaacagtgtttttcttatagtggttatctgcaaactgcaggtacaagtgtgagtttactgatgggtttttgtgaaacacaggttgccatataggctttgcgtgttgcatttttttcattattgttttcctgtaccatatttttgttgttttgaaattttagttactgttgctgcagcactttgtgaacagtttgctgcagaggtttacatgaaaatctttagtggttggatttttttccccagagatattaaagaatgtgaaacttgttataaaattgctaaagcagaacttcctgtttccagatagtaa

SEQ ID NO: 7192 - DNA, 1000 bp, Populus trichocarpa
  Intron number 1 from transcript POPTR_0014s12910.1 (locus POPTR_0014s12910) derived from phytozome v7.0 (chr-ID scaf fold_14; pos 9509299 to 9510298)
aaagagtgtaatgatggtaatcatacctagttgattgaagatttcaagatctaggttcaaatgaaaaactaagccatataacattctcaatagcactagaaaattattatttcatgcttatttttataatgaaataagtgttagttatagtgtgataaacggtgagctgagcttttaatgatttttatatttttgtacactgggtcaagtatagcaaaatactcttaataaaagatcatgcatataagtgaaaaatgtgattgtttatttgtgaatttcaataaaaactgaattctctaaaacactcatgaatctaagagttgtttagggctaaaatgaacataacaataaaaaccaaagaaaatctctaggtagataattatgtgagtaatattgttttagtttacataaaagactaaatagcttaagacatcacatttattatttagccgaataaatctgataatattttactaagaaatgttcaaagtaaaaaagtacctattctgatgtagtaatctactaaatcaatatttttcaacaaatctttaagttgtttttaaactggtgagttaatttccattcatgtgagggattgttggaaatttgctataattaaacaaattacaggtgaatgagaaattagtttaaaaaaacccatggtttttctactcaaaaaattcttagtttttctagatttaattcttgatttatattggctaattaaaaattaataatggtggaaattagttctaattaattcttcaatcttataactttcagaatttactataaaaagaagtatgaatgaagagtttttaacttgaattttttatattttacactcttcctcaccttatttttagtgttttttttttttttttatgctttggttttccgcacaaatttagctcctgtaattatcaatgtcacatgttctttcacatgttcttttagtgtaataaaagcagactaatttatctttccttcattcaggaaa

SEQ ID NO: 7193 - DNA, 3063 bp, Populus trichocarpa
  Intron number 7 from transcript POPTR_0016s06970.1 (locus POPTR_0016s06970) derived from phytozome v7.0 (chr-ID scaf fold_16; pos 4763493 to 4766555)
gggatattgattcccatttgctggcacttctcaaggtatgctactttcaggcagacatagatacaagttcttgttctcatatgtgacttttcattttatctatgatgtttcttttaaagtaaatattgcttttgcttatttcaagtgatgaagtcttataaactttatatcactgacaaagaggttttgtgccatcatatgttattttggggagtgatagcttacatgctgatgaacatgaaacgctatcatacactattatactgaactcatgtttgctttcattgctgggctgagctattcctgaatatttttcatttgtgacatttcttagtgaaatcaaaatcactgactagatttaggttccgatagtgaaatcaaaataaatttatgactttcttagtgaaatcaaaatcaccttttccaattgatttaagttgttcataaacttttgactcaaagaaagtcataaatttatttgcttagaaataactgttgacttgaacaaaaaagttgttactaattgaacccaaactttgctttaatcgaaagttaaaatttttatattttaacttatggattctaactaaactactttccttattcaaaaaagttactttgtgtcatattttggcaaattttcatgtaattcaactcatttctgctcaagttatgtataaatcaaaagttatacataacttgtgcagaaatgagttgaattacattaaaatttgctaaatcaaaagttatttttcataagtcataccaaatgaactcttaatatactcatttatgcattgtgtgtgatgagttattggtcttcaactgtattataattagaatcatcacttttatagacatgagcacaaagcctcaaatgacttatgtggagcaggtaggtgtgtttcattttccttcctgtatccatttctatgcttgatggtgccatgagctattatcatgcagctttcagctggcaagtgatgtgaagcctatggattttactttttgttagctaaggttgttaaattgcacttttaactaggatttgtagtgggtctgctgcttgaatttgatatgatcttgtattatttatcagagtatgattaagtgaacgattagaatctttagataaaagaaaattttattaattggcttaatctagatactaaagcatgataacgaataagtcatcctctgaaatatggaaacaaaaaacatgtcataaaagagaagccaatcttggtgggtattagctgaggaacctgaagcatgggacctccaagaagaaaggaaaactatcctatcactcaacaattgtcttgaagggtattggttttaaaaattctagcatttctttcctaccaggtacatcataggaagacaaatgatacaaaactacaatctttcctcctaatgaaacccacaaaagagattataatgaaatccaccgccataggtgaacaatctgaaccacatgtccctcgcaaatgggtgatgtaaaaatggtcacagtgagactcatcattttgatgacaaataacacaattttgggattctaaggctctagtaatatttccttacaattcaagtttaccctctaattactcagtatgaatttttttttttcaaatcaatcaaaatgaaaatggagagtagtcagattaaggaaattttgtggttaatatcagtttttgatttttctgggttcatattaatatgataaagaaaagattaattgcttcttgatcgaataaattgaattaaaaaacttcaagctcattatcttagtcaatccagacaaaaatgtttagtgggaactttatttttgttattatagattcaccaatgttctaactctactcggacaatataaatttttttaaagtcacccttctagttctaaaagctctattgttacacttggggattaaatagcctactttttgaatttggttttcaagtttcttctatgttcttaactgtttttgtgtgacatgataatatatatggagacttgagaggaaaaaatcagagaaaaagcaagaaaagataaaataaaaatataaaagtcagctttttattagctatttactttgtaaaatgtaaaaacttaaacttattagcaccacagggataactttgggaaattttaaactgtgggcgtagcagtggaacactgatgaatctataagagcaagaatgtggtttactcaaatttctactagatatgaaatgttttgaaactaagttccgcataaagatgtaggagctatataattgcagaatatgggatatttcatatcatcattcattgaatatgggaaacagtttgtccctttcacagtaagatttataatataaaatacttaaaacaagcaagccaggctttttaatagttggtcatagaaccagggagatatataacagaaatagagggatgtgaggtggaagagagaatggaaatgaaatgtcctaaaacctgataaagacaggttaatgttttttatcaaccattctgttttactcttctgtcactaatcttattgaagtttaatctgttcaagttggtcattaactttatgaggctcaatacaagaagcaatttagaaatgccagaaaacatgttttaatgtgtgatttcatgctttaatatgtttttatgctagttgatacatgcagcccactcaagccagaagaacaaattattttacacaatatactttcttaccaacaatgttgttagctagatgatatatcttgtagagatttttatatcctagatgggcagcagaatttcttagaaaccactttttgtgctagcagttacgtcaggataaagcatcctcactttgagcgcctccccccctcaaaaaaaaaaaaaaaaaaaaaccctctgaattcttaattgatatcttgagaggttcatgagctcttgtagtagtgctgtttttgttggcttgtatgatgctttaatcttcaaattaccagctgtttcatcatattcaaaatgtcttcttggaagcaggagagaggctttcttcctttgtcagctgcactgtt

SEQ ID NO: 7194 - DNA, 691 bp, Populus trichocarpa
  Intron number 2 from transcript POPTR_0019s04530.1 (locus POPTR_0019s04530) derived from phytozome v7.0 (chr-ID scaf fold_19; pos 4709093 to 4709783)
ggtgagcaatccaacttctctctatagttattgcaaaattgagttaatgttaattggaacatcatcttttttccaacttatggaatctattatgcaactgaaaattgataatgttgtgaagttgactggaattgtctcactttgttcttcttgtagttattcctgttgcattccagcaggaagcttcctgaactaggcatagaattctctaactttttgaagcactgtaggcatgaattcttgaattttgaaccgttatagtccttttggtgttcagtggactttttacgtacaagtgtttgttcctccataaaggacctcgactggagttaattggtgttcttccttatgaacttggaccatatgattgtatctcagttaatattttgatttggtttgtttcgacacttttctaacctacttcttaatctattaattttctgccacacctgagtgtatcatatgacttgttttgctctagtgattactttgatcgctgccaaacaagttttgctggtgctcctagtagcgtagatattgttgatatgcttatattagaagccataactacttatgttaaattaaattcatattctccatcagtgcataagaagcatgttttatatttcagttatacaaggataagcaagcaagagttattatactatttctgtgatgcaggaaccattca

SEQ ID NO: 7195 - DNA, 634 bp, Populus trichocarpa
  Intron number 4 from transcript POPTR_0009s14210.1 (locus POPTR_0009s14210) derived from phytozome v7.0 (chr-ID scaf fold_9; pos 11184700 to 11185333 reverse strand)
aacaagattcaatataacaaggtagttgcttcaattcttcgtcggaatctagaattctaacctaatactcctaatcagcatcataaaataattttgcatgtggtgaatccctttcagatgaatccaaaagtgctgcaataacgaataaatagttcaagagacaattatgttgttgcattcatcactcaaatacactgtttaaaccatccagacaggggcggggctacatgtaagagaacgggggcaatcgccccccttaatcttaccaaagaattcgtaatagtccctgatagtttaaggattttgaatttaccccctttttctagacattttctccccatagtttttgaagttttcccattactccataaacatatctactaaagaataatttacttagaataattgtacatgagattatcattttttataatacaaccttgatgtaataattttgtttaaatccaatattacataataaaataatgttatttgtgtaataatacctattgaaatagtatttttatttttgcccctcttaattatgaatcctagctccacccctgcatccagctacagttctgcccatgctagacatgatttgcggattatgaaaggtttattttcttgcagg

SEQ ID NO: 7196 - DNA, 1785 bp, Populus trichocarpa
  Intron number 2 from transcript POPTR_0012s12870.1 (locus POPTR_0012s12870) derived from phytozome v7.0 (chr-ID scaf fold_12; pos 13248586 to 13250370 reverse strand)
tactgtcaaaggcggtggtgtttcaggtgagcttaattgttcctagttcacagaatattacatatgttattgttatctctctttttaattaaggtgccatccgcaatagctcaagttaaccctctgtaaaaattaaagaaaacttgttttttctctcacttacaacatataatctggtttacaccctttttttttgtaatatggtacagagatacttctcttgttggataaagtgcatataattattttgtagttttcattaactcttatttttggtatttgacaagattcttttctccacttgcatggagtatattgttacaggcaaatagctctttcttttttaataaaatttaagaacagctccaattccatgagtacatgagattaagtttattcatgttatggtgctcttattgtagcatcttcttaaaatgctttcctttctctcggtggcttgcctgcctgttttcatttagtggttgatccagaagttagttcatcacctgtgttttcttttcttgtattctaattgcctttgattgatatattgaatcttattttaagttgattttaacaatgtcttgtgaaggcagcctctaagtttttggaaagctctgtaagcaaattcttctgaactttgttgtagtgaaagatggaagggttgaaattgtaagggagttcaacatttttagacgtaactagcctttgagaagtgcagtatttttatagtctttcagtgcaatatccagttgtctgcatgctccattttcccattgttatccttctcctgaccaatgctctccattacctagcacagacaggattgtgtctcaggatatcagcatattagttaaactatagctgggaactgatggatagttgagttgagtcattcttgtggttgttgtcattgaacctttcccccaccatttatcctaatccaactgctattctcatttgttattgcccacggtcataaaacactatcatttgtcatcagataaaaatctttttttgttttgcttgctagtttctgagcaagagatgaactctatttcctattccatttgcttaccttttatctcaagtatataaaacttcggatatgccagaatataagcacatgtcatcttctactgttgcatggtggaaactcaaaatcagaggttagcattattgcaatatgtctgcaaggggtgattctaatttagtggtaattggttgggcactgaagtaaaagcccttcttgatttacacaaattcatttgaaaccagatactcctagctttcatgtgtaataatattgaggatgtcatttcacgaatcatagttctctttatctagcctttccttgtgtttctcttggtatgaaattctttttcacacaatcacaactactgcaatggaattttgaattgttttacatctaaagcatgcgctttatttatcttactttttttatgagttccttgccattttttttgtgattgaattttggcatttcattaggttccaacttgtatctgtgaaggttgtgttcgatgattgtcttttcaggccagatataagtgattgcaggggggttttttatttttgttttattttactttttatcctttttcccatcaaatggagaatggcttgaccactgataattctttataacgtcatgcgtaacgtatatgagagttgagaaccacattctgcacaacttaatttttagttcaaatcatttatacggtgacaggtcaagttggagccattcagttggggatcagcagg

SEQ ID NO: 7197 - DNA, 1513 bp, Populus trichocarpa
  Intron number 6 from transcript POPTR_0012s07540.1 (locus POPTR_0012s07540) derived from phytozome v7.0 (chr-ID scaf fold_12; pos 8449320 to 8450832)
cagcttgcttgaaaataagtgagctaaaggagcaggtgaaaactgtcttatgctgtattcttccatttctactgcttttaagcataacaaatttattatgcaaactcgccattaatagatactgttttgaaatggtcatttctcaattatggttccacttaagggcgtaatttgttgataggcatgcttgcaaattcttttgggatgtatcaagtattgttaatcaaaacaaggcccatcttttatcagctttcatttttttgggtttctggtgatgaatcaagtttctgctaatatgcatgtgcaaaagtatttaatgagtttcatgccgtagtttgcctatagatgcactagtcgggaagagtgattaaattaatgtactgagagaggagggggagaggtaaactaaaaaagattccttatcctcaataggtgccgctttcacattcccataatgtacttgtctttgaacctaatcccattcctgtgtttacatgcatccatcttaaaatcctcatctcagttatgttcattttatgtatattttgtgtttcttaaccatccagtgctgattaccacagcaaatagcctgtctacttgtaatttatattccttcagtccataattagtgtcctctatgcttcactgaacatgttctaatttattttttaaattaatatatatatatatatatatatttatttattctcattcaaatagtagattttttaatgttctagaagttgaggacgaggtatactcctttctaactttcagattataattaaattaaaacgtggtttgtaacacacagaggacacttaatttggtactgagggagtaaacttacccttcagcttagtagggattttttgatagcattgcacctgttgtgcttttctatttaaaccaccatgcatcggtgcaaataagatgtctcatttttttaaatttaaattactttagtttatttctgattttttcttgaagattggatatacaatgggtgagatataaatggtttcttgtccatgattgatcttgttggaataagaatatgattattaatatggggaacattattgcaatagttttgcatcccatggaataaaaaacatcaactttttgaaatccattttcatgtatttcaccatgcagaacctcatttctgatgagatggttgcattatctctaagccttgtcaatgtgattttccattattcattcggtaaaatctttgaggtcattccatatagttattctttttgtgtcgggccacattatttttttgttccttgtagaagctgcctgacaagcttctaagagcagacctaaaagagcagaataaaggcttttctcccatttcattttttcattagcatgtttcttatctagcttttgtttttagtatattagtggtatataaaatatctgctctgaatggtgtcttaattggggccattttttcctttcttcaggttcttgaggcatttgcttcttggcttcgactaag

SEQ ID NO: 7198 - DNA, 890 bp, Populus trichocarpa
  Intron number 2 from transcript POPTR_0018s02990.1 (locus POPTR_0018s02990) derived from phytozome v7.0 (chr-ID scaf fold_18; pos 2630452 to 2631341)
ttgtgcaaattagtcgcgtcaggtaagaaattctcgttggaaaagtaactctaatgcacagtacaataataaagcataaaactatacaatactaacagttgtaataattaaggggtcatttggtatcgagttttttattttttatttttaaaaacataaatagaaaactgtgtcttttcaacataaaaaaatcattaattaattgtcaaaattttccaaaatcaagtaaaatggttttagaaatttgtgtaaatttttgttggttttgctttaaaaaaaaaaatcaaagcaaacaagttttctgtttctgtttcaaaaatttgtaaatagaaatataaaacagaaaccgtcaatgatatcaaatgattcctaagtttttcgtcgcaatggattctttagcataaatgctggcggaatttcttataaatgttgtgatatccaacgtcaaaacctaccttattttccattcaagataaaaaaaaaaaaaaaatccactacctacgaataataatgaaggcttgactacaaaatgtatttataatgcatttttctcaaaatatttgtataattctcaaagatttcctctgaaactcaattttatatatatagtagaaattttcttaattatatgactaacgtatatataaacaataaattaattgatgtgttttatcatcttattggttcgattacataacaaaaaacttttcttcttttaaatctatgctccttgtacatttgaacgagaatattcaatcctattttttcattttatagcagggtgttaacaataagatacagattggaattttagtcatgagtggtatttaagcatagttgtatatatttctctactatgcagaaggtagccaaagttgttcttcttcgac

SEQ ID NO: 7199 - DNA, 860 bp, Populus trichocarpa
  Intron number 1 from transcript POPTR_0008s15000.1 (locus POPTR_0008s15000) derived from phytozome v7.0 (chr-ID scaf fold_8; pos 9999405 to 10000264)
aagcttacagagaaaagcaggttttttctttttttctttctgattttaattactgaaaattaatccatcatcttatagttaagttaaaattacgctttgtctccattattttgtaaattacagaaaatatctttagtcaataaaaattttctaatcattcaaaatattaaaatttctctcatgtaaattatatccacaaacccgcaaacattaacccactttttttctctctttacatacaatttctaaacaaaatctctctacaaaattctacaaaatccaagttcgattgaacctttaattctacaaaatcaaagtttaggtgctttgtagttgatttttgtatcttggtgtctgttcgtgtcaacaattgtgaaattgctgttgttctcgacacattagggtatatatgtcatttcacttgttttctattagacttcgataattaagttagtgggtttagtggtggtttaattattgttatttctatagaatattgtttattttactctatttaaccaaaaaaagcataaaattaaatgaaccccatcgttttcttgaaaacctaataaatcttcaatttaaaaattagagttactattcatataatgagtaattttgtgttattttactgtaacatatttaattagtgtttgactgtgtaggaaataaaatgcccaatattattgtatatcatggaattgcttcagacgtcatgagcaattgcttctctgagtacatgttttatataaacttgctgttcatttacaagcaagtttatgacgttgacttgcatataaggaatgacagggataataaaatagttggtgatccctcgacaatgtagatattgaatatac

SEQ ID NO: 7200 - DNA, 578 bp, Populus trichocarpa
  Intron number 8 from transcript POPTR_0019s10040.1 (locus POPTR_0019s10040) derived from phytozome v7.0 (chr-ID scaf fold_19; pos 11667485 to 11668062)
ctgggcgtctttcccaggtgctgtttggatttaactaaaattcaacataaacactaccaagtacacataatctttatgaattattgtcttcttggagttttttcccttaaattctttttttttttatctctggtgctgtcatattttgtgggaattttgatagttcatgtcttgtgactattttgttaaaactgttggtgtctggaaaacagccatatgtaaaaaaagcgtcaacattatcttatttcagtttcaaaatttcagctcctggacttttggcatctgacatgggtttttagttttgagtatgatttggtagttcctgtcatatgcactcactgaatgataatgtacttcttgccattctaatcaaatgtcatagcaacattcttctgacctcgttcccttatttgtggactcttggtctggagctctattaatgtagtttgttttctcaatgacagtgcattttatcctttttactttctagtgtattggaatcatatttagccacttcgttgttttctcaaaatcactcttcaggttgcagtcattcgaaattgtagcattttagcagc

SEQ ID NO: 7201 - DNA, 1568 bp, Populus trichocarpa
  Intron number 1 from transcript POPTR_0006s24240.1 (locus POPTR_0006s24240) derived from phytozome v7.0 (chr-ID scaf fold_6; pos 22890524 to 22892091)
gtggtgatttgatgatgggtattgctctctttcttatttttctcctttgcctaatttcctgtgtttgtacttaaggtctgtgtgacaatcactgaaagtttatagattgatgtgttggtgttatgaattcctgatgtgggactagttttaagttgtgtaattgattgtttttacttttttttgctgcccgggaggcttaaattaatctgttaattcccttacaaattcttttgataatgatgtgatctatatatatatattctttaaggttatctgagtttgattaatcagttctatggatactttgctcctgtaaattggattgtttcacaattcgtcatcatgggttagatttattattgaaaaagtggatttgctgtagtctggtctttgatgtaatactattctttatcagtgctggtattattattattgctgcttttaaattatagttgaaggccatgtttttgggttaatcttgaaggtttgcagaagagggttctgttgtctacactagatttgaaatcctttttctttctgtttatgttacttgatgcatttaaggttatgaaactggaatgattatattgtgtttttctatagcatccatcatacatgatctctacattcctatagcagaggcatatcatcaatccttttctgctcgttgtgcataaatggaaacaaaaaccctttccgaagccaaatatgctagacaagcaacatgactttgttacatatgcgctatataaaatgtcttcggaatatcatttcttttgtgttctttattgcaaagtcttctatccgtttccttgattagcttactttgaaatttgatcttaagccacaatcttgtttctacacagagcgatacaggccagtgatggtttttcattcttgaacttcgtagttccaaaaccttcatggccgtgaatcatgataatgtccaagtagggttaacttctaaatttggagtcgtgaagagctaggggcagaggggaccttggattcttctaatttgatgacagaccaaaatatgaaacttacctatgcaattgagtttccttcgttctgaatgtctgtttgtcatctactgaagttatccatgttagcatagtcaaaagctagcattataagaaacataaacatgttatttgatcatgctctactctgtcaaaactctgaacttgttatttataatttggttaattaaccttatgtgctaaggaaaggagatgagtccacttcatcaatttgttgttttcatttcctaaagttggttaaatcaccgtcattcttgatgtgcagatcaagcaaatggtattagcagtataatgataaaatgtcaactctccccactcaaatgcctaacgtgtccttttcgaagaactctgaaccttttgtttgtgtagcgttagtttttgatgtgaaactttgtcatttcacacttccttcaggataagcagtacaaatccatgatagattactcttggattatcatacatgtcatgtagcacttttctcatagcatgccgcaattatgatctttgtgctgtcatcatgcgcag

SEQ ID NO: 7202 - DNA, 786 bp, Populus trichocarpa
  Intron number 6 from transcript POPTR_0002s16700.1 (locus POPTR_0002s16700) derived from phytozome v7.0 (chr-ID scaf fold_2; pos 12483321 to 12484106 reverse strand)
aggagctcagggttctaaaaatcgacaggcacaaagtgagtgcaattttatttgatgattctgtggctctagtgaacatttttctcaactgttgcttatggaccatgtcttaaggttcaagcttattgcaccagtcactgttagtgagatattgttgatacttagatcttttcttgcccatcttgagggtaatgagattgaacttggtgtttgtactttatataggtagtttaattgctccaattttcctgactgggaggtaccagtgattttttatggctcttgagaaggctgagtgcattagtttacaggaacagcctatttattgctattttttttattggaaaacagacatggatagttggaataccttacaatattagatgctcataatttcaacagaatatgatgccatgcctacattcacgtttattcttattctactttggtttctttcttctttctttgtcctttttattaagcactcatggaatttaggagtttctggaaatatggatgttctggattgcaaatttaaaatctctgtacttttatagaatatagtcatgtacatgtttattgaatatcccattacttcctgtcagtttaggacgaccttatgtttcttttctttatactattgtatgcttctggaaatcctgcttatgttacatcttctttttcttactatgcattaatattcattactttttatattttccttttgatttgatctctgacttgtgtgttctttatttggcatgttttctccatttacagacctca

SEQ ID NO: 7203 - DNA, 927 bp, Populus trichocarpa
  Intron number 17 from transcript POPTR_0008s08070.1 (locus POPTR_0008s08070) derived from phytozome v7.0 (chr-ID sca ffold_8; pos 5015402 to 5016328 reverse strand)
atattattgatcaggtagcgaccacatcctgacctctcctctttttgtcaaatactcacatagacacatacatacatacacatgcatgcatgtatatttatgtgttcaggaggcccatgcagtagagcttaaccttacatgtaataaattctcttagaagaggaggaaatggaaaaaatatgttaactaagatttgttgcttgatatgttattgtttatcttataactcttatgattttagtagatttatgctgtattatctggttagtgaagtaaatttttagatgtcaaatggcccggcagctactgggcattggataatttgattcttgttgacaagctcatatttttgttcattatctgatggcttggaagatgtggaatggccttttattctctttgaggtgatcttcgagaaggggaggaacttttactactgatggacttagtgggttttgggaacgagaatggttgtttaattttgtggagatgtgctaccatgagtagaatttttgaatttttgaatttttgaaaatgctctgtcaaagcacctgttgttgatgataatagtttctcagtttttttgtcctctactttgggggtactcaaaatgctcagtatttgaagaggtagaatttttgaatttttgaaaatgctctgtcaaagcacctgttgttgatggtaatagtttctcattttttttgtcctctactttgggggtactcagaagcatatcttcagcttatattttgagtgacaggaagctctttttttttaattttctttttgtggtattctgttatggatacatattctgcatgttgtgatcttcttttcactttggtctaataatatattcttcctctgacaaaaaagaaacctgtgttgactgtgcattttatattttgcagcttggaggccctgata

SEQ ID NO: 7204 - DNA, 1207 bp, Populus trichocarpa
  Intron number 15 from transcript POPTR_0008s02740.1 (locus POPTR_0008s02740) derived from phytozome v7.0 (chr-ID sca ffold_8; pos 1396764 to 1397970)
ctcgacaccaagtaagcatgtgttatgttacattattgcaagtttccccttttgtccgtcccacttttcttcaccctcttttgagagcgacagggtgaaggttctggaatgaatttcccttttctgatatgctattgatatttgtcctgaatgttaaaggttccatgactgtaattttaattttgtgggaaacatactttatatcgatataaaaaatggaattgtgttgggagaattgttattgattgtgtttttctaacatgaaaattcactatctataaagtgttattagcccccactacaaggttattgttattgggtttaaagcaaatacatgttcagggcttagatacaaaagaccttctaagaacactcaaagaacttgtttaattttgagtacgaggaggaaaattaggaataggaagttgtttttaaactaccaaatgacttttatttagtgttgagtgaccaataactgacattataccaaatgtcttttggatgaaaagacatgaataaaacaacaccagaatcgaacatctggttgaggtttcaactgcatgtttcaaacatgcgattcaagactcaacatgaagtctgttcaaaatctttctttcacaacattcagtgaacatgacaacaggatgttctgaacatccggtccacagtgcaacatgatgttcgaaaagataccttttcaaacttccattctttatattctaattaatttttaaaattcttcgcactttaaattcaaaattttttataccttgaatccaacaaattcccttggcattttagtgaagtgccattaagggacgaggagcaaatatggagtctagtcataggagtttacaccatctttttttaatcatgttgtttgtagcatcttgctatgattacaatgtgacttcctagagaaataactataactgggaaataggaagagggtattcaaaaagaatatcccaatgcaatacgggttgtagttctttggcacataagttaggcgatcttgtgccacttgagtttctactcttcctctttcactgggatattcaactctgattgagaggggaaggtattatcatgaattcttgctttacttcttacgaaatggaaacatacttggttttacaggctgagcctttattttaagaaacgtaaacatgcttggttttgcaggctgagtcttcaaattcaacaa

SEQ ID NO: 7205 - DNA, 568 bp, Populus trichocarpa
  Intron number 4 from transcript POPTR_0006s20660.1 (locus POPTR_0006s20660) derived from phytozome v7.0 (chr-ID scaf fold_6; pos 19675841 to 19676408 reverse strand)
aaactattatactcggtacccttctatcttttagtgctcttgttgcaatacttgcaaaattttgctaccaataatagaattagagaaattctcttgcactgaatttcttacaaataaaggaggaaagtttctcatacctctcatgcagtaagcataatcttctggagatgcatacttcatgtagatgttgggtagttgtattgaaatcaaggccgaaatttatgcatgatcaaaatcacacctcaaaattctgaagttctgaacatatataataacaacatacccattgataataatatctgtgtaacagaaatgaagtattctcccaaacaattacctgattcaacctgcctgtaaatatcatggaaggtttgaagttatagcaaacatgaacccatccttgagatatatcagcaaatcttttccaagcacagatgaagacaacttccaattaatactggtgtgaatattttatgtttgctcttgtatatttttgagcttttgtttgaatttttctcttctgtctaatgcagatagaaagcaaattcattctgctctccaagttaac

SEQ ID NO: 7206 - DNA, 1956 bp, Populus trichocarpa
  Intron number 1 from transcript POPTR_0001s19520.1 (locus POPTR_0001s19520) derived from phytozome v7.0 (chr-ID scaf fold_1; pos 17214252 to 17216207 reverse strand)
ttgaggacatcgtcaaacaagttttcctcaacgtatgccaaatttcatattttaataagttacttgtcttgtgatgccatataaactctgaagttggacaaaattagcttaagatgaaattaaaaggaagaaactcatgaaaagttgggtattgaactagcgcaacttcacaaactaggctattgatattttggatagaaggtgagtgtatgtagatagctactaatgtccaacatggcaattatgtcattggattctaactcaggactttctctcctagtagatgggattgtgttgcgatgtcgtggttgcacaaattaattaccttagcttcaaacacaacacacaaaatagtatagagcaagcaaggggtcgatcccacgaggaatattcaagtcagatttttatgctagatgatatgcaatttgggggggggtttggacgttatctaggctaaagcaaaagaaaacagaaaactatcaaacgaaatttaataaaatcagaaaattatcaagagaacaaaccttggtcacaagcacacatccacctacagaaatcagaactgatcatggaaacaaaacatcaatttatattctgaatatttatctcttcttaacattggttagttaatggatccgccgtataactagccctaaccatcaaacgaccacagtgttcgcactagtaatttaattcaatggcagccttaagaactagataagttgattaatcaagaaaacataactgtccgcagtctatgtttgatttgattgaatgttctccctaagattaataacgtagatccgccacaattattaaactcagttgcttcacaagttcatataccacaactccggttttgatatcaaacttagcaatagattgtttacaataataacttagagtccactctagcaattaaaataaacaatcataggaaaaataagcataggagaacaaacatatttatcatataaactgaaaagaaaaggtaaaataaatctcacagttcttgaaatccaaaagtctctgtgtccttgcaaccaagaaaaagtgtttagccttgcatgtttgttgaacaactaatcaaaaagaaggaagaatgcataattcagggtttcttagaggcagggtgcgtttttctcttcatggctggctgccccccttctcttctctcattctttttatatcctaggaaaccctaggtctctattttacaaaatactcctccattaagtagactgtttacatttaagtacttcaattactattttcctagaaaaggagaaatagccttgcatgaaatctttaagttttgacttagaggagctaaattactgaaataaaaacttggatatcggtttagatgcttcggaacgtaatttggactcgtttcttcacgaaacctgtttgctggcagaattcagatgtcatctttgaaaaatcatatctccctcatatgacatcgtttttggcttacaggttgagcgtttatagaaatttgagtcatgaatccaaaaaaaatgagtttgcatcaattggaattctgtagctccagatattcaagtttgaatggtcgaaggtcaacactggcagattgcgagatttaactttgaaggctgcgatttccatgctcttccttattttattttcttgccttagatgtccagaaaggtatggatgttagctttttaatgccactggaatcacttcatttcaacctctagagctcacgctctgcacaaaacatcgactgaaggtcaaatctgccaattatctccaatttactcctttttgcatctttcatccaaaagtgccttcaaaacataaaacaaagaatatcaaggcattttatatataaaacataggcaaaacactagttaaatgtggttgaaactatcgaataatatggttgcatcagattgccatctactttgctttctttcacatatatac

SEQ ID NO: 7207 - DNA, 874 bp, Populus trichocarpa
  Intron number 1 from transcript POPTR_0014s11200.1 (locus POPTR_0014s11200) derived from phytozome v7.0 (chr-ID scaf fold_14; pos 8327099 to 8327972 reverse strand)
tttgaatttagaccatcaagcatctgaagttactggtaagtggaaaaaagccgactcttcacgacgaaatttctcaggccatgccattcatttgctgagaaaattcccaaaacaaaatcttgttaaaaggtcccccacgagaatccatgtttgctggaacaggcaattaataagtttgcctgatcatatccataattgcaccacaattgatgacacttgatctcatcattcccatcaccgtgagactcggaaccgggctcagtgaaacatataattgaattagagggttggtcaggtttgatttagtaacgttacagtagtagttattttttaaaatgtattttatttgaaaatgtattgaaatagtattattttttatttttaaaatttagttttaatattagtatatcaaaataattaaaaaatactaaataaaaaaattgatttaaagaaatgaataaaataaaataaaatattcaattttttgaaaaaatacttttaattaaaacacaaaaataatcaagcccgtacagtgagaacttaattcgtataattcaaggacattggggttctaccagatttcttaaaaggtataataaatttgaagaagaaaagaattatcatgtggtgttcaacttcattttcttaattctgtaatgtttgtgctttcttattcatcaacttggatgaaaacattgcaaaaatatagattaaggaattatcccatattataattaaaaaaaaaaaagcgaaagcatttagatttgaaagaattattgtctaaaatataaggctaattttagctaattccccgtctttttttcatctcgaatttctaagaatctaggacccagtaatcacgactcgcaaaagc

SEQ ID NO: 7208 - DNA, 683 bp, Populus trichocarpa
  Intron number 6 from transcript POPTR_0001s35040.1 (locus POPTR_0001s35040) derived from phytozome v7.0 (chr-ID scaf fold_1; pos 33309264 to 33309946)
aggcctgtaaagttgacaaccaaagtttttggtatacttgaatgtctcatttcgaatttagtttctcatcaacatgttagcatactttccctcatgatcacatggctaagatatacattataataggatggtttacatttctcatttcaccattttagttgcataggattttgtagatttaataatggaggacgaacaatcaaccacatatagcattattatactgtattctcatcattattgtgatgcccttctgcaggctatgctcccgcaaaaaatgattttctatttgaaaaggtgtctgcatactcattggactgaagttctggccaatttaaaattttatttcttttgatattacaatggatttgaaaatgaaaatgtaaaaaattctgggaaattttctctcatctttctgatggattgtttttctcttatatccagcgccttcaaaactatatttttggtaagtggaaacatttgcacaaattttatcaagtgttcatttaagtttgtgtttttcatccgaattttcaatctccgaagagatcaccactgacacctgtgcttataagtgatattcagatattctgatgcactattcaagagggaaatctgctctagtattttgctcgacaaggaaaggggcacaggaagcagcattgaaactatctcagacagca

SEQ ID NO: 7209 - DNA, 1689 bp, Populus trichocarpa
  Intron number 2 from transcript POPTR_0013s11890.1 (locus POPTR_0013s11890) derived from phytozome v7.0 (chr-ID scaf fold_13; pos 12509874 to 12511562)
ccactcagtttactaatttccaggtatgtattccaacaatctctttgcttcgatagtggctatatttgaattttctgagttcatggttgtcatcaaatatgaatctcttcatcagaatttcccaaagaaatttgctctgtttatctccatagcctgttttaatcaacacttctgttttccttaacactatttgatgttaaagcttatactcttctttaggactgaaggtgcaatataggctttgtgaattcgtagttggcaaagggtggttaggttttgaatgtatggtcttcttcttgggaatacagtgtataacacatttattgatggaacatcttagtcgattttgtatttggccgaaattttattgatgtcagttgacttgaatactcttacacatttttgttttatttgtgaacttgcacaaagaaatcttcaggtattgatgtcaagataatagtccccttcttattgagcacctaatttgtttttaattctgaggagaactgagcctcatttccatgagggattgacttgcttgtagagttgagtttgtcataagacttgtttttgcattgctgaagaaagcgagcttaagctatagttattctcccgagccaagcaagagcacgtgtggcttaagcccaaatccactttgtttaggctcatttatgactcttcaacttcccgctatataaactacaagaaaatcttgtatttttccattgtgggataaatggttttgggtttcacaaaaacataccaaccaaagtctttttatatcaatttctcattcactcacaattcattttaatcatagtagtgttccatgttaaagaacttttgttgaagaataatttccaataaagttttaaccctaaaattgagtggtcttcacttttaatttggactcaaatgtgcccattgaccatgttttttaaaacaaatttctaacaaaggtttcctcggaagatggaactttgatcataatgtttatcagccatctcttggactggagtgaattaattgaatactccctagcaatggctctagttgccacaagttgagcttgaatttatagcggtataacagattcaggattggagaaaactacagccttatgctcaatatgaattatatgggaagagcggaagagaagaactttagaaggatgaccagaactttgttttcatgagaaacattttttcttctaattcaggcttgactgatctgtactttgtatctgtactttatataggtatccagtacatatttttgtattatagaaattgggtgtagctctcaggggctctcatcttcaacatatcctgctttcatttcataagttacattcccttaggtaaagattgttacctaatcatataaaaggtggctattgcaacaatgtttttttcacactgtgtgtaaccaaaatcatggtcaacctgttcaaatcaagtgttttgatatctgatatatctgcccacagccaaacagtctggagaaacatttttctttacaagttatgattttcctccctttcttctgtgtcttatgctgtgaatctgcagaatgattttcattatctttctatgttaatttatgtatttttaacagaatcttcttgtttaaggtgatgtacatttttcatcactcattttgcattctcttgtgggtgaaggcagatac

SEQ ID NO: 7210 - DNA, 1458 bp, Populus trichocarpa
  Intron number 1 from transcript POPTR_0001s08700.1 (locus POPTR_0001s08700) derived from phytozome v7.0 (chr-ID scaf fold_1; pos 6649206 to 6650663 reverse strand)
tatcaggcggtcaggattccatcacaaacaggaaggttagtgagaaaagtttgtctttaatgtttcgagtgtacaattgtctgccggtggatttctcttataattggctggtaacggtattggtggttttgctaatctccaataaaaaactgacacgagtttaactcctataatctctttaaaatcgagtcaagaaaatgtgatttcgtgcagcattttaattccatgcgcgtagtttatttctggactggaaatttgagtctgcaatcagaatcaagaagtagagtcaatcttaaggcgtcaagactaacttgaaaatgccctaaaaaaaaaccctaaaaaaagggatttgaaggggttgttagagagtcatataaatatgataaatgggggtttttggcattttcatgtgggcttttattgggaattggatacggtgcatctcgggaccttggaattaaataccatggagtgcttcgaggcctacgatcccgctgcatgatgtctattttgcggcatctacggcggtgaaatgagatggagtatttaggcttcttcatggtatatagtttatcaaattttttatttttttactattatttggcatgggtattttgaaatttagttattaggtgcgacccaattgcataactttttctgtcggtgacatggagttttggtaggctacttggagaataatgcagagattgattttttttttttttttgataaagaatgtagagatagaatttggtggggttgtagatggacacttatgaattttaggaaagtattaatctacgctaacaattgggattatgaaaattaattgaatagctggacagatgtcttgctgttatcttgcggtgggttgacttagccaactcacccagtcttgggatttaccattctggcaacaattgtttctttatccttttgtcttgaaaagacaatgattgatcgattttagcaaaattacatagtatggtgttataaaaataatggattatattatatgctgtgttaaggcatctttatccaaatcaaatttatttgtgttttggttaatattttccactcgttgtttttttgtagttttcagatattttagagtatagtaaatattgctttttaaaattatatcaaatcaaatcaaattgaattatccaagtgtcgtggacaataatggtcatgtgacattgttttttttgttgctttcaaaattatatcaaatcaaatcaaattaaattaaattattgagaatagggaattgaaatggggcatccaattttatgatggactttggatatgtaccaactgcattatttattgtaataatcgtgtctgtctccagagacctttttcctggttactttttaatttctatcgtagaggtgcttgctactttcatgcattaatacttaataatagctcatgtaatgcaacaggagtggccaa

SEQ ID NO: 7211 - DNA, 4127 bp, Populus trichocarpa
  Intron number 5 from transcript POPTR_0001s20750.1 (locus POPTR_0001s20750) derived from phytozome v7.0 (chr-ID scaf fold_1; pos 18858243 to 18862369)
cagtttacaaccgagcatcttcactggaaacattagtcagtatcccatattttctgtttttaataggatctaagcataatatagtatactctttgaatgcaatttggttaattctggactctattgtctttataaatggaaatgcttaaagaacattagcaatctttttagcaaaatgttagtgtatggtatttgcactataatttcttttattgctatggttttcttcaagaatgaatttggttagcataaattatggtgtggaacatttagtaaactaaattatggaccacgtagactaagcaaaactcaagaaaaaaattggtggtatcaaaatgtgctcttgataatggacaatgattgacgtcaatcatgatcaactatgattgatctaccttgatccagttgtgaattgtatttatttttcctagttctgttagaatttattcactagttaggttataaaattttaatttgattttcctagttagaagttaaagttttgtttggttttggtttttcttaaataggtcaattggtcagtttaagtttttatataaatagtttcatgtattattttcatagaagagattaagatatactattgactttagaaatttcttcaaaacttggagttcagaattctctatagtttcaggttgtaacctcacggtttgagaacttctaataaaaatgtcataaacttctaatttaacacgtataggataaaaccaaatgaatttagcaaaatgatccataaaaataacaaaatagcaataccatttaatcaagaaagtggaggaagtgcctaatcatcacaaaatattaaatctagaggagcggtacttgcatgttcttaaggatgtaaagttgatctactagatttgaccataggacaagtagtacaatatatgtaaaaaagatgatgacaaaggaaaatgtttattaaaaactaaatgttggggtgcaatggatcgggcaaggtgagctactggatagagggtcttggtatcattgtcttgccgaatagaaaggtgcttaaaaattttcctattggtaactcatggtttaacaataaagagtgcagtttagtgaaggatactagttctatctaaatcgtaagagtagttacaaaatccttaaactttgaacaaatccctttgaataggtaaatgttgaaatatgaaggatcaagagctttaccaacagctacaagttcatcactataaacctttccatgttgtaagtatgttgtgatattttcattaggtttctgatgcatttcaatcaaggaaaagtgcatagacataatgcatgttacgaagggggagattagtgtcgctgttagagtgctccaaacagcatgagatgtggtacaaccattattgaaagacaataccttagtagaaagggagataattagtgtgcttatgagtagttgatcctattgtacccatatagtataggctagattgatttctatggtgttatcggtgatgatggttttggcaggataaggatgactgccatgtacaaatttaaataatcattggccaattagaaagggctaaacgtaagtttttcaaaagattagttgttatttataagtttcaaaaagagatggtaatgagcatgttggaggttgcaactgttgactcaattaaggttgatagagataaaactgacaccattaggattgatagtgtggcaatgctaaagagagatttgtcatgggttgtgatgtggaagacatgttttctaaagtagctatgtgtgtgcagttatgcaataggcttgaaatagtagttgtaagatgagatgaagaagacggaaaaaaaataaagattgctactgaaaataactttttttatgcaaagattaatggttcatagatttcaaaaattaggctttgataccataatagaataggagagaacgaaagaggaaaagattgttttatcattcataacgcatgtgttacatatatatagtaaaagatagttaaccctaatgggctttgtataataaaccataatataatatagtaatgttaatacaataaataattgggcttaaaattgtgtttaatcatattgcttcaatatgcaacggtttccaatcagaattgtgtataaggttagaatccaaaatagagttgatgatgctttgagtagaattgtgtataaggttggattcaattgtttgaaagtcttgttaaatgagcatgatgaggattttggtgaaatatgagagaaatgtcaaaacctgcccatgatgatttccacattcatcatgagttcttgataagaggtgatcaactttgcattccttgattttcattacaagagaagatgattcggggttatacataaagggggcttgactggtcacttagaacgaaagaaaactatgaatgttgttattgagaggtgttattggccttatttgagattagatattggtaagtttgtgcaaagatgctatatttgttaatttgtcaaagggaaaacacaaaatacaagtttatatgtctgtctattcttacaaatatatgaacaaacttgtctatggattttgtacttggactaccttgtttctgattgacacaacaagttccttagtcatttttggcaaactttgtggaggatgtatgattcatctttacaatttagtagcatagaccgcaagcagatggacatatagagtcactaaaacagacatgcagtaatttaattagcagcatttgtggagacaaacctaagtagtgggattgtgcatgggtagaagcaaaatttgcatacaacaacactaaacacattgctatatacaaatctccattcgagattgtgtatatgcatgcagtgtcctaaacatggacttgatcttgtaacactgaattagtactactactaaaatgatggatataatgcacaagttatacatgctcagttgagattaaagttgcagcaaaccaacaccaaatatgaggaggttgctgataaaattatcgtgctaaagcgtttaaaggagatagagtgattgtatatctatgcaaggagagatttctagtagggatatagagcaaggtgtagggaatagaagtatggttataggataataagtaagatcaatcacaatgcttatattatcaatttactagaaactatggttattctaagactttcaatgttaatgatatatatccttattacggtgatgaatcactgtatccaaatttgagcattgacttgaggttaagtctttcacaagtagagtggattgatatgaaatgtttagtagattcaattatggatcggatagacaaagcaaaacctaagaaaaagtctagtcgcgtcaagttcttctctctataatcgatcatgattgaaaatcaatcataatcgcccaagatcaattgaccatgaacgattatcaacaataattgaccatgattgattgattgtgatccacttgtgaattatatttatttttcctagttatgttggaatttatttcctggttaggttaagttttaattttattttcgtagttaaggagctagagctagagttttgtttggttttgttttttcctaaatagctcttaggccggtttaagttcttatataaacaacttcatgtattattttcataggagagattaagattaatactattgaattcagaaatctcttcagaacttaaagttcagaattttctctacatttgggttgtaactttgagacttgaaaacccttaattctatccttctgcaatatgctgcgtcaaattcataattttgttgtggaaaggaggtatatataatcacgttggcaggaaaatatccgattattttggcatccaaatgcttgatgattacctattaaaagttggtgcggagttggcttatattttattgagccatttggtatagtcatatgtgatgattacctattacctacttgtctgattgatttcttatccaattttcttgccatgtcctgtagtcattattcatgattgagaaatatgttcttggcttgttttaatttatacttgagaaatctgttcttggcatgctttaatttaaactttgcatgttataggtcggttttctctacctgacaa

SEQ ID NO: 7212 - DNA, 1735 bp, Populus trichocarpa
  Intron number 6 from transcript POPTR_0006s16340.1 (locus POPTR_0006s16340) derived from phytozome v7.0 (chr-ID scaf fold_6; pos 14263596 to 14265330 reverse strand)
ggttctgtcaggagaagctgccaagacgctttcaggtgtaacaatgctcatatatgttaaattgtttttactcgttcagaatgttttttttctttataaaaaaacaatgatagaattttcatttcttgaaaaattaactggtacaacaaatatacaaaggcattgcaaatcctccaaaaggacagtataattacttggaagaggattattgaaaatttccctaacatttgtatctcgaatcactagcttagcaatgatgtcagctgctttatttccagttctataatcatagtagcacccagaaacaccaaccagctgcctgagatgtaagatgcaaaaaactatgagctctatatcccatgagactggtccgtcgtgattaatttcctttatgagatccaaacaattgcactcaattaccatattatgccaacccttttctattaaccaggaaagagcttccttaatagctaaagcctccataatctttggattagaaacacacttgcagaaaataggtccacagctacaaaagagccttgactatcaagcaaaaccattcccgaaccaccactgggtgactgattattccaagaggcattcaccttacaaatgaaaaaaccttgagcaggaacacaccagctcctaattgcagaagcagtcacagtagaactagctgatcccctgttaagcaagctaccactcacagcttcaacatattcaagccactggttcagaatgttcaaggacaacatgttcttttatgctttatattgcatttgttcatttgcatgatgttcctttgatttgagtatcagaatagctcaaatttgttttccatgctttatttattagaactcttgattatattttccaactgctgacttgttctaacaagtgtatcccttagtttggctgagctgcacgcattcagctttctgagccttctctaacaagtcagcgatagaatttcccagatcatttaaagctgtcaaccccccaaacccccccccccccaccccaattctcatacaggttgctccattattcacctgcaacagaagatatcttccatgtctgctttccactcgatactccatataacaagtgttctgttcccgtgctgcatcccttcttggtctccaaaagttttatgagatgcttgtggccatgcatgtctgcacttttttatatgttcttttccctgtccttaatattctgctcttttcaagccggcaactttcttctgaatgtgtattttcaaaactgactagattatctgtgtccagtttggtttgctactgctcttctttttgagctatgttcccagggttagcttgtgatgtttaaacctctatgtctgagattttcaaaaagttggtttgctacaggaggggctgggacttgatgtagtttatcacatttcctccaccatgtgagaagcagtcagcttcatatttgttactatttgcaaaatttttatggtaaaccaagcactcctaactaattagatatactaaaaagtgcaactacttgtccattgtaaatactctgtagccttattctattcttgaaaaataaacactgaattgtacagagctatagctggtctgacaaatgggtgttccttgagaatgttgacatgttatgaaacaagaaatgcgagtactgcaaccaatatctaatgattgggttttcctttgaaattcttgtatgtccagaccaaagaaattca

SEQ ID NO: 7213 - DNA, 3670 bp, Populus trichocarpa
  Intron number 9 from transcript POPTR_0007s14620.2 (locus POPTR_0007s14620) derived from phytozome v7.0 (chr-ID scaf fold_7; pos 14367785 to 14371454)
ttgctcgaagccaaggatttcaggtacttgtgctgcagttatgaagatcattactaacttgtgatactagaggattgatatcttgattttgttctagataatggcatcctcccacaacatatacaatgatagccaattctaggttcattatgcttgtaatctatgcatttgtttgttttgtggagctagcttgcaaggtttacgaagtgtcttatcaattaacccccttaaccagagttattaaacttgatccggttcctaggcggggagggttaacctgggttgaccccggttgacccattttcttttaaataaaagcataaaaaagacgtagttgtaaaggttgcatgtcaatccgggtttttgaacaagtcaaactgggtcaattccttccccatttttctttaactagtaccggtctaggccccggccggcctggtcttaagtcgacccaacgggcttgtccaagttttataactataccctcaactttcatagcatctaaattttttcctttctgtctattccataaaactaatggaaactaggaaaccatacatgagaggtagatactccctagcatgactcacaaaacaaaaacagaaactcgtagcctaaagtgttgtctagtttgtgttcttgtgttacactctcttattatctaacaatttttttgtccatttgttatacctgcatgtctaggaatgtgtttgtgccattgtagactagagaaaatttttcgagtactctaggagtaactaccaatacttactccatgagaccactttgaagagagagatgatgaaagggaattatatctggacccaccaaaagtgacgagtattatttccatctgggttcaaatattttttcattctcatgtttttctctccaccttctctcgctctctcgctctctcttgtagaataagtattggtagttattcctgaagtactctgaaatttctcagatactagtagtgtacttgtattggtgctttgtcttatttgcatgctttgttgtgtcagccaaatcctgtgtatttgcattataggggggcactcctgcaaagctatattcagggagaaatatgtgtttttaggactattgcctctggatgagacagatggtcagaagtagaggatgtggttgaaaacatggggattgagggggttacaaagtttcagggaagaatggacggcaaagacttggatgatgcgctttagtgaaagatgaacatgcagttaatatggtctcccaaattcccactaacaaggttgtagtgatttgcttggagcataatgtgattgcaagtcaagtaggtttaactttatcttttggtgtgtttggaaaatgcaaaagaaacgaggaatcgtgtaagcttgatgttgatttaggtgacaattttcatggcagtccgcatatagctgggagtaaagtgataggtggaagtcaagtcatcagaggtagtcaaggtataggtgacagtcatttcctttgaggtaatccggtgataggtgcaagtaaagtgggatgtagtagtgaggtacacagtgggaagggtgcatccaatagtaagattgtggacctgactttaattaagactgataagactcctgattctgatgatgataatatttcttatgaaaatgtagatgaaagaatgttgggctgatcctcttaacaaaggagactggtttgaaatgatcaccagctttgggagttcgaagttcaaaggttgctgggtggtttaattttgtctgagtttttgtaacaaactcatgatttagaaatttggttttggactagtgtatgatgttttgtctatttttttttgttgggggcggggatgtattgatgtcttttaagcctatttgagagtctatgaattctagtttcactggccaaaaacttgctgcctaaatagggctctattatttttaggatgggagggaaaattagtgcgatgaaagttgaggaaggttaattggtacaaattgaactcactttttgggtggtgtcttgacaccccataaacctgggtgagcgcggaggggggggggggggggggggtttttccctggggggggttttttcccccccttttaaattgttccaaaacggttggggttttttttttttagccgaggggccttccctttagaaaaattccaaaaaaaagcccccccccctaggggggtttttttcgttccttggccccgaattttttttgaaaggattctcccccaggcccccccttaaattgggggtttctttgtggcctttaaaaattaaaaagaggcccactttttctaggttgtccccaaagggggtttaaaaaaacccctcaaattggttccaaaaccccagaaaaaaatttttagaaaaagggagagaaaaaattttgggttatctttttaaaaaggggaccggtttaaaagtatcccagtttgggaattcgaatttaaaggtttcgggggggttaattttttgagggttttttaacaaattcctgatttaaaaattggttttggggaaagggaaagatgttttgcaattttttttgggggggggggggatttattatttcttttaggccttttgggagtttagaatttttgtttcccgggcaaaaaactttgtggctaaataggggttctttattttttggatgggagggaaaattagtgcgataaaagtgggggaaggttaattggtacaatttgacctccttttttgggtggtgtctgacccccccataaccctggtaacccaacggggggtggggggggggggggtttgtttctacccctttttagtttgttcaagactgcttgtgatttatttattcaagcgatggagcttgctcatgagaatattcgatgaaatagtccatccccttatggttgtttttttgctttctttgtccagtatttcattgtcaatgatttccagctagctcgaccttaggttgtggttgtgtgtgggcttgaacatttaagagggtccaattgcttaggttgtccaaatggggtttaaagatactcatagtctgtactatagcccaagaattaattctttaaatgtgagcgtccttagtgataggtgcttctggatgccaaaagtttcatagctacgtttcatggtaaaaagtgtgttctatttctctccctcataatgtcttggcagtctctgagtttgttctgttgacttttcctaatcttctttatcaagttttactaggaatttcatttggttatatttgattctatgaatgattgtgccacaattcttctgtcactgacctccttcagacccaaacatgttctgcatgttgctattggtataaactcaggagtccattttgttgacaagtcatatcaaccatgcatgacaactgacaagcatgtgctggttagtccaaccttttgaaattctgtgtattccaatgcactgattttagtggtgcctagcttatcccttcacaattcgaactctcccactttctctacctggcactttacctaattgataaaattttgtgtatctatgctaatagtgcaataattatgccatgagaggtcatggatgccttactactcaaaagaattatttgccttgctaatgctgatatggtaaatgcaggttgaggaacggcttgtgacagtag

SEQ ID NO: 7214 - DNA, 1827 bp, Populus trichocarpa
  Intron number 1 from transcript POPTR_0014s10540.3 (locus POPTR_0014s10540) derived from phytozome v7.0 (chr-ID scaf fold_14; pos 7844590 to 7846416)
ccactcttctcttactccttgctgctatctctcaggtaaattgctttccagttgcaatctctatctatttattctaaaaaaatccgatcgttacctctcagttttttgtgttctagtggagagatatcaatgcctgttcgaattcccccccccccaaatctggcggttgattttgtaatcaaaatttaattgcatttgttcgggtttaattctattcaattaaaaatacgagagtactctaattcgttgtaataaataatttaatataatcactaaataaatcgcatgtagctagaataaaatttaagcttgtaaaaaataataataataaacaagcatataaacacatgcaaaattaaactaatcaagtcctgtttcttaaacatgcctgtaaagaaagcattatattagtcagattatgtagtccatttgttgaaacatctagatgcagatcacgttgctataattgcatactttggcagttttattgttcgtacgcaaatggattgattgtaatcagtgtcttataatttcaagaacactactactaaacaaaatccatgaactaggaaaacattctaaaatatctctctacaaataacttgaacctagctctagaatgactagatgaaaaaaaagtagaaacgttgggaaaagcagaggagagaaggctgaagagctactgttttgtgtgtgcagaacatctttcactcagctcttttttaaattgatttttttgaactgaaactaatggagaattaattctgttaattaccataattaattctcttaattacccgtcataaaaaaataaaaacctatagttttgccttaaaattagatgtttttactttgaaaataaaattgtttaggtagatgatgtttattctttagattggccaaaaaaaaaaattctttatgggtctaaaatgctcacatgtgacttaacttttaagctcaagatccatttggtctagggtttttttctcttaaaagctctagtgctttacgggttaaatttaaactcttcaacttcatgctaataaaatataagaaaatcttgcaatatttcaatgctagattgatagttcttgggtttgcaaaacatgctaataagagtttttttatatcaatttcttattcacccataatttgttttaataaatggtagatgtttgattccacttttaatttgactcaaatatagctattaaatatgttttgaaataaatttataacagatttaactgctttttaacacgttaaaatcagatggataatgactttgtttctgtatgcaagttcctatatattctgtgggtggaaaggtgatatttttggaatatagagaaactgtgaagaaaatctgttaatagcacagatggctaaagaagccaggattaggcaattaaaaaaaatacacgaaattttgatgtttagttaattgcacagtaatcgggggtctcttttcctcggccaaacctcggattgattagtttcagctctgtcatctttaactgggcagttttaatcagtcgtttttgctggaagtgttttattgcaacccgccatttaagttaataacaaagttattgttttctactttgagtttttttatttttttatggagctttattagtacttatgcaaaaacatctttaaagtaggaattaattcataaatatgaccttgtgaatacaaatcagtaggaggtcgttatgtcggtctgctggtcagtcttatctttaattaatttccgttcttggattttttttcctatctgttttgattcttgaatggttactattctaaatttgaagttattga

SEQ ID NO: 7215 - DNA, 426 bp, Populus trichocarpa
  Intron number 1 from transcript POPTR_0009s14820.1 (locus POPTR_0009s14820) derived from phytozome v7.0 (chr-ID scaf fold_9; pos 11540184 to 11540609)
aggtaacagtgtcaaatggttttactgcttttctgtagaatctcttttgcttatcctatgcttgtcttcactttactctttaggatgttattgttatttcttcaatgcattcgggggcttttggcaaaaaaaaaggaggaaaaataaagattgaaggctatttgatcttgtctcagttttctaaacctgttcataaaatagtgtatttttatataaatacttttatatgcatacatacatacagatgtatgggacatgttcttaagttgttcattcaattctgtgtgattgcttctgatttcaaagtattttgtagttgtgatttgaggccatttaaatttggtgtcatgcagaggacttatttgtttggaaaggttttcagtcctgatgatgtgtttttattatattccttgtaggggattgtga

SEQ ID NO: 7216 - DNA, 407 bp, Populus trichocarpa
  Intron number 15 from transcript POPTR_0012s03790.1 (locus POPTR_0012s03790) derived from phytozome v7.0 (chr-ID sca ffold_12; pos 3030159 to 3030565)
aagaagcagtaagtttgcttccccattgttcagaacttttgtaggggatatcagggttaaattgttgtaccatgttgtatatttttgcaattttaaggatgtttttaacatataatggaattttcatatgatttgcttgtttttaacataccgtgttataatggacttcatataattttcatatgcaatcgtttgttttcatgaattgatttgatctaccagcaataaataaactattgctccatggtgaatggctcctcaagttaagaatctaaagaatctataatactagtattagtatgtcttttagtctcttagtaaattgttagaaactttttatttcttgaataaagtttgcattttccatcattgacctgaatcaccttctatttccagttatcccttga

SEQ ID NO: 7217 - DNA, 797 bp, Populus trichocarpa
  Intron number 1 from transcript POPTR_0016s04950.1 (locus POPTR_0016s04950) derived from phytozome v7.0 (chr-ID scaf fold_16; pos 2984619 to 2985415 reverse strand)
gctacttatcggctctatcgccgcttcaggtatttctttcttcgtaattagagggattaacttggccaattgtataaatgctggtgttttttttatggtgatgatgttaattgggattgtaaatgttttgtctgtgattaatttgttggaaatcttttatttcatcgttgattaggttgatgattatacaatgtgataacatttaggaaagagtaaaatgcgtttcatatcataatgatcatcgcaatcaagaaaatgcgcgttccttttctttgttttatgttctgggttatttcaacgggctatgaattcgcttatgattccatttctggataatttttctcggggttttaagataatgattttgttttctgaatttctggtttgggagattggatgataggttttggcacattatctggtgcacagcttcattctgtagaactatagttctggctagctgatgctcctggtattcgctttttatggtgagctaactggagtttacacagcgttgacactaaacgcttgtctacaatcttggattcatcagcttttgctaatgccttcaatgcttagaatgctgcaaacaataccaatttaacagatgttatagggattatgttttgttttgtttgttgtgtttgcatgtacataatgtagtttaaaactcattttaacgttttgtggcttgttgtaattgctatttttggaaaatttgtttgtaatgtgttcacgttgatttttagctagcgttcctttgattgcagcttgtgcgtagcaacagccgccggttt

SEQ ID NO: 7218 - DNA, 747 bp, Populus trichocarpa
  Intron number 4 from transcript POPTR_0001s15230.1 (locus POPTR_0001s15230) derived from phytozome v7.0 (chr-ID scaf fold_1; pos 12068623 to 12069369 reverse strand)
attgctggtataggagttgagatcgtattcccactgtgagtactccttttgccttgtcttacagttctatgttggctattcgtttggtttgcgtagatgatcttattagttgaataacttctgtgtaactcctagatgaaacctgtgattacgctactactgtctttcatttggatgagagcactgatttttacaatgtctgctgactattattcagtattctgtgtataataccatttatttttgtttgaaatgctatatgaatctaagaatatttgacactgtaaaagttggaagttatttttttttatctttttttcatagttaaggttttaatgagcttgttatgtgatctgcaataaaataaacattactgaaagatttagtacatattcacttgggatttctattcataaaatcgcaatcattgagctttgaaaacagtagtggcactaagttcgaagctcccctgcttttgttttgtgacacattcctcatccagccttttgatgccaagagataagccaatgccaagcatgtagattcatgatcatgatcatgatcaagatgcttctaacaaatttccttgtcctcataacaccaaaatcttgaagttttcttttgactgtgtttatctaatgttacttcataattttcctggttcaataattagcggttgtgacatgattaatgggttcttttactaccacagctactcgccaaatatcaaggagataaaagtaatta

SEQ ID NO: 7219 - DNA, 393 bp, Populus trichocarpa
  Intron number 18 from transcript POPTR_0010s16250.1 (locus POPTR_0010s16250) derived from phytozome v7.0 (chr-ID sca ffold_10; pos 15229190 to 15229582 reverse strand)
tggtctttcaacaaagtccgagataaagttaacaggttagtaggttactactgcctttcctttttttttttttttgagaagggccttacttgtctcctctggaatgtaaaggaaatctagtcccttacaaattgtacttgattttaatctataaatcaagttgctgctcctttgtttttttgtgtcttaaatttgattaaattcaccacatgttcttaaaagttaccttgggtttgggtatttttgactgaagctgaagttgagagtaccaattgcttttttttctgactacacaactctattgattatataaaagtttgccgcatcagattagaaaatttagaataatcttgtacgctgaagatcaaagtgcattgttgttgattctcagca

SEQ ID NO: 7220 - DNA, 3475 bp, Populus trichocarpa
  Intron number 1 from transcript POPTR_0019s09020.1 (locus POPTR_0019s09020) derived from phytozome v7.0 (chr-ID scaf fold_19; pos 10611274 to 10614748 reverse strand)
ttctcgccctttcatctgccatcgttgccttttccgtgagttctttctctaatcgttttactgtgttttgttatttctatttgtgcaacggaattattcttgattataagtgagtgatgtctccttttggattattgatgtgcgaaccaactataaaatttatcttgactttacgattttcctaaatgtgatgagcggttcacatgcgttaagttgtggaatagatagatttttgtttggagtacaagcacgagatgggtgctcctgttattgttatggtagtgcctctaccaacattctatccttgaacatgtttttgtggataacatagcttgttataggtggtgtgtttttaacttcaaaggtgtggagtgttgtttacacacgaatcaatatgattgtggcaaaagcacagtcgatttactttgctttcactaaaaggaagtgagttactagaagttatcgcacctcaagtttagatgcagtgatcaggtgatgattaaagctcttaagaatgagactctaatcttttgatcagtctgtcatgcattgaatatacaaattaatatctcgactataattgtttctactgcttatcaatactggctgagtcaagtttttgagttttgatcacgaagctttctagtcctacctaggtgctgaagctatataatcccactcttacaaatgctaagtgttgaagctatctgttccaactaaggggtatatagtgtttaaaactttaggttcgtaggaaataagagtcaagatttgaaactgtctaatcctacttaagtgtctctgtgggagtgtttaagttgagatgcataggaaattctagtcttgggcaatgagctaactagatgaccacataaatgttttatttatgtagcaaaggctaaatggttatgcctttggtcagttttctcttattgctgttgaggtttgattgtttctatccagtttaagtctcctacattgtggtttcttcttccatatttttcttgcctttttgcctgccctgtcctgtccatgtcacccataggagagagtaacaattgggatttttctttcacatttcaaatgtgacagaatagtgactacaaaaaccatggcttggatcatgttcacaaggttttatacttggtgacacgtatgcgaatagggaggaaatgagaaaacagaaattgatggcgacaccaaaaggaaggacacttgaattgataaaatttgtttaaaagcatagcatgtcaaccgtagaagaatcctttgatagacttagttaattttattcattgcctagacttctaattccttggtactgtcacacattttacttttcatagtgtatgctgacatgccttgcacatggcacccgtatagtcattctgttttatttattattgaggatggattgttgaatacatgattaaagtctttttaaaacataactatgctggtaaaaagtagtactttaagaacaaatatccaaaattaatgttgtttatgcaaacaatttaaataactaaatcatttttcgtacatgattaattctaatattaacatcaacataaatctatttaatattaatatccacattatacacatgtgaaataaaatcagttagtgagaaaattcaaatgctatattgtcaaaaaaacataatgttgttttcttgttaattaatatgctaaataaatttgcagtgcaacaattcaagttagaagcttggaatttttttttaatactatatttcatgaagaatattgcttaaattgaaattttcattatgcttgttatataattaaaatctatttcattgttttgagtgaataaagtattttgggatttcatgctttgaaaatttattaaaataatgagtgttcaaataatatcaagtttcatagcaaattgcaaaagagaaaaaaatatggttggaatgtttgaaggtgcaaaaaattaaaataattagtcaatgtcttctaatgccttatacagaggtacacggttctatatttggtatcataagcaatctgatggacagtagattataataatgggaaaacaggatttgtcaggctatagagataagccagaagagaaacagacctcacataaatcctactaacaccctgatccacacaagtcccttattgagtaagaacgagatttgtagcatgacatgttagaaaattgaaagtagtaacaaattgatagaatgaggcaccaataatatgaaacatgatcatatcagatactcttacatgtatgattcaagattagaaacagcatgctcaaattataacaaacaaaattgagaaaagagcatagagaaatatataaccagtttaacaatatatatatatatatatatatatatatatatatatatatatataataagtaagttgataacaaagatgaataccaatgttagtcagttctgattttttcaatttacaagaaatataatattgttgtttttataagcgtttagaattataagtagtaaaacaataggaatcttggtattgtaaataggagtagaattggaaaatagaaaaagaattcatatctcttaagaataaaataaataattaatatgtagctcttaattagttctaatattggaaaagaaatctaaagttaggatgctatgatttaggacatataataatgtaactaaaacatgtataaatataataattattagaaaaaacaataataaagagcacaataaaataaagaggggcgttgcctcaaaagcttaccccaacccccaacccaaactctgcctttatatatagtattgatagatggattaagtgaggttctgagaccaggtacttcaaaacttctaatccagtcacattagatgactctaggtaagctaacaccattttttctagtcaaatatataccccccccaagaaacaaccattaacgtaaagagatgcttctcataagattgcagtagtgaccctgttgatcactgaattgcactacttacaggtgattagcccaccccaaattctaacagctggcaccagggatatgattgcttattgccctcactatttttgatgtaactaagttgcagcatcattgtttccaacgtaacttccccagaactagcagctggcattctcctagaatgcagattctgctgctgttcatgtttcaaacctaaagcttatgctatatataaaacaagttggaagtcatcattatgggtcatgactcatgatcaaaattgaaaggtgcatccttaatcagaagtccttgagtctttctatttatggattttccatatatttcaaagtacagattctgttgcagtttatccccaaactactgttggttttgtctatgtaccataagcaaggatcaacttacatgttaacatttgtgtgttttgtgtatctatgtcactgctaaagggcctgtatatccgctcaagaattacaatcaatcc

SEQ ID NO: 7221 - DNA, 1440 bp, Populus trichocarpa
  Intron number 12 from transcript POPTR_0003s07690.1 (locus POPTR_0003s07690) derived from phytozome v7.0 (chr-ID sca ffold_3; pos 9210235 to 9211674)
gcggttgctcattgccaattaattgttgtttccaagtaagtttactcatcttcatgtgccaacttaaaaacatgccatgtcagatttaactacccatggacaatgggtgtttggctctctggtacacacatgaatagaactgaagttgactaacaatactttgttaactatttttttcatattttgttgacaagccgatatagattggtggttggttgttagtgttaggagggaggaggagcttaatactcaccaccacagggtattaatctgaccccaacagcaaacatgagaggctagcttggccatctcttgccatagttttaaaacttggatcagcccggtgggttaacccgggtcctagactggcccgggttcatacaaaaacccacttgaaaatttacccaatcaaacccgggcaacctgtgacccaggagacttggcaaagcccggggagacctgcctttttttttttttttgataaaaacagtgccgttttgaattagggaacaattccaaattcacaaagcttgggcagccgcacacgcagaataacacaattagaagataatttttacacgagaaaaaatcccaattcctgtcttccctagtcttgatgcataagattttcctatacagaatagtataaaatacatatttgctaataattatgactaaaccttttgtgaatattgagaggttgagatatatgagaagattgtgaaggggccaagaagctcaagacctggttttcttcaaattgaacataacccctctcatggattgcttgtggtgtagagaaagagacttgtagcttgtaatttagaacttccttctctttgatccattctgatcaagaagctttactcttgacttagatagtcacttatctccctctcacatacacgagcaacactacaaacaagtaaacttgtaaactttaacccttgtgtgagtgggagaggactttaacaggttaacttttttttacaatttattgggttgaactaggttgtcaacccggccaacctgtgacccagctattgagccgggtcgacctccaggtcgggtcttaaaacaatgcctcttgcatggggtggaaaacccgtggtctcttggtagaaccaagaggccactaccaatgagccaaatgcctatacattgtaaaccatttctgctttatcaatatctggtgcatggctctgatttttgagtgaattggagaagctccccgtatcatattgtctacaaagcacaatctgagatatcacaatctgagatatccaaactaatttcactttctgcattttttggtgattcggtaatctgagaaattaaagttggatgccggtcctgattctttatattttatggttcaattttctaaaatttccttattttccaggttctttgacaaattgcagcaagatatacctggaa

SEQ ID NO: 7222 - DNA, 3913 bp, Populus trichocarpa
  Intron number 19 from transcript POPTR_0017s13960.2 (locus POPTR_0017s13960) derived from phytozome v7.0 (chr-ID sca ffold_17; pos 14114346 to 14118258 reverse strand)
cgaaggtaagtgatgacactaaaagtgtctgcatgtgaatgctagtcagcttgtgtgtgtacatgttttccatgacatatgcaattgcaagtaggtgcatgaatggttagatatgggtgggtccaagatgggtaaggttactcttaacgtctcacctctttggtcccgttcattttttaaatggtacctatgtccctagctccgctcgttaatattccttttcattgtcatcactcaccaatcaacctaacattacaataatccataatttcatataaaaaacacaaatcccttaaaaactttaatagactacaatgaccttattgctgatatctcgattttcgtattacttactccacaatagttggtattatatgggcaaagcataagtatctagtttttgctcctgcatgcatatgctttataaaatgctaataaaagatatggaagttggggtgaaagttcccagcctaaatattctatatggattggtattttcacttcaatgttactctctcttttttatcttgacatgtttatttcacatataatacttgtatgcaataattcaaacagcttaaagatttgttaaaagtgttcatagaaacttaaaacagctcacttcacccaaaaatctaacatggattattactctattagactagcttttgatctccactcttttcaaccctaagatgaattaaaagataaataattgagaaaaataatactattgactgcatgttacaatatataatgtcaggttactcctttatagatatatgaatttttattaaaaagtaccaataattttttcacctttaaaagtttgtttcacctaagataaacaattcattatataagtctaaagtaaaactacaattaaataattgatctagatactatcctttctatttgttgtgttgtccttttatgtgcaatgattctagtttaagagaaagaaaagacaccacccaaaactgatttcgtgagtcttacaaaaattaattttgcacatgatgacgccccccaccccacgagtgcatctcattttgaagcaacttgtgtctcaaattaaatatcattggttattggttagagaatgttgtgattaatagccgtagtcctctttttatttagtttgtttgtttttttaagaattttatggtttggatgatattattctctatttcttttttgcaattattttgttgcttgttcaattcatttatatggttttacttaaaaggcttaaagttatgaaatgataatttgaatttgatggaaggaggaaacaatcggtctatttgattactaagcaaccataatatgcttgtttatcctataaatcatgataaaagtacaagatactctttttttattggttggagtttttcatagattcatagattaattattttgcacatgtagagaacagaaaaatattgaaaaattgggaagagggtatttttgtgaagataagaagtatgtcttcttagtatagaaacaagaaaaaagagtgttgataaatagaaaaacctttcataacattagaaactcgtgaaacttgagtaatccactgttgtaaaactgaaaatggctttgctgaaaaccatctagtaggtggcctagtgataagagcttaggattaaggggtttgctctccctgtggtttcaagttcgagtcctgtggttgctaatatgatggccactagaggcttacatggttgttaacttcaggacccgtgggattagtcgagatgcgcacaaactggcccggataaaaaaaaaaaaaaaaaaaaagaaaatggcttcgcttaagataattattgttaaagtagcagaatatcgattaaatgaaagttttattaaagttaaagaggacgttaaataatccaattaaaagaaacctttttatatattcctatgttgaggatgtaacatttcaatctccctagccacagaaggtatgatgactttttattgttatcaaattagtattgattttattttattttcattgaattgaattgctctattatttttttacttaaaagatgtcatttaaaaaaaactaattgatacaattatgaagcatgtgccatgcaagttgtataaaagttgtttatgattgtccctttgaccaaaatttaaacttagttgaccaccctgaccctgttcattgaagttttgttaaatatttaccagcttgctttaatcaatttttcatttaactactgccaccaccgaacatttaccactaccattattactaacatttcaatcacttgcccgactatcaacactcctaccttaagaattatgatccaccaaaataccaccactgcccctcaacctcctaccacaatgccaccaccacattatcatactactacaatcacctatagcataaccaccaaatcaccagcacttacctcctccactgtgacttccattttttcttccattgtcactgcctccatcaatacattttgcaatacttgagtttgtaactacttgagtaaccagtgacatcacccacttctcaacacattgtggttgtaccttggaaagattgtgttatgaagtggtgccactaattctttctcatgtaattatagtttgagtattttataaatcttctttgcaccaccacctcctcaaccaacactattgtgctacctacaccatttacaatcaactttaatcgttggtaatggtatttgtggtggtgctggtggagatggaagaggcagtgaagggggttgtggattgcggtggcagagtggtgcagggggggttaagtagttttagcctaatggtcaaacatagtcaaagattgtcaaagctggactaattggttgaaattatgatagtcaacctagtcaagaaaggtctactttgtcaagtcgatgtttggtcaaattggatacatgagtgcaactattgatagaaaatctcaggctgtgtttacttttagaaaattgtgttttatttccatctctagttctcttatatacactaaaatgatttttttttcatggaagattaaggaaacatattcactaaatacaaatcttccaaatttgaaaacaagggccttgtttggcttaaattgaaaatattaaaaggaatgatcataaaatattaggtgaaccaaacaaggtgtttttttatataatagagaattttaaaaacaaccattttgttgtttttcaactttctaaaagaattaaaaaaaacacatttttctaacaacatattttccaattagtttatgcttctatttcttagataatttttatgaaaaattgaaaaaatttacataggcacaaccttaatattgcaaatggtaaggggggttattcggtaagaaaacccatctaaaccttataattttgctactataacatgaccatttatataccattatattgtaggtgacccatttataaaaaattattgtatattattgcctatccatttgtgacatgcaccaatttaccctacattgtttagatatggatgacttaactatgtgcaatgagaaagaggatgaaatgaaataaatcttttttgtttgtatcatgccatagaatatgcgatttttgctagcacgggtgaaagtatgtttgttaatgctcgcaagttgcaaacaatattcattcttcgtataattgttaatcctttgaatcttatttccaaatagaactcgaactgttttcattgttgtaattccgtcttattcttgatttatcctttcaactatccatttagttgcttcaactctatgtgatgcatatgttattgctgtttgcttgtacttcacctttgtatcttaccctttgattctagtgtccagtctatctgtctaaagcactttgagaaaattcttgatgtgtatgtctctagg

SEQ ID NO: 7223 - DNA, 1904 bp, Populus trichocarpa
  Intron number 1 from transcript POPTR_0002s15920.1 (locus POPTR_0002s15920) derived from phytozome v7.0 (chr-ID scaf fold_2; pos 11861382 to 11863285 reverse strand)
tgctgaggaatcaaaagctcttgctgttgttgaaagtaagttctttgtccctgactctttatttatttttcaggagaataatgagaaaccaaattaaactcatgttcattttctcttgaaatgatggatgagattaggagtttttagtgaggttggaatggaaatggctgaatttggtagtttttaattttattgattttgtgtttagaagttggtataattaatatgatattgacttgaaaacttcattttcagaaataaatcgatcaatttccgattctgatgtttctttcttcctatggctatgtctggataacgctacatagagtcttcttttttttttcctctttgttttggaatcttatcttctccttctgtgcctctctgtcttggcttttgttttttaagaacaaaaaattgtaagtaaaatttctaaatagacgtggctagcttaacttttagattgaaatagtttttagttttttaaaattaattacgggatctatacaagttgcagggcaaataatttttacttgatatatgtattagaaaataatattaatattttgaaaataatataaatattctggaacttaattaatagcttaaatttttaaattgaaagaattatttaacaggttttttaagggattaaatttcttacaaccttttttttttcctttctgatttaatgtatcaaagacaggactcgccaacgggattgaagctcatggatgcttttgagcttgagtcccaccttttgttaactagtccatcgttaatctcaaaagaaagaaaaggaaaaggaaaactctcatgattgaattgataatttaaaaggagaatcctcttttagagagagctaatcctcggttatccaaagcaatcctagctaatatgattttcgtgtcaaattcgtatcttgattttgaagacttgataaatgcaatacaacctgtatgtactggatactttattggataaacatatttcttttggtggcatgtacctgtaattcaaagacttttaggctgtttgttctctctatctcatgaaattagctgttgttcacaaccttgcaagttgcttgctcaattattttacattttgtgaggataagtccctactaagcacagtggcattacaatagttaactttatttggagaaaaatggtatctcgaataaaaatttagctggaatacagtccctacttggtagatttgcccgtatcttggtatataatgacacccaaaaaggaactaattgggtttgatatactattatccataaatgggtttatgcttttatatggcttgataaaggcatacatgaagtagcatagatcatgcaattccaggctcttgaataggaactccactctcccatgtgaaaattgcaaatagcttagacgaaagttgttgcctgttgtgacccttttgggtatgactttcctcattaatctttttactgttgtcttttggcagaataaatttcttattaaataataattaactcaaaagtgatggtgcctcggctgtaaaacaagctattttatgatgaataatgaatgggatcaatataagtggtattgagcacttcctctataccaattaaggtgttaagaatacatttcatgacttaatgtatcccagggttgatcacgaggtctaaaccctgttgctttgtcaaaaatttctttttttccttgtaatttgattagtgtacattgcttgttcgaactaaaatagggtgttggtgactgaaaattaaaaacaaaattctttctatatgaatcacatcctcaacaacctaattttaccatccatgcaaatctttagctgcttctaattattttctgtttttggcagagacagaacctgctccgaagaaggtttcaggcgga

SEQ ID NO: 7224 - DNA, 4806 bp, Populus trichocarpa
  Intron number 1 from transcript POPTR_0005s06300.1 (locus POPTR_0005s06300) derived from phytozome v7.0 (chr-ID scaf fold_5; pos 4152083 to 4156888 reverse strand)
ctgctaacatcgagggtatttgatgttttatctagtggaatggatattcaaaagaactttcccatcaatgctttatctgaagaagaaacgtgggagttcttcaaaaagatggcaggtgataatttttttttttttcatctatcaataccatatatcactacctagtagacatgcaaacataaaaatattgtagtaaattcaatttagaatgtaaggatgatagccactaactgaaaccaccaactgtagctatcaaccgtaatcaccaattgtagctgttaaccgccttcacactatcaccaataatttatgttcacacttaaaatctaatttttcatactttcaatttgtgtataaatagacattcaagtttatgttattatgtgtggaaaatttaagagagaaacactaaagagaaatagaaggtgtgtttgagagcttaatagtatatatatatatatatatatatatatatatatatatatatatatatatatatatatatatatatatataaacttcttgtttaagaaataaaacagtgtgttttatctcccttgagtgtttaaaagccaccactagtgctctctcccacccacaattaatattagagtcttgctcgaaaaaaacagatgagttttttagatacatccaaattttcaaaattgtcaaaactacattttgatcattctaaagtgtaaggtttttcaatatgaactcagcgatgtaaaaatcactctgattggagcttgcgatgacctacttgcgtcgcctacatatttgcccctatcaaccatgcgcaacccatgcgcccagaggaagaatacaactaagtaacacacgcgccatatttgagccgagccgagtcgcctaaagccgagccataaaccaagcctccaagttgtttagctgaactatgatctgcaccgagccatcaaagctgcactgaagaatattttcagttcaaccctaacaaatcgatcgacatccatatttaattttttgactggttcaacccatttctgatccattgtcaaccaagtcatatcgattccctactatttagaccattctggattcatctgctatgctgttttttttttttttcaaaattcaactcctaaaaagtgatatggtcattcaaagaataaaatgactacataaaatgcataaacactcatctcgaagctgaccaaagacaattattataattggtgtatcagattgaaggtatttttttggctcataagagagtatagagactgtggaatatggttatgatgaaccagattctgaagaagcagaagattatctataagaggcacaaaagcaagtcctcaaagccaatagaaagaaagataacaaagccaaaaccatcatttatcaaggtttcgatgaaggtacattttagatcatcgctttcatagaaacatcaaaataaatatggaaggctctccaagcaaaataaaaaggtgctgacataatcaagaagattcgtctataatctttgcgaggtggatttgaatcattacaaatgaagtcctcagaatctatttctaattatcacacaagaattatggtgatggtcaattagatgagaagaaatggataaaccctcatagatgctcagattactaacttttgagatccctagatccaagatttgattatgttgttgtcgttattgaagagttcaaagaagtggaaacattgacggtggatgagcttataggttccttacaagctcatgaatagaagattgtgaaaagaaatggagataaggcaatagagcatgtcttgcaatcaaaattgtccctcaaataagacaaatatgattaaggagggactttaacaagtggatataccactcgaagaagaggtcaacaaagacaatgaggatttcaactatttcaaggaagaggatcttcgaatacagaatttagaggaagaggtggtagaaacaccagtataggaggtcagggacaataagtatttactccagaggaaaaggaggggatcacaataaccgtgacaagagaaatatccagtgttataattgcaatcaatttgggcactatagcactgaatgtcgaaggaaagcttcattggagctagttttgccaaagaggtcaattggaaggcaaataagccactggagttagtgcacaccgacttgtgtggtcccataaagccaatgctaactagacatattaggtacttctttactttcattgatgattatagcagaaatacatgggtatgttttttgaagaggaaatcagaaatgttaaattattttaaagattttaaagtaattattgagaagcaaagtgggtataacatcagaatcgtgagatttgatcaaggtgaagaatatacatcaaatgactttgaaaccttttgtacataacaaggcatcagacattaaacaacaccaacctatacaccacagctgaatggtgtaatcgagagaaagaatcgaactattcttgatatggcaagaagtcttcttaaagcaaagaagttgcccaaacaatattgggtcgaagctgtatcatatgcagtgtatctactgaatcgttgcctaactagaagtttgcaagttgtcactctagaaaaagcatggagtggtcacaaaccaagtgttactcatcttcgagtcttcggttgtgtggcctatgcaaagatcccaaatgtaagaaggaccaaactaatgataaaagcgagaaatgcatctttgttagatatggtgatagaaggatgggatacaagctttataatcctatcacaaagaaggtgattatgagtagagatgttatctttgaaaaagataaaacttagcaatggaatgatgatcaagaagaagtcaaatggatcagtacagatctgatccttgaagatgaagtggaaataccaacagtacttatagaatgtctaatattaccagtggacgagccacaaactccaatacacagattccatgtattcaacaagagaaacacgccaacactaggatcatcatcaacatcatcgttagcatcctcatcagaagaaccaagaaggttgagaaatctagaagattcatatgatgtcacttaagtcatgaaagatacaactctattttgtttcttcatagatagtgccccacttagtttcaatgaagctgtcgcagaagagaaatggatagaagcaatggatgaaaaaatacattccattaagaagaatgatacctgaaagctgactaatttaccagaaaacaagaaagtaatagatgtcaaatgggtctataagacaaagaagaatgcaaaaggtgaagtacaaagatataaagcaagattagtggcaaaaaactataaacaaagagaagacattgaatatgtataagtatttgctcatatagctcggctagagataatcagactaatgatctcactagctacacaacgtagatggaagatctatcaacttgatgtgaagtcagcatttctgaacagttttctagaagaagagatctatgttgaacaaccacttagatacattgaagccgataatgaaggaaaagtatacaagttgaataaaaccctatatggtttgaagcaagctccacgtgcttggaatactagaattgacaagtattttcaagaaaataaatttgaaaaatgtctatataaacatgcaatgtatgtgtagaaagaagctgatggaagcacactatttgcatgcctatatattgatgacttgatattcactggcaacaatcctatcatgctttaagacttcaagaaaagcatggtacaagagtttaagatgaccgaaatttatctaatgacaaattttcttggcttagaagtgacgcaaaaagaagaagggatttttgtatctcaaaacggttatgccaaagatattcttgaaaagttcaagatgaaaagttgcaattcagtatcaactccagttgaaaatagagtggaattgaggaagaataaagtaggaaatgttaatccaacctattttaaaaagcttagtaggaagcttaaggtatttgacatgtactagactagatatattacacggagtagaacttatcaatagatatatggagacaccagatcagtctcacttgaatgcagtcaagagaattctctgttacatcaaaggaaagataaatgaaggtatgttctatattttaagtaaaaacttcaatcttgttggctactcggataatgattggggtagagacctagatgaaaggaaaagcacaacatgatttgtttttttacgggagatacatctttcacatggtcatctaagaagcaattgattagtaacgttatcaagttgtgaagctgagtatgttgttgtcaactcagttatatgccatttaatatggttaaggaatatactgaagcatttgggatttcctcaagaaaatcctacaaagatttatgttgataattgatcaaagattgcattagcaaagaactcattatgttagaaaataatataaatcatatcttgggacctaacctaacagcttaagctattggattgagatggttctttaacatggtatcagagtgtcttgggacctaacctaataggttacaagtatatgtaagcttcttgtttatgaaataaaataatgtgttttatcttccctgaatgtttctaaaccaccataagtggtttctcccaaaaaaaaaaaaaatctaaaatgtcaatcatttgtattctagtgagtataagcaactgcttccatgcttccatgaaaaagaaaaaagcttacactaacctatattacaacttagc

SEQ ID NO: 7225 - DNA, 835 bp, Populus trichocarpa
  Intron number 7 from transcript POPTR_0005s14820.1 (locus POPTR_0005s14820) derived from phytozome v7.0 (chr-ID scaf fold_5; pos 11748603 to 11749437 reverse strand)
ccctgaagggacctctcgcccctgctcaacaggaggttcttctactgctctatgtttcaatatattatacacagatacatttatataaagagatttttcaagtagttttgaccacaaatattgttaggatttcaaaaagggcttttggagtcttaagaaatgtgaaattctagttcagaaaggatatgtggtaaactggtacttttacaaagcaatcgtgcagatgattggtgaccatgtctatttgactatactatatcacctactattttcaaatggcttgcttattttcagcctactttttaactaagttagcttccatatcttaacctcttccctgctttcacacgtcctagctgccttttgccaaggtatttttttaccctatcaagatttttttgaattattttttccttaatattattatatcaaactgcttgtgtttttgtatgtgtttgtactgaaaatgttgaaaatattagccgaatgcttgagcttagtttggtaagttatatgaatttgtttctgtgttgagttgcaatgagatcccaaattattcatgactgctattctctgtgattgaaatgaatttaaggggttctgattaaagctaagtgcttcagatttaattattcctcataaggttttgattaactcaataatgacttttttgtagatagattgccttgacggacttttcaagttcacatcaaattttaaagagacaatatgcatgctcaacatcttttttgtatagttgttgcataaatggtattgaaaggaagtaatgactccaaactctctcttgtccagcaagtcttggtggaattgacta

SEQ ID NO: 7226 - DNA, 951 bp, Populus trichocarpa
  Intron number 1 from transcript POPTR_0012s13650.1 (locus POPTR_0012s13650) derived from phytozome v7.0 (chr-ID scaf fold_12; pos 13711090 to 13712040)
gagcctttggaagtataataggtaaaaattctgaacctttaattgaatcatatttagttaatggttaagcttcttggataactcttggcaagtgctagtttttgttcctcgctccatagtctgcttgctaaagactcacaaatctcatgcagtgaggtttaaaatctacaaaaatgtgtctgctatttattatgcaactagttacagtcctggagatgactccttaggctcaatataaacaaatagaaaatcaaagttatgcaaattgaaaattacagaatgtgaatggaatggagttgggtactgctggccaagggcctggacttgcaatatttggagtctgcaaatcataactagctccataggatcacaacattcctttgtaaccacacaccataaaatattttccttgtaggaacttgtgatgggttcattttttgtctttctggctctttttgaatggattcaaaaccctccactgtgattaaatagctccaaggcttcagcactatgtgttgggaaaagcatggcaatgaaacatctggcattctcaaatctcattgagtttaaatttgaaacccttttagattatccttgaccttaaaaatgaaagtcttgttctcttcctgaatttttcagtaagaatcaatgttattttcttcctgcaccccagacaagcaattgactggcagaagtctcactgtttcaaactattatctgtataaacttcgtgatttgacctggtgatggattcaactgattgttataatcaacttacttgagtaaaatttctacaggttatcagttgaataaacatattcatctagcttgtggtctctaaattttgctttagttgataatgaaacgactttaacaactggaccacttccagtgttaattaggtttatccttatttatatgaccaaaatagtgaatttctacagactctgc

SEQ ID NO: 7227 - DNA, 948 bp, Populus trichocarpa
  Intron number 1 from transcript POPTR_0013s11050.1 (locus POPTR_0013s11050) derived from phytozome v7.0 (chr-ID scaf fold_13; pos 11710959 to 11711906 reverse strand)
attggccggtgcttttggcggtcttcttctcttcagtcagtctctctctttccctgtcattcatctgaattttcttatcctcttgtttcgttaatgaatataatggcttgtggttctgggctttcttcatttctcttttctgcggttatttgatactgccaccctaattattttgtattgagtcagggttttgtagctaatttacaagtttcgatgtttactttggccttattcttcactgttgttattttagtagttaacccggatttattcgtttgattttacattgaaatttccttttttttcaaggatttgtgagtgacaaatgttatgttttctgaatagaacaatgggggttaaatttattaataatttcctcattgttaaatctgtgggacctatcgattaagaatagcaataaacaaacttgcatttatctaacagagttcgtaaaatataaaaagtgaaagcttcccgtagttaacccggatttattcttttgattttacattgaaatttcctttttttttaggatttgtgagtgacaaaatgttatgttttctgaagagaacaatgggggttaaatttattaataatttcctcattggtaaatctgtgggcctatcgattaagaattgcaataagcaaacttgcatttatctaacagagttcgtaaaatgtaaaaagtgaaagcttcctgtagtactgcgtcttttaagtttcgaggatctgaatggtttagatagcttatttattaggcacctggcattttgtgctcggtgtgaaaacttggtctaatgtatggatagttctactcttgactggttacattatatttttgcccttcagtgagaatcttaaattcatcaatgttttcatatatatatatatttatttatttattttcaaatagggaccccagtgactcgctgggcatctatagctttc

SEQ ID NO: 7228 - DNA, 1580 bp, Populus trichocarpa
  Intron number 8 from transcript POPTR_0011s04290.1 (locus POPTR_0011s04290) derived from phytozome v7.0 (chr-ID scaf fold_11; pos 4302282 to 4303861 reverse strand)
ccttcgtaattttccttggggtatgaattctatctcagctattctctggaattcatttctattaagaaacaaactgaacacgcccctctcactccatctattttaattatctttctgtataatgttatttctttttatttccatagtgttatctttcgtcatacataatctattccatatatatatatatatatatatatatatatatatatatatatatattagcattcaagcaactttgtttgtatatttcattgttgaatcacacatctttgggtgccttttatttgggcatggatctagtaggtagaacaatgttataatcatctaatcactatggatgataaattcagcctttagcgcttgcaaaatgttgaaaccacaggttacacctgtattaggcattcgttgataatgggactggcttattgtgaaagttgtgatcataatcatctctttgtcattcatttttcttatttagtagtcttagtaagaaattatatcaatttagactcaagtatttttggagaatttgtattccttccatggaatgctacatgactgcaagtatataaatatagagtttagctcattttgaagtaaaactatcatcaatcaatgacataaatcacatcaatcatcccttgaacattaactttatattagcttttatcattgtatttttattgtttgcttgattacttttccttaatttacctcttttttgttgctttatttcaatcttctctcttttttgtaactgagcatcaacaactcacatgatctggataatgttgcctatttatggagtctaaaaacttaggaagctttagccacttgtgctttctattaaaacaaagatcctaaggaatatagcataaataactgctgtaatataatgagatattcattttttttttgtattattattaatctcgatgttttcattaatattcaaatttctttgataacacattttattattgatatcaagatatgggacttcattgaccgtgaagaaaatctatatttcttttcaaatgcttagaagataaattcacatcagatttaggtaagtatatgtaaagcaaatttatcaaaatgagaaaaatataaatgaagtaggaaaaaaggatgtgtaatgtgattaactcatctgtgatagtagaatttccaagttcaaattgttatggtaccttttacctccctcccaatttaagggcttaaacaagccaagatatatatgttacggccaatcttgcttacacaatggaaagagctattggttttagtaatgcatggcttgattggtctatgcttacttttgtgacttcttttcaagcaattcttcatgttcctaaaccaactttatttgtatgttgctagagtatgtggctagccacttcctttattccccaaaccttgtttctttaagcttggctaattttattatgttatggatattgattctggaacctacactatatgctccatctttacattatttaagcaatgagttttatttacctttggttatggattgattggttgatttacttggttcagttgtttagtgcgct

SEQ ID NO: 7229 - DNA, 2283 bp, Populus trichocarpa
  Intron number 10 from transcript POPTR_0002s23320.1 (locus POPTR_0002s23320) derived from phytozome v7.0 (chr-ID sca ffold_2; pos 20784916 to 20787198)
attgcggtaagcattaatgttacatattctacacttttgtttttgttgttcaaactcgcactgcattgcttgcttttaggttaaacatggaaactttacatcattgaaaaagactaataagttgtggttatagtgcttaaaaatatttttgatggaaatatgaaaatgtaaagcgttgagaccagatgcaggcaagtctttgtttgtagagccaacataagaagatggagagtttaaaagttcagcagttgtgaatttcttattcaaagtttaggggcacaaaaagtgtcgtaagatttttagaagtagaggtgcaatgtgtgagggtggtcgtttaatccaccgttatttgcgttatacatgaaagggagaaaatatggatgaaatgatacacatagaatcaaagtctggttgaattgagaaacagaactagaagcctaaagtctgttaggctgatgagttctacgagactctgtctatgcctgccctgcttaatagcagtgagtgttaggcagtggagaatcaccatgtctttgtaattggtgtcactaagatgaaaatatgaagtgataaaagaaaagactagataagaatgagtccatttgttaaaattggaggtggccttgatcttgtcaaggaagagttggggaaggactgtttgagatggtttggtcatgttacaacatagcatggaagagtgcttggattgtagttaaatgtccttaagagaaggaaaaaggtagatgtaaaatgacttcacttgaaaaggtgaaaattgattagatgctgtattagcttagaaagtatgtgaccttaaacatgactaaatggagataaaatgtcctgttgatttgagttttagttgaattgagttgagttgtactttgtggagaagaaaaatcttggtattatcattcttgataggcctatcaatatcaaagtaattacaggaattgtaatctgcctatcaaattttgcttaagctgtgagattgaaaaagcaagagtgtactggcttgaacaacagcagcatgcttgagaagctggaattgaaattggaaattaaaattttgatttgggcaaaggaatagcaaataagaatatgatctacagatttttgtttcttctgttgattgatgtatcctgtatactgccgatggtttttttttcttggtgaaaaattattaacagatatttagatgatttaccagagactattctgatcaccttcaaattgtaacaatgtccatttcatgcagtctccagagatctgataatactctagtaacaaatgtgctctctgtgcctcttatgactggtatattaggctgatgtgtagtttctttcaaagtagttactgcagctaggtgttgttgtgtgtgtgtttgcggattaacatcttggtgatgaggtaagtttgtttggtgaattcataagctaatgtttgctactaaggtatctgcccttggaaagcacaaccctttgtattttcttttctgtcacccctacatttgccctccttttcctttcctttcctgtttttgctgttcatctgttttagaactcagttgcagaaattctccattcctctcccttcttttcttcaagttcttcacacagttgtctaaaattcttacgctgcatccatttttctaccatcgcttcctttttcttggagttgccagtgcctaaatgctatggaatgtaagagagactgctgttgccctgtgtctcatattttctcctgctcagctgtttcttttggttaataggtttttgaatttctcatactggtgccttttcagtccataacatgtgaaaggtccatgggcgtacctgtcagtacagcatctaatgtgacttattatagacaagttaagagagtagaaatgaagaccagtgaatacagcacccccctagtcaatacagcatctttgatacccatagacattcattgaagaatcccttctgattctgtaaaaatgctacttgtcaatacagcatcctagatacatgaagacagtcattaaagaagcacttctgattctgtaaaaatattacaaattttatttcagttctgtgccatttgctctttggtcttctatttaaaaaaaaattaaacattgacaaatacatctgcctccacagtagaagtttttggggaactctaatgggacataaatgggtgtgggtttggtagaatttattactgatggaattttgtattaagttatattctctttctttaggttgctcgaggtgacaacagtggcggggaaactat

SEQ ID NO: 7230 - DNA, 1545 bp, Populus trichocarpa
  Intron number 2 from transcript POPTR_0003s05350.1 (locus POPTR_0003s05350) derived from phytozome v7.0 (chr-ID scaf fold_3; pos 6627246 to 6628790)
aagtgaaggtatgatgcaatgtttatattcatttcattttacatgaagcagctttttgtgtgttttggatttttgcagaggttcttgccatcttttgtttaacctattgaattggccaatgatatctgctacttccttctggtatatgtctttagtagcttacaagatgaatataaacatctaggtggtagatacaaaatcaagggttagaaggatatgtatttcattcatgtcataattttctagaggtgagattaaaggtttgtttggccctactgtgcttatacatttatggtataaatcaaactgaatctaaacaaactttgtgggttctgatatacttttccaggcatgattagagggccaaaccacccctattgaacccctctcttgaagacacacccattggtaccaaggttgaaccttttgtggccgacccaagcgtttctctctcctctgccttttccaccaactttctctctcctccctcagctttaatttcaaaatgacagaaaaatgaagtttagtcttgaattataaaaaatgaaaacttcaaggatcaaattgaattttttgggcaaaaacactatagcaacccaaagtgttttttaagtggtgttatagtggaatgaacaataactttgaacagtaaaaactccatgtcttttagtttatagtgtaatgtttagcccataaaaaaaatattaaaatgacttgttattgtacatgcatagccttattgaagcagaactaccctcatatggagcttagctaatctcaataaaacagtgaaattgttggttgtttggttgactatgttatttttgctgagttaaatcataaagcttctgctttacaatatgcagcactttttaattgtcatcaatgatgaagttgatggtagagcagggttttttttaccttatccataaaattaaatgatttgctatctacaatttctcagaatttctatcaacaagcagtttttgctttagttctaaaactataaggagttggttatttttctggttttgtggtggaagactgcagaatgatagttcatgttctgcttctcttgagacttgaaactatatgttgatctacagctgattttgttttttctcttccttttgtagagtaccaatctgcagctacttcatactatgttgtagatctaggggcccaacaaagttatttgtgaacgacaacaattaattagtgatatcgtcattttcctatatcatatgtttggcattttaatctgcgtacctgttttgaccccattcatgccaactggaataagtgtgctggtgggttaaattttatctccacatgaaaccgcatttacttgctgtgagttgaaaacttgttgtcagcattaattaaaacttaaatgcattagtttgctagagataagattttccctgtgggctttgactaagcttgttggtttccattttttttattttttttgttgtttctttcatggtttatgagatgaatctgacatgaagtttggttgctgctggataggcaggtgaattg

SEQ ID NO: 7231 - DNA, 1157 bp, Populus trichocarpa
  Intron number 1 from transcript POPTR_0006s05520.1 (locus POPTR_0006s05520) derived from phytozome v7.0 (chr-ID scaf fold_6; pos 3895273 to 3896429)
aatcaaatacgattgattctatctccccgattagggtaaggttgtctctgattattttttcttgtcttcttctatatttattcatttagttaaggttgctttttaaatttgaaatttgaatttttttttggttcgattttgttagatcggccaaaattatcaaacaggttagtggattttttttatatttgttttattatttatgtctgaatcaaacttgatgagaaattaaatgaaagggaatcctgattaattaatttaaatgaatttttttttgcaaattacggcttctaaatactgaattctgtgtattaattgtgaaactgagtgttttatgtctatctatgcatgttttgtagtgaattttcaatgatttattgactagttagtgttttatgtctatctatgcagtttttacagatattgatcggcttagatgctgttttgggtatctggggtgtcatgttataaggtgaaatgattgtttttgtttaatttttgacgagtaacaattcttcaaagtgatagataggttccattttaggtaatcaggagtacacagaagctgggaaggtttggttttacttggtttgagtcaaaaagagcagcagataatatggctcttggttgggaagttgaggacggggagggtgcgtgttgaatgaaaaattccctcttttatttctcttgcataagaaggcgtggcatgacttttctagctgcttaaactcactttaatgctcatgcatatgaatctcatctcctttctcgactttggctccttcgggtggtgtgggcatgtgacaatttcaggaatagaagttagggtgtaggcactgttgtctttcgtctgtgtggaaacttcaattacttgtgaactagggcgccttgatggtgtaggtaaaagttagctgctctttttgcatgcccttgtttctcctttttagctatttgcttgtgtacttgttattaggaagttggacatcctatctgagtgtttgaaccaaagtatgcatttgcgcagttggtacatgaaggattgtgcttatattctatgaaaattagcatcagtctggcagacaatgaatgggatgttgtgttttcttgtgtgctctggctgtatttcaaggtgattttcctgcaggacttttgagaag

SEQ ID NO: 7232 - DNA, 1554 bp, Populus trichocarpa
  Intron number 5 from transcript POPTR_0001s16120.1 (locus POPTR_0001s16120) derived from phytozome v7.0 (chr-ID scaf fold_1; pos 12942472 to 12944025)
ggagtttgttgcggttgattcccaaactctaggtaaaataaagaagccatttactcttcaccatgaaaaaacttttgcattttgtccaaacatataatatactagtagtgggtcagatggctacagaacctacaaatgaaagacagttctttgatactttgctaaataaagcaaaacaacagatgatggttaaattaggcacttatatgcgagaggtattggtgtgtagtgaaatgaatgataagttcatgcaaccaccaatcaaatgaagccatacttttaacaatctccatcttggcttgaattggatttggataacttcctcgagtttgtttacatgaatttatttcctatatccttttttgacctacactttcttaacttctccacattcattaacatggatacctttcttaccatgttcattaacatggatatctttcttaactttgccatgttcaatctttttcgtggatgggaataacgcttcactgtcttttgcttattgtaagactcaccccaaattccatatctattgtgcttctcatcaacttgtacgaattcttgacaatcgattcttcatttcttcaccaccaaagtatctctactaaattctgtaattccactcttgctcaatacctacaaccatgcaagtcaagttagctaggtgaaatgttttttgtcagtttaatctggtgccagttgatatgacacaattcaagaaaaggtgaagattattgaaaatttgtcttgaattggttataggtgcatgggtttacagaaatcttctcacatccaaaaacctcttatgtgtactatctggtgatgaaagaagactgtctttttttgtttagattttgtagccaactgacccacctctagcatatacatatttctattgtggcagaataataaacgtgagaaggcagtagcagctgtagtttacagtagtgagtactttttaagagtgttttttaggtttttgaaagaaactctattagcgtttttgagactttcttaggtgtagttgaggtttggcattgtaagtgagaagttatttaattgattgtagtaaattgtattagtgaagtttttgtggagcaagcaatatgccaatcttcatgctcaattattttattgtgggttttggcctaatcagttagagaaaccattttgacaagaaaccactgacatttactgatgatattgtattatctgagaatgaaaattgtacaaccctgttcaatgctaggaaacattaaaacctgacccttgcagactaatactcactgaactttcaggaatatcatgagttatgatgtgggagcatataatgtctcattatttgcattatcatgcatgagataattttacttggaggctgcattgaatggcttatgtatgacagtggctattatttttattctaagcatgcaagtatagacaaatatttcaatagaattagaattgggactgaaggttgtagggaaagtagtcattgtgcaattctattttgtgtaatctccagggcagccgcaagggaatctggcatca

SEQ ID NO: 7233 - DNA, 184 bp, Populus trichocarpa
  Intron number 3 from transcript POPTR_0011s12720.1 (locus POPTR_0011s12720) derived from phytozome v7.0 (chr-ID scaf fold_11; pos 15420120 to 15420303 reverse strand)
tatccttgctccaggagagagccttattgcgacgggtaatttactcatgatcattccatttgtttgtgtctcaaggggtgatgtgcttattagctcttggtagtattttgtgttgtttattctgttgattcgaattttatattttgatggatagttttcaagtttgtggagcaaccggagaaca

SEQ ID NO: 7234 - DNA, 1572 bp, Populus trichocarpa
  Intron number 14 from transcript POPTR_0007s14320.1 (locus POPTR_0007s14320) derived from phytozome v7.0 (chr-ID sca ffold_7; pos 14148558 to 14150129)
taacagaaaaagcctctttagctggatcaccccaggtagtttttttattttatctgatgttgatgtaatcacttcttttttatataattttaaatatagtttattttcccaaaatttgcaatctgcctgattgttacattctcttgttatactttgtacttgttgcttccattattttccttgttgtgaaaggatacaagttttagattttattagaccatctattagaccatctacctgcgtgatgctgctgataaattttgaaaggcaatttttttcaattagcactctgagaatatgtttaagctttctaatttaataaatttaaatattattagtgtgattttaggttgttaatatttaatagtgtatgtgtacttttagaaagttttggtataatttatgagtgtgtttgattttttttttaaaaaattctctatgattatgttttgtgtattttagaaaagaaaaaagaatcacataaaaaatcaaatgaatagaatagagagagaagtgtgcaagatacacacttcacgtcatctgcccttaagacagccttgtcacccagacccatttttgcaggtctgtgccttttctactcaattcttcgccaaccaggctttcattatctacaaccttcatgcttaaaaacaccaaacacaataaaaaaaatccacaagcactatttcaacacccaaacatcccctttttaatgtaagattgaacccattgaacaactcaaatatcgagcccaactacaaatgactcgttaaaaaaagaagaagcttatattaattgagtttaaaataataaataataaatgatgaaattgtgatatttgatcaataataaggacaacaaagtatattggttgctagagtaaaacatcctaaaccatatagtattattataattatggtgtttatgtcaaagatttgaagtttccaggccgggttctttcacttcagatactttaattcatgaaaatgtcagtttttgaggtgaaggttctgcagttttgcttctttatttccaagatggtgaaataggtgctcttcctttcaacctatcaaatcctgcatgcatatatagagggcaggttcaaagaacattgtaattgagttctggtatatgacaatgacaccaatacatcttattgattctaattagttaaaaaagaataatatttctgcgtagaattgatgaagattttttttttgtcatttttagtgttcacataattggtttcaacagcctgtttctttttacaattctttgtattcagatagacatgtcactctattaagaatcaagttgtcaaagcatctattctgttctggtgttgtggcagtttctatatgcccactattctttaaaaaaaaaaaacagaaaacttgcaatctatttaatatttcctcgcattgccaggcaggcaccttttgtagggtgataatgtatgcatgttactttgggtgacaattcttctattgcctgtcaaccaaatgcatccagatttctaactttggtatattccttttcaggtgtctagtccattgtccaaaggaactgtga

SEQ ID NO: 7235 - DNA, 839 bp, Populus trichocarpa
  Intron number 1 from transcript POPTR_0006s09300.1 (locus POPTR_0006s09300) derived from phytozome v7.0 (chr-ID scaf fold_6; pos 6832745 to 6833583 reverse strand)
accagttcattgtagttgaaattgattcattgataaaccaatggtaacgttactctcacttggaccaacaatcattgatgaattcactatatatagtagttgagttttagttgaaactaattcctcatctctcaaattgcttccactaaaaaataagcatatttatattgagttctgcggacaccaaaatccaatagagttgggtctttgtctaacagaacccaatagagtttgaccctgactctagcatgatgtaatattattgggctatactatttagcaagattcaatagaattagattatcgtcagatccaatacactaatgtattttctatattttttataatttttttatatttaaaaaatttagtattgatctgctgagaagtgcaaatcaatatgctatggaacacggatcaattatgctattacgtgtgtgtatcaacaaaaaaaaatcaaataaaaaaaaaagaggtagaaaagatgtggcaaaactctttcgttcaaaccacgcatataccaaaaaatattccacccgccgctaaaagtctaaaactgcacaaacccccctaatcatgtgccaaaaattgcgcacactctcattagggttttactctctctgctttctactctagaactagctacacaagggtttctcttcgccaccatcaccaccacgactttcccttttttcacacttgcacaacactcaacacccaacccatctcatgttacaccatcccaaagagcaccaaatctattctatttatttaaatagttaaaacagaatatgaacatggaagctagagttggtgcggttgttgagggagggcagaga

SEQ ID NO: 7236 - DNA, 1032 bp, Populus trichocarpa
  Intron number 2 from transcript POPTR_0001s07510.2 (locus POPTR_0001s07510) derived from phytozome v7.0 (chr-ID scaf fold_1; pos 5640564 to 5641595)
cttagcaaggtaatattttttttggttctacttttgttttctttttttccagcctttaatttgttaatcctatgctgtggttttaatgtttaattgattattttggtagtttttttgttaatgtttaatccatgctatatttatgcttatgttgatgattttgatgacgtcaatgtgaatttcttcggggcttgtatttggtgtttcgggatttttttgtatgaaattttggatgtttttgttcgtggcttttagtgtgcgatcatgtattgcattactggtgtattttgattgttttggtgaacaatatattcgggtaaagactcttatgtggagctgagagattttgtagtttctttgtgagtaaatccggtgtaaaattaataactaccgataactgatctcttgatagtatccgaattatttgtcgtagcttacggtctttaaattttttaataattagaccagttgaatttcgagcatttcatccaacagcgttacaaatttggaaatgaaatctgtggcggttaacctgtaattgacgggtaggtaatggtggttagatgaaaatttgaaatcaaagttgtctaattatcacaacacttaaccacttttaactactaatcacttaaagagttccctaaggggccctgttagccttttccaattaatattttgtagaaactgcatgaagtgtttgcaagcgcattggcttgtgtttatccacatttgttgtcaacatcatttttatgtgttttgttcatgaactgcatgagcagttttggactttatgctttaatgctcctgttatttgctcgacctttaacatttacttccatcaatctgctatcgttacagagtaaaacagccgcagctgggacttcatccacccaggtatttttcatccttgttttttacctttctcctggtagggtcttgttcttgtatattttttattctttttaattaatccctttcttatgtttatgtacaccagcctgtttctacaccacctaccaccacaccaacttc

SEQ ID NO: 7237 - DNA, 1537 bp, Populus trichocarpa
  Intron number 3 from transcript POPTR_0005s11400.2 (locus POPTR_0005s11400) derived from phytozome v7.0 (chr-ID scaf fold_5; pos 8245436 to 8246972)
ggtgaatcatcaagttcaggtactgccagactagataaagcagacagttttcgtgcattatagttttcaggaagcgatatggagtttttgatgtttggagtcttcggtatatttgctgagccacataaatccctgtttctgttttattattagcttatgggtttatggcctttattctattatgggcgaatatttttaatgtgatataggaaattgcccatcctcatatgatgtataatacagagatgtctacaaaataataatttatttctaccttcttaatcatcgatatcattctcttcgcatggagttctgcttgtctcagcaatcttgaactctatatcttgctttagaatttacagcgtttacatgctattatatgaattttgtatatcttgctaaaataaaggggataggtatctttgttcggcctcgatttaagagaattggttgtctttctatagatgtgagacctgagtttttgatagcagacttagtagattaatcaaaatctttctgacctctactaattagtagcttggccagaagcatctcttccatttgttaatgcagggaatagtcttggtaagctctccttgtggatagaaattgtggttatgcaacaaatgcaatagcctggtcattgtcattgcaataatgacctctttgtttggaagtcggtctgtgcaagaaatttgtagtcatgactcatgagtaatgacagtgatgattcgattcatggtgacttgccatttgttgcatgcttcagtttccgtttgcttatcttgctttcttatctatcacatgaaaaccctcaaggtctacggtgttatatatgaaagtcctccagcttccaagttaccataactgtcacgtaaattccaactatctaaaacaccagtgaaagaatgaggtcgatccagaaaccatcgtaccagtaatgtctttccatcataaatattatttcatcaataaataggttactgttcttttcactattgctatattgagggaagacactaggaggaaaagcagaggtttcagacctgttaccatctttccattgataaacatttcccacccttctttactagcatgctctggggcgttgtcgctggtaacaaatggcaagtgtaaggaagtcctctttttctcagtcaatgccatgtatgatgtaatcttgtgtgagttggtatttaccgtttcccagcaggctgtacagattttttgaagatgattgtggattataactacttggttccatatttgtttactcctgctatatatgttcagagcgtggctgttgtcaactaattaacattgattagtgccctactgcacatgtataacttgcattcgaacatgtaaggactggtatagctaggtacaactaacattgtaggctaaattgtcctcattgaagattgataaagacgagagagagagagagagagagagagagaacgtatcacaaacatttcacagaatctaattttgtttttgatgtattgggacaattgttatgtaggtggtagga

SEQ ID NO: 7238 - DNA, 990 bp, Populus trichocarpa
  Intron number 2 from transcript POPTR_0007s10180.1 (locus POPTR_0007s10180) derived from phytozome v7.0 (chr-ID scaf fold_7; pos 9907287 to 9908276 reverse strand)
agaccctacgcttcttcaagcttatattctcaaaggtgctctaattctcttctccctccctccctccctctctctctctcttgtttagattagattagattgcatgagattgctgaagcaattattgcgtcttattttcctttttatcaattttatattaaggaatccaattatctgcttgcatgattgatttttattaccggaaaagaattttgattctgcgtttttgaagggagaaaaacagtgataactggtgttgcttgcttgttagatgtgcaaataattggtttataatgttgtcttctctgtctctcggaattggtaatgcgttttagtgtctttattcatcaggtttgtggatttctggctgagtggtgtaggagtcgctattaaatcatgtcatgaacagtttaatgtgaaaacaaaatttgaatttagttaatgaaaaaattagtgggctatggaagtggtaatggttttccaaattctgagtgaaaacaccagaatgacaattggttcattattgtggaagaaaataggtgtataattagcatttatcagatagaaaataaagagtggatgacacgcaggagtatgaacatcatgtatcgtcttcaaagaataatataatttggaatgtagattctcttttttctctcacatacccctgcttctctttcagaaatgtaaattgatcaaaagttaaaaacttactttgcttgcctgtttgaacaaggaaatcatcattttgttatcacatccttgtttggttgtttggtgtaagtgtgtaacttctgatccatgcgagaatagattggattgtcttaccttattatctttgaagaatgatagaaagtgatataaattggttttgtgactaccaaatttaattgagaaaatattatgcattgggctcatgtgttctattctgatgctagcctcctgctcattgtcatctaggtcgtgcattttcatccctaggaaggaaag

SEQ ID NO: 7239 - DNA, 1848 bp, Populus trichocarpa
  Intron number 1 from transcript POPTR_0004s12420.2 (locus POPTR_0004s12420) derived from phytozome v7.0 (chr-ID scaf fold_4; pos 11518092 to 11519939 reverse strand)
ctctcttaaaattcccttcttcataaactggtaaggtgcgtaccgaacttctttctttctttcttttcctgattggtgttcaaagttgttctttttttttaattatagaattacatcaagcttggattttcatggatcagttgtttattttattttattttacttctttgaatgccaggaatgtttctttaaggataaaaaagaagtgggctttgtttgttttctctcaatctactattagttgttgaattttcttgctccttgttgtttgttgaatctactaaaggttaaagaactaagaatttagagttgtttttttttaatgtttttggggttaacgttagctgaaaattcgttacggtttttgttaggagtggatttagtctggcactgttgaatcgaaggcttaggaagcatttattcgagttttaatttgtgttatatgggtgattttgaggttgagtctgaagggagggtagtatttgatttatttcagattgttggtcagattgttggtctattatttcattctaaatatcatcgtttgaagggattgttctcttggcaaagatgaacaaacataaatgcatggttctgggaaacaaaaaatgtccccacacgccagctcgtgcgcgagtaagcacatatgcgttcaagttaacattcataagcaaacttggatgcaaaatgaggactggtgtggtagaaagttgttgcaattattgaatcagctctctctacattcacatcccttgcagcgctgaagttggtggaagataagaatttgtatttgttagatacactagaaaacaagttttatggttcaatcttcgcaactgcataactgtgatctttgtttgcaagtttgacttaataccttaattggtttcatgatccatcatgcagagattgaaagtatagggctcagttagggtagcaaaaggatgtttgcttgtgcatgaaggtgagttctcagctgttcacatatctaataaatggataacatctagatttgatggtctaagataagaatttttgggataattaacttctctgggtaatggttgatagtttggcattagaatttgcaaatatacatcttgttcagtttattggtatgtgtcatggtcactgtttgttgtacaaacttctgcttctgctttgtgaactgtagctgctagctagctggcattgcatgcagagaatgcaaattgatttaaggatgcagcttgctcaaataacattgaaggttaaccagtgaatgtatttgtctaaatgggaaacaatgaaagagcagcatgtttgctcaagtaatcaatcctgacaatttttatattggcaaacatgcgcttattttttgggtcattttagcctttcttttctagttttcacttgagattacaagagatggtgttctgtttagaagctctgacaccatgaagtcaatttttcatcatcctctttttcattttggattactaaccccttatcctgtttctttctaattagctttctcctttttggagattttagcttattatgatgaaaccatgatattatctgctttgacatacaagattaaaagctagatctctctattatacataatcagattgcagttcaagtagaaaatgtatgccaaactgaagctggcagcctaaattacatgtaatttagtttggttgtcattctgattcttatttttccttccaggtgaaatactcggaaattattagcaagagaagacaatccagtatgaatatatggttaatgtcactccttgtatggttcagcttctacaaccattgaaagtgatgttgtttgcatagtcatttgtcaccaatcaaa

SEQ ID NO: 7240 - DNA, 524 bp, Populus trichocarpa
  Intron number 1 from transcript POPTR_0002s25510.2 (locus POPTR_0002s25510) derived from phytozome v7.0 (chr-ID scaf fold_2; pos 22585901 to 22586424)
agccaccacctattggacccaagagaggaaccaaggtcagttatcaaacgtttccagttcctatacttttgatagctaaaatatgtgtcgaggtatccgggaaccaggactctctctattcttccatgttatatctcaattgctgctgctaaaatcgaattcagaaagccacaaaacattagtgtcagttgaactacaagcacctgtttttctcttattcgcttgaaaaataccaaatttacagtgttagtagcatcataaagaagtctcactgacaaagtacatcaaattgtgaattgctagaatgagttcagtctcaagggctacctccactgaaaacaaccatgcttttggtcttgatcatctaagatgttaaattggggttttgaattcccttctcattgcttagattcggacttagctgtgacaagcaaacagttagttgtaagtaaaaatagtcgttacatttctgatccagtcacactacaggtgaagatactgaggaaggaatcctactggttcaa

SEQ ID NO: 7241 - DNA, 1439 bp, Populus trichocarpa
  Intron number 1 from transcript POPTR_0015s10040.1 (locus POPTR_0015s10040) derived from phytozome v7.0 (chr-ID scaf fold_15; pos 11086165 to 11087603)
gcggagagattaatcctcttggtgagttagttttgtttttgttttttttttctctaggcattcaatgttggagctactagtaattagattccactgtttttgggatatttatatccttctttaattgcattggtagttttgtgtgttgttttttacatgtccgtgtgaattttgtagaatctagttaaatggacgaatattggaggtgtgtagtaaggattagatgtcatgcttgtttatttgaacaatatgttttgacaattgttagtactgggaatgttctgagcaactgatgtaagttataaagatagatcatggagctatacacttggcaagaaaggcagtggttgatttgtctgggatggttttaatttgtgcattctgacttgctttgagagctctgaggtttgatagtgtcttttagtgatggttttgcttgttactgtacaagtccttgattgaatctataaagtttttatgctttacttaaagtttaagccgctgtgatagatactgagtgggttgtcttgcttttgctttttcatagacattgtgtgatctaactagttatgagaaggttgtagtgcatttcatgtgcctttatcttggagtgtttttttttaagtgtttttattttagggtttaatgaccattcagttaaatttcttggtgatttctgtgtttattcctatcagtttctgtatctagtagtaattcttagtagctattttgagtcacttgaaatgaattggaggcacaagcatgaaggataagtgtagactaattccaagcaaatattatgcgatatcttcatctgcaaaaagtttaattctggttggagagatgatcatgcatgaaattctgacattctccatgtaactgatatgtgattttttttttcatgttgatagtacacagtgaatgtaggtctcctctccctccttcactggttcttgcttagttgccttagaactttccttagctttctacccatattatatgcaactatgtgagcaacttctagctcttccatctccttattgtgtcacctgaatttatcctctcgagatgaagaaacaagcatgttttttcttccttatgagaataggtgcttttgtgacttacctgcactgctttcatatgtcactttgaagatgtgggattcatgtttgatggaaaggcactttatgtgggatccagttaattgatgagaatatttctttttatcttcttgattatcttgctcttaaaaaaattgttatgctgttttattgactgcatctgtgccaagtaaaagcaacttcgtttagattttagaatcaatagatggcagttgtctttatttttgaggattcattctaatcaactgagtactgaactccactttcacccttgatctatcagttacatttgctgttcttggtgagaagacgacagta

SEQ ID NO: 7242 - DNA, 3773 bp, Populus trichocarpa
  Intron number 4 from transcript POPTR_0014s17660.1 (locus POPTR_0014s17660) derived from phytozome v7.0 (chr-ID scaf fold_14; pos 13934673 to 13938445)
atcttggactatcatcaaagtgagatttcttcaatctccttttatgtttatctatggagtttcacattatcatttttgagatttcttaaactctgcaattctcctgtcacttgccaaacttttggctttactttaaagcaactataaatctggtcattgtgagtatggcctcgtgcatgtgcttgatgtgttattgttgctgtatgtgatttttgttttttagtctgacttaattttatggagatcaagcaattagattcacattagctggtgcaagtaatcgaaccttttgacaaagcataagcactggatttcgaagaaaaatgaactcctacatgttcacaagttcttaactggataatacatttctaagcttgtttaagtttctgagttttcattgccataaccttgatagcaatcaatcttatccaccatggccaacgagctcaaaaacacaaattaaacgacaaaatattactatgatgcagccaaagccaaggatgttccttaattccttgttttgatatttaattctgtattttctttttttcttttcttttgttctttcattgtttggtaacataccttacttgggaatctttttacaatttaggaaactacagtactccttaattatgagttttctattagttgtagtttccttttcgtattcagtttttgatttgcttcttagtttaagtcaacaagggcttattttgccttaaaatgtagaattattctatgtaattgtaaggattctgaatagattataagtattttggtttgatttaacagttttggccttgcttatcctcttcttttttctctaagcactatttttcttctttgtcttccttttcttcctttttttcttgtttcagtaattggttactattcctaactgcaataaaacccctaatttcttcctagaattcctaattctcaattctcagaacctaggtcaccatgactcctttgtgggatggtaatccaaagttgtcctacatcataacactgaacctacaatgcaattatacatgaaaatttgagttagctatgaatatagcatactgtagtgtcgtgatttgtagcagtaacagtagcatggacattaataaactgctgaaactcccccttatattctgaacaaaataggaaataactttagttttagtattcctttatgcaaataaaaccaaaaggtaataaaaccatagttttcttgggcatgagtggccaactgactatgcatcactccatcaaacaacctaggtttgaatttaaggaggaacaagagtgttcatgactttattggggtgactgaattttcagcttggaggaaattctgcagtggcgacatgcattttgttagtgttgattcgatgattgaagtagtgaacaactagggaaatatgtgtggggtttagtctaagcccaaggatatatgttcagttttggatgaaataaatcaacttgtaactgaaaactcatttgtcaatcttctaataatttgtgaatctaatccataaggattagaaactaactaatgtaggaaaaaattggtttagtgacatacctagggtttgtggtgatgcggtacagattaggggctgttctgaatctaagtttcagaggctgtttaggctgtgttgatgtagatttcttgtggattatgaggaagcatgtggatggatttctaggagtcacacctagaggatagcaaaacctaagattcacacctagggctcttatgagtaacaccgaaggcagattgagtcacttaatcaaaagaaaattgctgaaattttattcagaaacttcaattaataatattgaaagactacatgcttatttatagagttttagtagtccaaatccctaaaggatttagattcctaaataagaaaatactaggtctatgtagaacgggaaaaacctaataaagctaattcctcctaggacttatcaagttgtaactactataagttacagcttggtcccactaaaacagatgccatgtcattaaataatcaagccacatcattaaaaaaacactctctctctcttgcccttcaacagactctttctctccatctctagcttggtcccttcctttccacccttctctgtttcaacaaaccctttctgttgatttaaaagtggtacgcgtgttttgatttgatgcacaaatagtagaaagaaggaatatcaatcaataaattagtataaagtacaaaactttgacgaagaaaaacgagttttgtttagtttagcattttgtttggtataaagtatgaaaaaccaagaattgaaatcaaagctataaactttttagggttttcttgttgattaataaaaggagtgaattaggagttggatttgcaaaggtaaagggagagttacaatcaaaactttttatcttttctgatttttttgttagtttttttaatctcttaatcaagcataattaaataacttgataatttgttttagtgaagtaaaattcagattctaatgggcataaaggaagtttgtattgttttttttcttccctttctctcttttttctgtcttttttgaaagagatggagagaaagagtctgcggaaagagggatagaaagagtatgctgagagagagtgtgtttttttttttaaaaattcttttttttatgaagtgacattattttcaattatttaatgatgtggcatttgttatatggaccaagctataacttttaggatttgactggctgcaacttgagtaccataaaatgtctcctaataaaatactaaatagaaaataaaacctagacttagacaaatttccaaattttctagaaatttcaaaaaatacccttgtcaaaaaaatccactagttctgcttcctttgttgtccgcatcacatggttaggtaggattggagaattatggatttcacaaacaaattagggttagggtttgatgtatgtggaattgggattgattaaggatgtgttttagagtgatttcggatttttacaatttctgagaataagaatccgtatcaagaagaaatatgagaggattaaggagaaaacactgcttaagagaaaagagaagaggaagaaacaaagcaagatgttttagcccttaaactaaatcaactactcataattcctttattcaaagtccgggattgcatagaatatgctccttttctatgtgtaccaaaaatgtagtagccttaatttaaataggaaatagaagtccaagtaggaaaactaagagctcccaattaatattctagttcctaaataaaccaagtttcctaaataatattcgcatgcaacagaaatttctcaacagtctagtcttacaaattgtagaagaattaaaaatgaaaatgatgtaattcattaacttctatgtctttggctgcttcacttacttattatgatcgtaaataaggaaacctgacataaggtccattgtaatataactgaggcccatccctacaaaataaaaatttaccaaatgctaaatctagtgaagcataaattgaagacaatgtccctcagaccaaattgttttcttagctgtatgatctgcatgtcgaactctaatcataagtgtttttaagtgtatactgtatctaaccaaacaatagatatttactaggttgttctgttatggtatatttttgattacttggactgcaaaactatattaagaaattatttttctcacatgcaatgtagtggtatatttgaggtaaactgctcaaaggatatca

SEQ ID NO: 7243 - DNA, 885 bp, Populus trichocarpa
  Intron number 2 from transcript POPTR_0018s03010.1 (locus POPTR_0018s03010) derived from phytozome v7.0 (chr-ID scaf fold_18; pos 2687285 to 2688169)
ttgtgcaaattagtcgcgtcaggtaagaaattctcgttggaaaagtaactctaatgcacagtacaatagtaaagcatagaactatacaatactaacagttgtaataattaaggggtcatttggtatcgagttttttattttttatttttaaaaacataaatagaaaactgtgtcttttcaacataaaaaaatcattaattaattgtcaaaattttcaaaaatcaagtaaaatggttttagaaatttgtgtaaatttttgttggttttgctttttaaaaaaaaaatcaaagcaaacaagttttctgtttctgtttcaaaaatttgtaaatagaaatataaaacagaaaccgtcaatgatatcaaataattcctaagtttttcgtcgcaatggattctttagcataaatgctggcggaatttcttataaatgttgtgatatccaatgtcaaaacctaccttattttccattcaagataaaaaaaaaaaaaaaaatccactacctacgaataataatgaaggcttgagtacaaaatgtatttataatgcatttttctcaaaatatttgtataattctcaaagatttcctctgaaactcaattttatatatatcgtagaaattttcttaattatacgactgacgtataaacaataaattaattgatgtgttttatcatcttattggttcgattacataacaaaaaacttttcttcttttaaatctatgctccttatacatttgaacgagattcaatcctaatttttcattttgtagcagggtgttaacaataagatacagattggaattttagtcatgagtggtatttaagcatagttgtatatatttctctactatgcagaaggtagccaaagttgttcttcttcgac

SEQ ID NO: 7244 - DNA, 982 bp, Populus trichocarpa
  Intron number 1 from transcript POPTR_0004s07420.2 (locus POPTR_0004s07420) derived from phytozome v7.0 (chr-ID scaf fold_4; pos 6120257 to 6121238 reverse strand)
tttcgattgaattttctccatttctctctctacaggtacttgctagcctattttattttaagatttacagctatagttacattaaatggaactcatttcttgatttagtttttttttttaatgcaatttagttgatgtattggttaattgagattttggggcggctgggttttttgttttgtatgatgtgcttggtttgttgggtttttgatgatggtaaagatgcagacttttgaagatttcagctttagagcagtaaatagaattacgggttttcctttttgcttccttttactgattgtttaagcagtgaaaaggattttttgggttcttaataaagctaaagatgccgaagttgaagttcctcaaattctgttttattgaaagtttatagggctctgagtttattgagatttgttatagcagcatcaaaatcgagctcggggtttcatgggcttttctttttatgtcttgttattgattgtgtttggctgattttgttaaatgtattgatttagtagataaaaaaaggtttttttgggttcccaatgaagttaaatttactagttttgaaatttataaaagagttttagagcttaacaatttctcggggtttctctctgatgtatttttattgattgtttacgattaatgttgttaaaaatatgttttaattttgatttcgggtttgttgccttatcaatgaagctaaagaaatgaagctaaagatacagactttgaagttttcattttggtacacattaatagccagcctaaacaggattttgtagcctcttggtttttgtgttctatttcttgttattgattttttatgttccattttgttaacttcatgatgttttttattttgttgcaggaatacgatttgagaaactttgattatatgataattcattgataattatatgttgttgtttcaattgtactaaacacaggagtgcttgcatttgtttagtacatt

SEQ ID NO: 7245 - DNA, 602 bp, Populus trichocarpa
  Intron number 1 from transcript POPTR_0013s11800.1 (locus POPTR_0013s11800) derived from phytozome v7.0 (chr-ID scaf fold_13; pos 12445482 to 12446083)
tttagcttacaatttcctctccaccgataataggagtagcaatgaaggtttgttttgattaccttttgttttgtttggcttctgagaaagtgtgagaaaaatgagaaaaagtgagaacggagagcttatttattgattttggagtgaatcagagcttaatctgattttaattgaattgcatattgtagctagttagttagctaggcgctactcaaaagagagatttagtgcatcgatcatttttattttgttttatcattaaatttgtttgtatggttgctgagaaagtgtgagaaaatgagacaaagtgaaattggaagcacagtgaatattttgtagtaaactgagagctgaatttgatttactgtagttacattgtagttaaaagtttttgagtttagctcaatttattttttaatatagtcttgatgttgctaaattagtaattgaactgtgattagtaaaattgaaaggtggaaaactattattggtgcatacttacatgaagtttatttgagtgttgacggtttttaattgttatttggattctgaataagtgaatcttgttaaggatgtaattatagtaaatgtttttggtgcag

SEQ ID NO: 7246 - DNA, 2029 bp, Populus trichocarpa
  Intron number 1 from transcript POPTR_0012s14960.1 (locus POPTR_0012s14960) derived from phytozome v7.0 (chr-ID scaf fold_12; pos 14651077 to 14653105 reverse strand)
taggatctctgtttctcatagagggtttgcttctggtaaatttcatagttcaaccatattcttttcttggtttcttgatctgttcttaatttttttttaatggtgtcttgtgtatttttctgcatttgataataatggttgttgatgtagatatggatcttatgtatgtgctttaatgaaatgcttgatctttgattactttttggttaaagtttcgattttggcatctggggtgtcttggttttggtgttgatttgaatatattaatatatttttttcttttttgaatgaagagagtaaatcggctggtcagtgaaggaatagagacattgattcctatctttcttttcgttaaaattagattgatgagtttgttgcataagcatgattgctatttgtgttcattgatttagtttcttgtgttaaagagacatgataactaagttgttgtctgataatgatgacagttctttatgtagtaaaaaatgaacatggggcttttttgtttttctgtttttggaactctgaaaagtgaaaataatctgttttcttttgaagcttgtaagttatgatggtggcggtgaggatggtaatggcatagaggttttttgaaataaaattgttacacagtttggggtgtggtgttctaatgcagctgtgatggcaattcctgtcgtcaactctctgttggtggcagcactctttactttcattctttttctgaagcaaagatttctttttgaatttgagttgtagattagaattcaggaatgttgaaaaggcagtattctgcaaacttaacgtaggttcttgtgcacacgagcaagatttatgaaataggtgttgttaattctactaattttaaattttgttaaaataaaaaacaaaataactggaaacggctatatcatccagttgttcaacttcaaagtcagctatttggtttctttatgatctatctccttgagtaagggcctcctgattatatatgaatattgataattggcttcatttatgacatggataaagggaagacaagaaattttggaaattattacccagataatttactgaaataccctgaactgggtgatgcttctattctggaaccattcattttgagtttggagaggactcataagacctgtggttttctgatgactatctttggtttctccatgtcatatatctaccttaaaatcatatgatgaaatttggagggaaaatattgttctttaattgtattattagtgcactagttcttatgttgtatgggtatctatgatagtgttttaaatgttttaacctgcataagcctgactttgaaccttcatgcttgtatgatcaaaagatcattggagacagagcttgcttgggcaatagtcattgttcctcctgaaaccaaggatccctttgcggcatagtgtcctttccatcttttatttgatgtccaatgatgcgcatttctcaagctaactctttaactgataggataattataatctgcagacaaattatcagtccaattttgatgcatttgattgaacttgctgaagggccctgtggttactattccttgtgttttgtgtcataatcttcaaagttgtttacatcatcatcaaaataaaaaagaggaaaaaattgatattgagaaaggttgtaaagatcttctaataggtattaccactgcctgtgtttgtgcatgcagatagcaagcacaagctagcatgtgtcggtgctttctgtgtaaatgtgctcctttaatgggaaaattctgattgcagtcctagaactttcataattgcatcacaaaatggtcctcaatatttttttttctactcagaatgttctttcaaattgatatctagcattcagcatccattcagatttgtttgtctagatattgtgctattttttcaaatgtttttcacttcctagggatttggaggttcatttttatctcctacaccttaagcttcctgacatatgcattttctcaattcacttgcagttgtaaaggacttgaagt

SEQ ID NO: 7247 - DNA, 925 bp, Populus trichocarpa
  Intron number 12 from transcript POPTR_0009s04590.2 (locus POPTR_0009s04590) derived from phytozome v7.0 (chr-ID sca ffold_9; pos 4904081 to 4905005 reverse strand)
cggaagcttgctcagcctgccaaaactgttgagtatgtatatcaacgcagaatcttgatggccaacttgtctatcagacttgagagtttctaaatttctagataagaaatgtccttgcatcagtcattaattcatttttttccttgcgcattttgcttgtggatgtgcattttctataatacatcagtttattgacaccttgtttcttttggattttgtgttagatctgtgttgggcactgttgttttgatgggttatgtgatttcataccaatgttaactaatggctagttcttgtatgaaaatgtgatgattttggctttacattaagacgtgattaaccaatcatatatatatgaatgataaagtggttgtgcaagctttctgttagaaagtaataaaaccatgtctttgagtctcacctaagagcttaagcttttaaataaggccctgatatggtttcatattactgcttaacactgctttcgtagcttggttatattgttattctaataccaatacaactaagctacgaaagaagaactgctcaatctcgctatcagcttttcagaatccttaaattccagtatatggaagaccatgtataggaaaatgcaaaatttggtaaaacacataagcaatgtacttcatttagcacaaagatacattctagatgagcgatcataatattttttttaataatggcatgctactctgattagatcagcatagggtatttaggtcgaacattcaactgcattagatatcgttgttgttgcaacaagagcctcctggttgtttttgttctaaggtctttcaataatctcataaatgtgagaaagtgaagctacactgcttctagtttgattttcttatggtgacatctttttccctatagcttatcatgcatggctattttaatacag

SEQ ID NO: 7248 - DNA, 2423 bp, Populus trichocarpa
  Intron number 2 from transcript POPTR_0001s11590.1 (locus POPTR_0001s11590) derived from phytozome v7.0 (chr-ID scaf fold_1; pos 9006045 to 9008467)
agattgaaagtgtgagttcatgtgtatattgttttttcttcttcttttactgacttttggctaattttttttattatgttccaatctttgtctgattctgctgtgaattttcatttcatttttgttattgcaccatcatttatttgagggagctgcaaagttttcttcattgtttactagaaatgatgtatacataaatgaaaaacaaacttggggttagataatatgagtggatattagttcttacaagtattatttcttagctcaagccccgaccatatgcaggggtctcattatggttgattattttacatggtagctgaagtttagatattagtgtttctagattgttgattcatgattatcaagatagatgatttcttcaaaatttgataaggattctgtttagttaaaatgtttaattagttagctttcttaaataaaaaagagtttttacattgtaaatttaccccatgtaggactacctttcaggctgatgtgcatggtgatactctcatcatggttaattcttagagctctatcattgttcaaaaaaaatttgtttacaaggtaagtcatggtctttagttaagttgccgaaacaaatccgaatcagtgtaatgacataggcctttaaccaaagaccaggtggtgtcttaatgcacttgtatcaagtatctggtattgggagcactatctccttgttgttttcttgacattggacatcctcttgtgaataagagttcagctgacaatgtgtttggatgcatctttcatttttgagctgaagtagtagaaaatcatttttatttctctagctcttatatggacagtcttagggctatttgcagtcattttcataaatggcttgaagtgttgaggaaatttataatatgagaaattaatagaaatggaagaaggaaacatatttttcttttttttccctcataaagatgactaatatcttttgcagtttgaggattgggcctttttgaaggcttagagcacgtgatagatggttgaaatatcaacttccatatatgttataagatgttgagagagtcatttagtagtttattgatttccaagtcttagagaatgtgatacaacgagtttacaaattagttgggggaagaatgtgataggtgactgaaataatgaagttttaggtataatatatgattttgacacacacacacacacaaatgatgctcatttagtagttaattgatcaatatggtataatgtcattacaatattgcattggcggttgtagtgaagatgtttgaatcgataatcatgacccttataatttggaatgggaaactgtggccttcctaatgaagtgtgatctttcgaacctacacccccttttttttgcatgcttctgcctgtcatttctatctttgatgccattgaatgcttgtaaggatttcatcagtgaactctcattttgtctgcatgaagggatgttggtgaactggatttagagaatagaatttggagaactcagcaatggggatgatagtctcaattattgctttagatgctgtatcccatcaaccgctttcttgatagattgaaatagtgtccctgatctgtcaagggccgtgtatttctgtgcttgtgaaccaagttatgtactgatgctatcctagtcagaattttagaataagtgttttgaaagtgaaagcattttcttatttatcttgaaagcattttggtgggtgtttttagggctgatattcctaggcatggagtgcacttctatttcaaatatggttactgttttagttatgctgttttggagaatgatttgcttgacttgcttccctaatttgtaactatgttcttgtttctttttaataactgaatttggttattttcttatttatgcagtttttgagaatggcttgctccccaaatttgtaattacatgatcattatttttttaataatgtttcttgtgttatcttaaaaaataaaaaataaaagtgttcattctgttcttgagaatggcttgctctcaattttgtaattatatgattactttttttttaataatgtttcttatgttatctaaaatgaaaagaaaaactgacagcagcttgcacaagtgaaaccacttgatacttgtgcaacaaaatgaacgttttcatctgttgctttgggtgggagatcatcttgtgaaattgatcgattacccactccaactatgcttgtgtgtttccttttcttttgatggaagagggtgcatgcatctgtgtgtgctttgtgtgtggcatgcctgtttcatgtgtatttttgagtatgttatacaactttccttgaatgaggcaagggatctagatatcagtttgtaaatgagtgtaatttgtttttgtgcaggccccaggtaaccatagctacagcaataatattct

SEQ ID NO: 7249 - DNA, 1315 bp, Populus trichocarpa
  Intron number 3 from transcript POPTR_0011s10160.2 (locus POPTR_0011s10160) derived from phytozome v7.0 (chr-ID scaf fold_11; pos 12659407 to 12660721 reverse strand)
aaagtgacatgtgaagaggtaggatttcgaatttcacatcaaagcaacttgaaaaatctcattaatgtcactgcatcattcaccaacacatgcttattgaaaaaacccaagctattttaaaacttacagtgaacaaggatctaatgttagtcaccaacgcccacttacagtttgcatgctctattcttagtatttgtatagcgctgaggtctttgtagctgtggaatggtaacagacaacaaactctatttggttattgtaatatgcttacagatattcttgtacagcatgcttgatggaaagaatactcaatccggttatcagctttataatctgtattggataaggtcttgtgtcttactgtaactaaaagatcagtttatagaacatatatcatggttgtgctccctaaattagcttcatttggagaatttctaaatgagtatttctagacatatgcaaagatttaaatataaaagcttcatgaaatgtatccaaggattataagttttaattccatttgccctgtttagagttttgcagagccagtccaaggctgaagagagaagggttctaatagatggatgaccaacaggctcgcatattagttagaccttgtcaacctagctgtgagatgaaaattatgattttttgaagcaaactttgattatttggacttgttcattgccctagaatcctatttcccttacgaacagcaactgaatttagctattattcttccaagcagggattgtgaagaaatatttggttgaatgggcttgtgcacgatattgtatgaagatccaatgaaatatgtatcctttctttcttaaaaacctataaacttgtgggaatctgaagagagacatcactttatctgagagtatgtcatagatgagtgagatcttaagccatacatcactacttatctgtcagtatgtcatagatgagtgatagctgaagcctgctttcaatgtaaatcactatgctagagcctattgaccggagatgagcttgaatgtgcacatccaaagtgatgtaatacactactttcactgttaaaataattgctccctaatcagagattaaaaactgaaggaaatatgctaagtaatcactggtactgaccgcgcgatcattggatctcatacttatcacatcaagtagagtagcaaaactgaaatatctattacacactttattgcattttgcattttgcattttgttttttgtttctaatttaatttctctgactttcagttcactgctgctaactgctgctaatttgctgggaaggaaactgttcatcaacact

SEQ ID NO: 7250 - DNA, 1678 bp, Populus trichocarpa
  Intron number 1 from transcript POPTR_0001s40660.1 (locus POPTR_0001s40660) derived from phytozome v7.0 (chr-ID scaf fold_1; pos 40243844 to 40245521 reverse strand)
tggttccatcatcttcaccgcaagaaacgaacaaggttccttttttctttctctctcatttatttatttatttctgaagaagaagatgtatctgcacgttttttttttttttttttttaatttttggtttatgatttgtttgtttttttaacatttaatattttctgcttgtttgttgagcgtgaaggataaatggtgcttaaatttatgtatgcatgtttcaatggatgatatgccttgatataagacatttttgggctctcttcctttgcacaagaatcttaggattcatgatgaatttttctttctcaccctttccgcttaggaaaagagacgaaagtttaggatttggaattgttttttttcccataactgaaattatcgttgcatctttgtgttgaatttggttccttttgagattggaaaaatgattttgggccttgttttgaaatgtcattaaaatttacgtttgcattttagagtatgatgatagaagattccctagagtatgatgccaatcactatataaaccgtagtcctggtttaacaagtatgatctgcgactctatgaagcgaaatgatgtctattaggtctggatggggaactgtagccaagttaatattagcggtctagaggctttctcctcaacatgacttgcaaaaggtagccaattacgcttaacaactcccattttaacttgtgctaataagaaataaaaggcatgttctccaatggcaaaggttgaattatctgtgaatctatagaatattgatggatagtggttttctcttaattcaactgcctaattagctaggaatggttgcagtattcatagctacaaaaaataaatcaatctatatgtgcgtgcaagcgatcttgttgtcaatatggttattatttttatgcaatagatgtggatgagtgctagatttgttttgttcaatagaggaggctatgtttaacttgatgggtggaatctgatgtgctgcatcagaggtggtgttctccacatctttagttactgcttatattatgcactctggttctgctctgtgaataagctgtaattgatggaattggttttgcagtttatggctaattggctttgtggatggtctgaccaagatcattcttgttgggtttcatcaacatgcaatattaatggtgtacaacctcaagtctattagtgaatgaacttgttgcatccccctcctctatttagtgatctgttgcttttgagccttgttttccaaaaacttaaactatagtctgagtggtaaattatatttgtttatagttgagcttgttgactggagtggatatcttctttttcttgcccagatttcagtggtgcaacaaactttaattcagtgagatagctcagatgggatgtttaatatctagatgctctctgcttaggggatttatattactggtcatgattatagtcttctaaattgtcactacaattttcataattgtcttcgaattcaaatggttttggaaattgtggaacaagctggatatggataaaaatgtagattctttgtgatttaaagtttatttgttttaaccttacaaatgtccccattactggctgctttattgttctaacaaccttttctttctttctttttctcagttgatttggtgaagccagggacgactgtaatcctc

SEQ ID NO: 7251 - DNA, 875 bp, Populus trichocarpa
  Intron number 6 from transcript POPTR_0002s16230.1 (locus POPTR_0002s16230) derived from phytozome v7.0 (chr-ID scaf fold_2; pos 12138292 to 12139166)
gggcttggaaagactgtgcaggtaagtttcttgctcaagcttcttttttatggaagcttaagcctttaaccacatcctttttgaaaaatgaaaaatttgaaaacatatatggatcctttgttcttggaaaaactattaacaagttcacttctcacaagcaacagaccaataaggtctatcgaattttttgttgatcaataagttcaactataaatttattttaaaggattttatttctttatatactcttaaagtaccctatgaaacttttcattaccaattgaaaatcctagaaattttctttacgaggataaaaatctaataaattaaaagatgaatctgttgtgtcaatgattaaaaacatataaattaaataatatcaaagtatgtatcctatgaaaaagttcacttttaaataacaggaagtatttaacaaccctggaactttaactgattatgtacaaaggaacttattgccataacaatctaactctaaaagcctgtttttaatataagaaaaggagtaactagataaaattgcaggttttaacctaaattatagaagttgagaaaattaactgtgaaaccctaaaagctaatgttatacatgtcaagaaaagaagaatgatgcatgtacccattttttctttttagcaaacttgcatgtgaatgtgggagtaattcttatatatgaggtggtagttgtataatgaacttattggtcttttgcttaagaaaagtgaacgtattggcacatttccttcagctcttttggccgcttggtagtcaactagaaaaatttatagatgacatagtgaacattttttcttaatgtggactggctattctttgataattttgctcctatgcaggtg

SEQ ID NO: 7252 - DNA, 5000 bp, Populus trichocarpa
  Intron number 2 from transcript POPTR_0001s06840.1 (locus POPTR_0001s06840) derived from phytozome v7.0 (chr-ID scaf fold_1; pos 5226375 to 5231374)
gcccttgaaagtaaaggtatgtttatgctctgttttgtcgtgttttctcttctgggttttcttttttctttttttttctgaattttgattttttttttatctattttgagtgttagttcaattatatgtgcgtttgtgtaatcttatttttttgatgcaataatattttttgattgattctctataatgggttttgtttataatggaggattgaatggtaaagatggagacttgggggttttttcagtgttggttactttgtgatcatcactgctgtgtagtttagctttgaggcataacaaggttggtgaatgtgttgtggtgttgctgagggatgtggttggagtttgagggttcagtttttgatttggttgctggtggagtgattgctacctgaatgtttagaaattctagtagagtggaggatatgtgattttatgctttggggagatttggatgtcagtgaggaattgtgtgaaattgcaggcgtatgaggaatttgagactcgaattaaacactcgagtggtggtgttctgtgcatttgtgtgacttgaactttgttacttgttgagtggatgcacaatgtaggtttccacatctagagcctaggttcataaaatggtttggtgattgttgaatcgaagagttttgatcctggtcctggcatggtcctgtaccagtttaatcgtgatcctgtcacatgttgctttaggtgtgtacaatcggcgcagagttgcatgtaattttggtataaatgctgccataacaggtgtcttgtgattataactatacagaaaatataaaagattagtgaaactatttgttgttttagccacgaggaatttggttcaatgtgtatttttagagaagaaaacattatgttaatttatcttctccaaaaatacttgtcattctaaagtacttaaaatataaattcttttgatgagatggtctgattgagcaggatcttcaatccccttaataaattgaccttgatgaggattttaaatgacatccaggttggatctaagttttaccatttgttttttgtagaatagcattgaataacatgagattgaaggctcatctttcacaataatcaataacacttgaggacagaactctcataatctattccctccactgatcaccctcactttctaagaatcatcaagaaagtatcaatttacctgatcatggccttctcaaaatccaattctacaactatgcctgcttacttctccttctaatgtcatccaccaactagctaaagtacatccaatttagttcccaactacagaagcatgagcagaatgtgtataccttgcagattttattggctcctaagttaatattttacacaggcacattagtaaactaaaaagcccaaaacccttgacaacaggatatcttgggaattagtgtaatgaacataagtttgttctccttcatgcaacctcattcaaataaaatctattaaaaaccttaatttgttcatccatgacagttttccaataatctcggtaaaacttgccaaacaaggggccttctcttttgccatcttcacaacagtttgtttcacctcttcctttccagccaatttttcatttcatgagagataaataattgagacgacttgagaccttgaagcctatatgtctccatctgctagttggaaaatcacttgtcttgatcttataccagaaagttggatttgaaatctgtgtacctatacaaaatgatttgtttgtaagaaacaacttggccaagcaactagttgtagcatgtctaaaatgtgcactttgtatgtgatttatgtttggtagaagggaaagacctaggtgttttaaattcatataattgtgcttcggtatctagatgcattcttgtggtttgaatgatgagctaattgatgtaataccatttaaaaggagctatttctagatcttgtttttttgttggctagggttaagtaggctttggttatctattatgtggatttttgcttcaggaagtgtgtcataggatgcatcttttacttggaatgctgaagattgtgaagtgttcacttgacgggctataaaattgtatacgaataagagaaaaaaaattctaaactcttcttgtttttggctaaagtagaggggatgtacaaggaaggcttctgaggggaagagttgcttttgacttatttttaggatttaactctgcacttttggtctaaaaagccatttattgaagatgtttctttcattatagatttggcagatcaatttcttgtaaccagagttcttagtttgtggttggatttcattcccttggtgtcctcttgtaaagtttttggttatctcagaagaaaggaaaaggcaagtaaatgctcatgtgatgtgagacattttcttcaatattcttgtcataataatgtttattgtaccatttcattaatggttaagatttttaggttttgaagagcttaagaagagtccaatatgcagttggtaaatcaagcataacttttaatctaaccattggattgagttgaaattttgacagaagattctgaaggcgctgtttccttttgggttaaaatttcatgatgattggagatcgggaaggccttcaaataaggctcggaagttattgtgcgaaattatctttatttaccttgttgtatttggattctttttcctatttagattagaacttttaacttaattagtattctagtatttaataatcataatgctagatggattctattaattagttaagttttaatttagaatccttttcttataaggattctagtttcaaaactagtataaataaggatgtctagtttatttgtgatagaacattcaaattagataaattttcaataaaatatcagagattttctccatttctctacagtgtttatggttataaccttagggcttgggaaccctaatttctatccatgctatgcactgcttaaattcgtatcagagcagattggcctatctgatggatggagatggtaacaaactaccccgcaatgtaggaatggaggtcatctggggcactgtgcgggcacaaaaggcagcacataatcagttagagcaggttgtggtaggactatcgcaaaatgtggcaacactgtctaaagaacaggtcctttagcttatggaaaatgcaaacaaggatcgtgaagaggagagaaattttcctagagacttaccttgaggcatgttgaacacagatatattcctaaattcaatgagattcctttttataatgaaagattttcaaagaaaagatttattaattggttaacagagttagaagcctacttgtatttcaacaagattctttattataaaaaagtatggcttgtagtagacaaattttcttgttgtgccagaaaatggtggtttgaagttctagaatattgaacttgtactggtaagcctttaactccattaatagaaagatttgagatgatcattaattttggagtttatacaagattacgaggagattttatattggatagataagcattatttgctttatgttcaatgtggagtagtttggtgagaaaacaaatctaagttatctaattatgttgaagataacatgaccaaaaaaggtgttgacaaacagtttcagtcttttgaccttaagtttgagaagatagtggctaacaatgatcttttagtcaagaatgaagatctttcaaacaaaaacatagaggacatggtaatttctgacaattctcatattatgaaagattattttgaagtttctttatatacaaagttgaaatattggaagtcttagatgatgaggaggtcaagtttgaggtaagtggacttcataggaacataaaatttaacattaaatattaatttttctttagcatgtacacatcatgaattaaattttgaagttcatgggtcaaatacatgctacttcatgaatatgttggctacaatgccatattcaaagtatttgtttctttggagtggaatagtgcaattattgacagataactcaagggcgagtttttcggaaatagagaggaccgacgtggggaaatttctttaatattcttggcataataatgtttattgtattatttcattaatggttaagatttttaggttttgaggagtttagaaaagtccaagacatggttttctaaatcaagcacaactattaattcgatcgttggatcaaattgaaattttgaaaggagattctaaaagccttgtttcctattgggttaaaatttcatgatgattggagattggaaagtccttcaaataagatccggaagttactgtgcaagattgtctttatttaccctattgtatttggattctttttcttatttagattatgacttttaatttaattagtgttttactatttaggatctattgtagatagattctactagatagatgaattttaatttggaatacttttcctataaggattctaggtctagagctggcataattagggatatctagtttatttttgttagaatattcagactatttgaacttttattaaaatatcagagattttctctttttttctaccatgtttatggttgtaatcttagagcttgagaatcctagctttttttcaacatatacatgttgtgtcatcacatcactagatatgaaggtgcagattatctacaaaggctttgctttagtatgcaaggaatatatgcagttccctatccatgtagcagcatttttttttgtattctttttttcttttttatgtagtccccttttggggccttatttatttgcatatgatgtgccaccttttctttctcgatacattattacttggagcctttcccaggatttacgcacttggcagctcgtgcttgttttactgtttatcaggatagttaaatatggttgatgatatcagattatcaaaattaaattatctcaagtgttctgtttttcatttcttcttaccagaaact

SEQ ID NO: 7253 - DNA, 1828 bp, Populus trichocarpa
  Intron number 7 from transcript POPTR_0022s00850.1 (locus POPTR_0022s00850) derived from phytozome v7.0 (chr-ID scaf fold_22; pos 455418 to 457245)
tcattcatctccacagagattcttcttctctctttgtaagcctcatcatggttttatagattatctttatttaattggctgctcctatctgcattttaatggtatatatttatttagattcatgatgtcataatttataagcatctagggtactagagaactttatatctctagttttcatatttatggttagtgaaaagcccatgtgcctcaacctttatttttatgaataatagacagccaattttgacaaacatcccctatgccattaccttttatttttaaaatgttaaattgccagttctagtgaacacctcaattcagtggtttaaattgtttgaattgtcccatttattctgtcttttgtgatctcctctttgagtcttgcagagtttaatcttgaaataaaaattcaaagagcaattactattcctcatgtgtcagctatgccaagggtgccttacaagtgtgctgaaaaaccatctgatgctagtaatcagaacagattggtggaataccaattctgcttgatcttagattgttttagcatcacagcatttgacttcttagaatgtccaatcattctatctgaacttcatgtttttgtaggtctggggttggatacagaaaaactaggaatacaagggctacttgtgtgatagatatatgggagaaaggaaattgattgacaggacctagcacctcactaggttccctgaacaacgtgcatagaactccttgagatcatgccctggagaagatatgcagatcacaccaaaatactttaatgtcaatacatgaatattcctgcaattttcttcttgaaagcatgtaaatatcagcatccacattaacaagaaatatactgcagatcttgatcatcaagaagtttgaaatttatgtaatctcatataaaaaaatcagtagaatgttatggcttctgaacctggataagttttcataggtgtcgttttttggaagtgcttttcttttattcctattcattatggggttatattagtactttggtgcctatgtaagagcaagtatttagtatttggtgcctgtataaaagcacctatatggtgtttaggagggctgttatcaatgatccatttgagagtattgatttcatgtatctttccttttcatttgcgtttctatttatactctcaactctccttcttaattactcctcttgttctcctatgccaatgttttcaacacccacttgtgagcatctcactttggttccctatgaaaatatatgatttagtaattggaaacatatgattttttcacatttctagaaacattggtaggagatggatctattcacatgttctagtctaattacaccatcctaattagtttaggaggcacaattaataatgtaggaatgacgagaaatatgacatgtttaacttgatatagagaatgagagataaccataatttgtctaaatataaatgtaaatgatgagaaggtttgagaccatatagttgctcaaatcagattttaatccttgtcaaatatttgagaaaaggcttgttagagttttatccaaagtattttttgtatgctgttttattgcaataagtacatgttgctttctccatctctgtcatttatctgcttgacttagttttgatgcatctgctattatattttttcttgtttgatgacttttcaatcatattaccaaaaatgtatgaccatggactttattctgtaaatagtctatatttgctttctagtattgtgcataagcccccctcattttttttcactaggcaatagctacagagatattttgcactgtaacaag

SEQ ID NO: 7254 - DNA, 625 bp, Populus trichocarpa
  Intron number 11 from transcript POPTR_0014s06710.1 (locus POPTR_0014s06710) derived from phytozome v7.0 (chr-ID sca ffold_14; pos 5086352 to 5086976 reverse strand)
cgtataggctgaggaaagaacttgagaacgaaaaggtatatatgaatactctcttttcaattcgtcaaattatctgaatttcaatatgagcacttaaactgtgatgtgcaatgtcctttctgacctcaacacccacacttctaatttctaaatgtctgcttgacagatatgttctacttctcattcttcgctattgtaaattcattcccaattgaaattcttttctgaaagggaatgctggggggggggggggtaacgcttatgtgcagttccatgtgaattcactaataactagtccaatcaaaatcttagaatcaacttctgttgaaactgctgtcaaagatgaattgctttgattttgttatcagcagtaatatgttgttgaggcatgtgagccagagtcttcttgttggactttgtaaattatatattcaattttatcaattccaacgagattgcttaataatgaatactagtgtggttgagttgccaagaattatttgaacaatcatctgacttaaaaatttcctaggcaccttagtgaaatccattgatttttaagctgatattttttttgttgttggtagcaggcggctcgagaagaagcttgggctaaagtttctac

SEQ ID NO: 7255 - DNA, 1370 bp, Populus trichocarpa
  Intron number 6 from transcript POPTR_0009s06990.1 (locus POPTR_0009s06990) derived from phytozome v7.0 (chr-ID scaf fold_9; pos 6651277 to 6652646 reverse strand)
atcaggtttcatatttaattttaattgtgtatttgttgaataagtggaaaatgaatgcctttatagctcatgaccaagttgcatacaatatcaatgaatgattgaaaacatgcaataactgaaagaggatttatagctcttaactgggatgacttgcatgcatgttgaaatcccccaatccataaactacaattagccaatagagtaaggtgacatatgtagttgtttgcatacatagtctggggatgcaattagcaatcccattatacagagtttcattagtcgatctcaacaattacttttactttagctatgtttttagatttaggatttgtaaatgagaatgtaagtaaaaaaaggccacatggttggaacaagctaaagtgttcacctggcagttttttttttatgtgagggtgggtgggtgcttctagtagtgtgagagcgctggagtaatgtttagtataaggtcaagtggtgaaataaaattgaaagtttaggcagggcaagaactaattagcaccatccagaagctctatcatggtttaaattgaaaggttctagtttgtagtggataggtcattgttagaataatctagaatttcgttttgtagcatccttgaccatgataattttgcttgagttgtcaactgtcaacctgcgaaagcaatttctgtctgtaattttgagaactgtcaagccttgtctctgaaccagcccacatgaagttttattttcaaataggagttgctaacttcttactacaaaaacaattaaggatctcattcttgcagaagaataattgcatctgctctagcttgaaaattgggcttaatctggaacattaggggattttagtgggcagataggttagttagtgggataattacattgtttttttaagtttccatgcactggaacccatgcacatggtaaggtcattctttttgctcagtttacttgaaaccataccctctcggtggtgtatgttaaagattctcgtgtgcttgtctttctattctatacaatatgtgaatattctcttgttgtctttaaattttattattcattttggcctgcattccttcactaaaagaatgtaagatcccgttagggtatgaagttcacatactttgcaaactatattttttaagtgaaaaagaacaccaacctttgcatgcatacatctgctatattctctctctatctctgcccctttttttttcccttttttgaaggcactctatccaaagaatacattgaaattctcttcattgcaagctcttttttatacaatacataaatcaatgtccctcatctgtttatatctgtactgatttgcattatatttgcaaacttatagctaggcc

SEQ ID NO: 7256 - DNA, 2468 bp, Populus trichocarpa
  Intron number 3 from transcript POPTR_0009s16410.1 (locus POPTR_0009s16410) derived from phytozome v7.0 (chr-ID scaf fold_9; pos 12472287 to 12474754 reverse strand)
agcgtttgcgtgaacttagagaggagaaagaggatgtatgtataactttttctgctcctaatttgattttgctgcacattgtcattgcttggtcctcattggatataatctcatctcttaattaagccatcactgttttgtcaatgctttccatgctctcaatgactagatttgctgattcgcaaatgctagtagtattgcatctgtttgctgtcatttgaatgtttttctttatgctactatttctatactctgagatgtttctgtagctagttggcaatgaatcatgaataatgcaacttcgtaatatagatagagttcttaaacagtcatgtgagttgctgatggattagtgtgagttggagtttttgcatttgagataatgttggtcatgcgattattctggactacctttaagcttggggttcactctagatctgtgatagcaccaaggaagtaacacatcaagggtctgtatttgtctgcctaaaagaacataaaacaggttttattctaaattagttcaacttatgtttagtctagtgctggattccaacagattttatgatgtagaatatagaagccttgttatagctgttaaaatatctctaggagattagcaggaatgctgcatatcagttgattgggtcaagcttcgatgccttgaggggagagaattttttttttgataatcgagtgttttaatcaaaaggtagtcatttagaagatgacccctgaaaagttgaatgactgtttacaggaaaatgaaatgtctgcgttacaaatgagataagaggaaacataaaaaaacataataggaaagagcaaccaaattagtgatgtgtatttgtccacatctgaatattgtttgcactacgaatgaggggagagatttagaatatatttcctcaacttattggggaattaatcttaggactgcagtcctgtttatgaaagaacattaatgacttgatatttccttcattgtgtttgatacatgtacaacaagaaatttatgaatccaaagttgatcgaactaaccgcacctcactttgtaggtatagacaggaatttggttaaaaatatcataaaactgaaagcattgcattttgattagcatagaacaaggctgctttgttgacccaaacacgaactgcctgtctctactcttggtcgagggaaggtgatttttattacccctcatcattcaggcattgtagatttaaaagatggaccacaaagtggcttaatgcctggtgaggttacatatgcttctatcttagatttcaatgctaaatcaagcaaggttaaggtggttttaagtttgtactagaaacttgtagtttgtgggtggcaaattgaccttgctacattcctagtatagacaaagattgttgaagctagggaatatgatggcattagcaattaggtagttttgctagagatgaaatctctatatttgcagcctaattaggttgtgttcaattcaatttggatgcaatcggccaattagaaagcatttaggttttgttcaataccatgtatgaaatgcaatgaaggttgtagtattcgaagatgctttgattttgtttgccaatcttctttgagaaatctagctcacagtaacttttatatgagaagtgaagaactttgaattgtgcatgggcttttacttgacgtctttgaacaaaagaaatctctctttgtgatttatgggttatgaaatggaccagttagatgtttgactaatttttcattgcctgcgagataaatcaaaccagtggaagtttcagtaatgttttctggagctgggtttttgggttactacgacgatcatgattttgataatagtttgtgtgtgtttggtattgtggtgcatgatgcttttcaaaagtgttttttatttgaaaatgtatcaaaataatttttttatttttgacatcagcacatcaaaatcatcgaaaagcactagaaaaaaacatcaaattgatgttttttcaagtgaaatacacttttgaaacgcacctaaaagcagaagctactacactctcaaatactcattaagactgagattggtttttaaatggtctttcagaaacaaaaaactgaaggttataaacagtttttggtttccttaaaatggaaaaccaaaagtgggtaatggtaccaaacacccccttagttttcattgcttcatgcccagctttgattatttaaggcttagcttagcgtgtggtgtgtgtttcaagacttagtatgctgtgctgtgtttcaagtgcagtcaaatgaatatcaaatgtaaggtataaatgttaatatagttttgaactgatcatatcacttgataaagcttatatgtttgtgctgataagaaacatgctatgctgtttggtgagttgcgaactgagatgtgtatgttttcttgttttaaaggttaccaagaagagtgacttgagtgacttctattt

SEQ ID NO: 7257 - DNA, 1315 bp, Populus trichocarpa
  Intron number 8 from transcript POPTR_0012s10420.1 (locus POPTR_0012s10420) derived from phytozome v7.0 (chr-ID scaf fold_12; pos 11199759 to 11201073)
caagtccccatcaaaggcttctgcaaaagatcaaggtgcagtattttcattctattcttgatgtttaaagtttttggttttaatttgtgattgtctggagcttttgagcaagtgatttactcttttgcattgtggctccttaaccctctcttatgctatttattaattttgcagttatcattgtcaataaaatacagattactttacatctatcaattttttattgattttatagttatcattgttctctaaacatcaactttctttcttctagttgcttttgcactcttcataacagacagaactttattggattcatctcatttttttgtgcacttttttttggtgatcagaaatttgtcaaataggaagtttgagatcagtggaagtttatcactgttggagggcattgaaacatgctaattgaagacaacaatgattttttataggagattaggctaggatagagcaataattatcaagtgacaatagaggttgtgttttaaatgaatatccaagaaatatgtggtgggattgtatttgagatccatagataacatggctgggcagggagtgttaattttgagagaaaaaatattaccttaggttatttgctacctctggtggatggggattaatgtttcctcccatgcttggagtgaaatgttacccatctgatttgttaaatggtttgtcctaccaaacataattagaggtagtttacatgggtaatttttctcccctttcacctccttcataacaccttaaatgtatctatatcaatatgctttttgaagattatacatataataaaaaagccaaggaaaaaaccaggcccaactttgtctttcttaaaagaattgagtgggcaaacttagtggttaagcataaaggacatcttatgttgcagagtttagagaaaggacaaaactatacagcagcaatttttactgagaaatgatgcatgtctactctttcaattgtagagaaaataggatggagtaacagatgttattcggagaaataatacgaagagtgaaatgatgtcattgtgggaggtagcaagatgtggggagagaaagcgactaaattgacattcatggagtgcttgtttctttggaatggagaaagattgtctgtataatagttatctataacatcttccttggatttaatttttgttgtgcttggtaggggtttttgttaagccagaaacaaggctacaatggataatggtccattggcaatttgctgattgtgtgtgtttggcattgtggtagcttttgcggttaaaaaaggtaggtttaaaaaaaaa

SEQ ID NO: 7258 - DNA, 1354 bp, Cucumis sativus
  Intron number 12 from transcript Cucsa.089340.2 (locus Cuc sa.089340) derived from phytozome v7.0 (chr-ID scaffold008 94; pos 692792 to 694145)
cagcctagatattactctatatcgtcttctccaaggtacaaattttgctgtcagatcttatcactgcaaaaactaatgactaggctgaaagtagctctaagtggttggataaaaggcgaaataggttttcctgaagtaccaggcatgctccagagcagccattaggttgttgaaattattctttacatgaagctagcttggtccttaacacattttttgaaatcgagagaaggagggaaaaaaccttgataagcatgttggcattgtaattgtgtatgaaacttttaagattgcatcaagagaaactgggaagaatttgtattcttcacaagttttgatggttgtgttattcatacaaaaacacattgttgatgtgcacaaaaggtcacaataagaaaatgaataatttcatatgattaagttttcggaatgagtgaggtgaaaatgaaaataagtggtatttattggttatcttcctggaatagaaaaaatttgctgccttacatgcccctgcaagcattacagcgtgagttatggataagaggtttgttaattttctacgtagagctctctagactactccatatcatcaatctacaataagcagtgatacctgcatggggactgtttactttttaggtagtacaatacataaaatggattcaaaatgttttggaaacatatataggcttacgagggggaggggaacctcgatcacttgctcatacactgtcgttttgcctatttgctgaaccttcatttttatagagccgggcctcttttgttctcctaaattctgtggatggttgttggaagcctggatgggtactggattaagagggaaagctaggattctttggttttctgcatcttgaaagagagaatcttagtgtttttgaggacctggtgtcttcactacagagtgttcttttggtatagcattcaaattttccttcttggagtgcaaatcacaaggattcattttgtaactatattcattccattatcatttcaaattggtaaaccttcatgtaatagctttcgtgataggttgcccataggctgtcatcttttgagctcttaatgaaattccctgatcagttttcttacaaaaagaaagtaatatatataggcatttgagagcatgaatcatctgtagaaattagatttaactatttctacttaaagatgggcgaaatatatacccatgataaaaagaaaccttatgaagctttgtttactcaacataaatagttaccaagtttagaactatgtttccattttatattagtattttctttcctttcccgtgcatttaatttttattaaacgttctggaaacataattcacagg

SEQ ID NO: 7259 - DNA, 2172 bp, Cucumis sativus
  Intron number 1 from transcript Cucsa.384930.1 (locus Cucs a.384930) derived from phytozome v7.0 (chr-ID scaffold0390 4; pos 359098 to 361269)
gccttctacctgccaggaggttatttaattactcttcttcactattatgtttgctaatcttaatctcattccccttctgctgaatctttataattgtttttaatcattcaaaatcacttcaccgttgtacattaaagtgattaaggaggggtatttcttagtgatgtggtaaaaacaaatggatttaatcattttattatcactctcaaacatgcacttctttgcctacttataatttctcatagttgtttatcatcccctgctgtttttctattgttatttgctgttttgttcctttcagattctgtgtagtttttttgtaggccaaattaaaggaggatgactttaacatttaaaacgattaggaagccgaacccaacaaattattgttgttttcttaaagacaactttctttttaagaattagtgcaaacttaattagtttgttaaataattaaattagcttttcttttaatttatgttagtgggtttattttggggtagtttctcctacgatggaaagagtgccctaataagttagtgaaaatgatggaggagaacttcaaagttagtggcagaagttgctgcattacttgttagttttaacttttccaataagaacttttataccgtttccactctaatgaatatataactcaatcacttgatcctttgtaaaatatttttctcctgtttccactttcgtttactttgtttgttattttttttgttacatttgttccctgtggtgcttgaagtgtaaattcatagttttcagcggaactccttgaataattgattattaactagaaagacattcaaatctcaaactcaaacaccccagtccaaattattgtgcaggaagtaaaaccagattgatttgttttctttgttgaggtctaaatcgatccacaaggcacatgcaagttagactccatctcacttaagttgtttcaatcgatattttgagatgcacttgagttcgattttattaaacacttagagagaacgtttagatcatcaacttgaagttagtggaatgggctattacactagtctaatgctcgagatataatataatagtgtttataactatttataacctaccattaactaccataaatacaaggtaaaaacttttttttttgctactttatttactatttttcatagaatttcttatttttcactcatcctctctcttcctctttgttataatgtgttttctattttttatcccgactaaaatagttaaacaaaaactattatagctagttgttagcttataacatccattaaatataataaccaattcaatataaacatatgtaaacacttataaaggctctgtcgaaaatatgaatgagcatttttatagtgtgcatgcattgcaggtcatgcactcaagtggttgggtttgcaactatgtctccttatctgcctgcacatgtcgagacatgagaggtctatcacttccaccttgaggaagtatataccttaacgttgtgtttgtttggagtatattcaacataggtagtaggattgtaaccttctcactattggagtgatttctaattaatatggcaatcattcaactaggctcaaattaacatagtattagaaagttagtcctaaaacatttttaattggttagaaaggtaaacatcaaagttttgctggattttgacaaaatgaggagcggttgtcccacgtcaaaaaggtttgataaaatgatgagctccgaatatgataaaaacattctatgacttcagtgtcaaatattcttattagaaacggtaacgatcccacaaatcaagatgtgtggggcactttattggtatagatagtgaatttgaaatcagaatctctatgtgttcattcaaatcttccttcgaaactcggatattacataaaccactttaagtttgttcttactctttttagtttaaaagtgaaaaagggtgagttgtacaaaaattttgagaaacagatgtgattgtaaaaaaaattcccatatttctgcatacaagtgggagggtttcccaacagtttttacgtgctgcttataattcgaatggaagagcattattagcgttattcttgacaaggccttaacatggaatgtttttccaaatcagggcattggcagaatattattccaacagtctcccat

SEQ ID NO: 7260 - DNA, 1010 bp, Cucumis sativus
  Intron number 1 from transcript Cucsa.128300.1 (locus Cucs a.128300) derived from phytozome v7.0 (chr-ID scaffold0102 4; pos 330494 to 331503 reverse strand)
ctcttgccggaattgctatcaagtacggcgtcgaggtacttatgcattcttaattgctttactgttcatttgatttttttatttcttgcttgattcaaaaggtttataggcccacctttaaatctgttttcttatatatattgcttgcaacctttatgggagggattttgatcatattctgtggactttaattcaggaagcagtaactaaaattaacagtacttgaaaattgaaatggattgtggcggatttatttgatatatatataaggattaaattaaactttcaaaaagtgtataatagatttataatttgtgtttgataggttttagacaattttaaaaagttttaacaattagttggagtttgaattttatattaaatggaacttgtaattaatataatgttagaaatactttagttggaagggcaaatttgattatacatactcactaagttataaacaaaatgcctttaaacattgtttttgttgaaaatactacattctaacttgcaatgttaatcttttgaatttcaaatcttcccatggaaattatttgaaggaaatgtaatggtaaaaaaatagacctttttttaaaagtcgctttaatttatgccttgaatttgaataaatactccgatttcttatcttctaccaagaattatatattacaaccttatatggaattgttaagaacgaagattaaattggaattttagggagagaaggattgattgaccttgtctaccttggtaaaatttgaaaatttcctttctttttctttaacaagctacaaataaagtaagaatgtttatatcgtgaataaaaacttcaaaaacttggaatttttttcatgtcccatgtgccatagaacaaaggatctagatgagagaagtttattttctgcttctcagtgtaatgttctttacaatctatcatttatgttcgatgcattcattgccactatataattatgtaaatgaattgcaaggtctcggacatcaagaaa

SEQ ID NO: 7261 - DNA, 3240 bp, Cucumis sativus
  Intron number 2 from transcript Cucsa.158930.1 (locus Cucs a.158930) derived from phytozome v7.0 (chr-ID scaffold0114 2; pos 957105 to 960344 reverse strand)
cctgctttcactttcattctcgccatcattttcaggttctattatttagttaccaaaatacccttcttcttcttcttcttcttcttcttcctcacctcttcatctctcctttttctcaagggtcatttttctttctaggggtcaccttgttttaattactttattttttagaaaaaaaaaaagttaaactattcttttaaaagataattaatatagaaaaattatttaaaatcacaaacctaacaaattttacatttatactaactttacatttagcataaatgtaactagtaggactaatttgaaattgtactatattatgtaaatattttagtttatcaaataatattttaagttgtttttcattcataaattttttaaaaggaagttaagttgaattaggtttttgttttcattgaatttttgtgaattttgttttcttttcattttttaaaggtaatttttgaaagaaaaaaaaaagaagagaaaatggtattcttttgaaattcaacttgttttttagtttcaaaatgtggttggttaactaagaataaagcattttgaaaaaaaaaattgatgtgtttgaaaaggcattcaaatatttttcaaaatactttcaaatttattatataatttttatctaagagtttaaatatgctgttttttcttttttctttttttttttggaaaaagatgattttttatttataaatcaaaatatgttcttaatcctttttttaaaaaaaatatttttaaaatcttaccaatctcaaaactaaaatgtcaaattttactttaaaatttttataaatatatattttactaatattcaattttgatgagttgttttgacgtttacttcatttgcacaaaaacttattattttttttaaaaaaatggaattagtttctctttactttttctctataatatatatagtgaatgagtggatcataagattagtggaataaaataatggctttaatttccatatttccaaagtcaaggtagatttataacttcaagagattgatttgattggcaattccctcaagttttcttcaactattttattatttattatattttttagcctacattttttaaaatagaatagaaaatatttaggagaattttaaaaaacggtagactttacaaaatacataccacttatagcaaattctatcacttatagtcattgatatgttatagtgataaaagactattagtgctatagttcaaaattttaaaaattttcatatatttactaactgaaattttgttatattttataaatattttaaaaggttttctcatttactaaaatttcaatttttctactcgtaactccaatatgtattaattcatgtttcttcaccgagataaatttttgtggtgtttatctattaaaaaaacattaattctcatatcaaatttccatccgatatcaatattttcacattttcatatattcaatattgatagtagtatattcacatcttcgttgttatatcgtaaaaaaatttataaatcacaattactaatttaaataattttttaaaatttaaaatttataattctaagatattacgaacacccaaactttttttttttatactctatcaaaaatttcttaaaattgagacattaacatatataactatacttgtaaatttttatcttaaacttattccacattaatattattttcacaaaaagaaaattactaaaattagtaaatgattttttgttaaaacttcttgtgtatattatttaatgataagaatgacttttttttttctttgtcttgttgggtgggctatgtataatgtaagtgtgacaaaagcaaatgtctttttccttaggcttacaattatttacacatccatttttagagcaccacaaaattaaagtaattcatattaaataaaaggcttacttttaaattcatctcactttattaaaacaacctaacatcttcttaaaaaaaaatcaaaatgtagcaagagacattccaacacaaactagtttcacaattttttgtttcattatttctttttattaaacatgcttatttgcttaaaaatgatttttttaaaaatatatatcacaatcaaattgaataaatattttgatttatttggctatatttttaaataatttaatatttgttttagttataaaaagctttcttttattatttttttgggttgatcatacatgcaagtgtgtatcattgtttttattgaatgatacgatgcattgatcaaaattttcacaagaattctcatagtgaatgcgattgtgacaagattcttgcttcttttattgtcaaattatctttttccttttgaaaataaaatgtcaaaatcaaactttaaaaaatccatttaaatttggtgtccttttcttttgtaattaagtgtagaaggagcatgtgtaacacacgtctcctcataactataaaagcttaggtttaacccttatttctcacttcataaataagaaaaaaaatgagagacttcacctttcacctttatcattggattcactcaacccaactccaaactacaaaagcttacatttaagtttaacaaaatttgggtcaagtttgtattgtggttagcttggctcgtacaatacaaattattcaataattttttttaaaaaatagttgcaaatataacaattaaattcaaaataattaaatatattacaacatttattgattaattactgatagaccataagaatctatccgtatagttgataaattttgttatatttataattttgtaaaacattattatatatttaattattattcctaaaattgtcataaattataattactctttcgaatatatatatatatataattgaatctcaaataaaaaaggtattttcttccatccataatatatgtgatagtgaaggaagacatagaatatctaaatcaaagagttcaaattacattaatattaaataatcatggacgataactttgctatcttttataaatgttcgtaaaacatatccatatcttattagtttgattgtaaaagcaagtaagtggttgttaacctaaacaaatatcctaaatgttttaagttacataaatatgtgtggatatatcataatttaaaattgtgatattgtgtgatgttactttgttatccttgaagttgatgaatgcaatttagtgagaaatgtgtgtatgttgatattattaaaattagg

SEQ ID NO: 7262 - DNA, 4476 bp, Cucumis sativus
  Intron number 4 from transcript Cucsa.152580.1 (locus Cucs a.152580) derived from phytozome v7.0 (chr-ID scaffold0112 4; pos 6548 to 11023)
gatcaaagctgtccagacatttccaagtagcagatgtgagtaaccttatctcagataatgaaacctgttagtttcttaggcttatagaattttgttcactctgccgaccaaaatttattatgtttgaaatgaattggatatttcactggatgatagcaggtgggcataccgtgatgggcgtgcctcaactgttgaaaagaccctaaactgttacttatatgatttcaaattattattatttatttatttttgcaaaacattgcaccatgcaagggttttttctttaacctttattattattattttttttcatttttctcttaaggagtttgtatactttgagcataagtttctttttgcctattaaataaagcttttgtttcactaagccttcatttttcaataaactctttgagcatgagtttggcttagtggtattgacatgactttcttacctaaaggttggaggttcaatcccccaccctgatgttgttgaaacttaaaaggtagacttccattttttttgtttgggttaaaatgaaatattagagggtggacatggtaactgagagaaattgaaattagttaattgattctcttctttgcgacttatagaaggatggaacaaacttgcctggcaattggacttttagatctttaaattctgtcgccaacactcaatattatatagtacgttcgttgaactttttagcaatgaagtaaatgcagccttaaactgtgaagtttgtccctaaatattgaaagtttaacttctgctggtgtcttattgatttccatcactgctttgattaaatttcatctatacatggggatggaattgcacctcattatccgtttgaacaatcttaaactctgtttagtaaccattttgtttttgttttttggttttagaaaattaagcctattttatttcaatttcttacaacaatttgcatctttcttaatacaagagtttggcacccggtgtttctcttggtttgttgagcatgcaaaagtaaattggacaatcctttcactcacaacaagaagagataaagagataatatatcaccctgtctgagtcctcctttgaggataaaaaaatctcattgcagtcccattgatcttaatagaaaaactaaaagatgaaacacaatccattataagtgcaacccacgacctagcaaacaccaaacgacccaaaatacattgtaagaacacccattccaacctatcatatgcgttgctcttatcgagcttacaattgccaaccccttccttccattagttttggacatcacataattaatacatttcatatcttacacattatatgagtctacctgggagaaaagaaaggcatcacaaatagacgatactgatcttattaacaagaatgggttgataaccctaagtacattcactcatagcacaatcacattttgtcgtctctacctcaacctctcactctcgagaaggttctactaagtagctgactacccttccttctctcagactttctatttataacctccctaatagtgttccctacccttaattgtttctctcgttcttgcctttatctctcctatgatgttgatgtataactgggggcctaacattactcccactttctaaatccaccttgtcctcaaggtgaagcataggaaattgtcggttaaaatcttcaattatttcccaagtagaatcatgtggaggcagtcttttccaagcaattaatacctcccatcctcctgtgtttggatttttgtggtagccatagacttcttcaagtttggtcacccattcgataggggaggtagtgctggtttcactgtcttatttgatcccaatgcattctttaactgcgagaaaaagcttcttttggtaaggccaagcgatgtgctaccttccccactcttgcttcaatgcagtagggctcgaagtacttaggtgctagcttctcattacatcttgccatcaccgaggtctgtctataaggtcatagtttcaaatacacacaatctcctatttcaaactccaattctcttctttttcaatcagcaaatttcttcatacgttgttgagtcattctcaaatgctccttcaaaattcccaaggttacatttgtctcccccaactgttgatcaagggcggaattggtggtcatttgctctccataagcaattagagttggtggtactcgaccacacagagcttgaaatggagtgatattaatggaagcattataggcagtattatgctagtattctgcctagtgcaaccaaacataccattgtgagaatcttttcccgcaaaagcaacaaaggtaggcttcaaggcttttatttaccacctccgcacttgaccatttgattgtggatggtaagccgtgcttctattcaattgagtccctgatagcttgaataattcatgccacaaatggcttaggacaccttatctctgtcgaaaacaatagattttggatattcgttaagctttactatctccttcacaaaaacattagccatgcctttcgtcgtaaatgggtgtttcaagcccatagaatggctatattgtttcttccattttcggcatcttctaaatctctgctgtgattgccgcggtctctgcattgtttgcctccatcttctcttccaaacgtttctgtaccatttttgatagtcttcctaggttttcggctctgataccaagatgaaaggtatcgcaaatagacaatattgatttattaaaagaatgggttgataaccctaagtacattcactcatagcacaatcacaatcgatcgtctctgccctcaacctaactctcgagaaggttctactgagtaactgactgcccttccctccctcagactttctatttataacctccgttatagtggtccccacccttattcgtttctctcattcttgccttatctctcctatgatattgatgtataactgagtgcctagcggtaaagcactctgcgccacagtctagaaaatcacatttaaaataaccaatttcaatttgtttgcaataactttcgtgataatcttgttagaagcattacataaaccaatggggagataatctgactccacggggattgttaaagattttctttataccatggcattgtgaaatcatggcttatccacaaatctctttaatattttctaaataagccagtagtttcttgttttcaaatggcataaaattgttcattggttcagttttgtgtctcagagagcctgtgttttgacatttgaaacatttggatttatttatttatttttacttttgaagtgtggatataattaaatttaatgttacccgtgtacttaaacttttgggttgatggtttttgtttgatattatggggtttcatttcaaaaccaattggcatgagaggagtgaccctatcttataaggagtgtgagtctccctggattttccaatgtgagacttacatctcaacatgccccctcaagatggtgtctctttaggttcacctatcttagactgaatacccgtttgggtttaatggaccttgataccatatttgatagtatgaggttccatctcaaaatcaattggcatgagagaagtagctcatctatcttataaggagtgcgagtctccttggtttcttcaatgtgggactcacccactcacaacatgtcaacagttttttaacatgattttgagcaagaggtgttgtgctcaaatccttataaagtcattttctcttaaaatattgattgattttcacttgtttgcattctacaaacttcagaccctcaaaatgaagaaaaatgttgaagtgttgatataattaaatttgtcttaacctattgactaatgttcttggattggtagtgatttccgcctctttatctttgtaaacatagatcttttattctgcattgttatacatgttcttttttgacgtgtttatttcttttgatgtcaacttaagagactaggtatttcaaatacaaaggaatactcaataaaatgcatgtgagaagcttgattcaataaatgattaagaggtcatgggtttaatccatgttggccgcctacctagaaattaagtttttacgagttttcttgacatccaaatgttgtagagtagtgtgcgaaacctggctctgacatccacaaaaagattccctggggagtattctcctccaagttaactatggtcaatttgtagagctgaagattaatttatgcatcattttccccctgtgaacttcagaaggaggcttggttttccataattgtattgatgttttgcacgtcaaatcttgaactgttatttcaccgatgctatcaataactctatgctgcttttcagcatttgttttctgttatagcttattttgctgcagtagattgtcgtacccccgctctccacatgttgctgttaagttctaactaattaggtttagtctttgtagg

SEQ ID NO: 7263 - DNA, 1525 bp, Cucumis sativus
  Intron number 5 from transcript Cucsa.086690.1 (locus Cucs a.086690) derived from phytozome v7.0 (chr-ID scaffold0087 3; pos 95685 to 97209)
caataccagagttttgttgatcaaggacgtgtaaggcattcattctacttgttggcttctcaacatgtttcttctctgtttgttgacattttgttgctataaaagaattttttttagtttgcagatcagcatgtgaatgtaaacgttatggaataattaaacctagtacgttaagccacaagtttttactctttatttgctatagaaattagacaatacactagttaggaaagagaatatcaaagaagaggagagcggaccagtaatctaaatcaaccttcaaaattttaaggggattaaattaaaacttccaattggttctaatcaaacaaaggtagagaaaaaatgtattaattcgcagtctaggactctagagaggtgccaacgcatgctcagtagaaatcttttctatctgaaaaaaattccctctttcttactatccaaaatttctacaaaatgtcaaaagtcaaaacatagcacttgtctagatgatttagctttgcatttagggttgggtaaatctcccacaaaatgtaaaacattgaacttgttctagtgaccctggctttcttctttagagtaggattattgatatggaggaggtgctcctccatccccaccttccacaacaaggggcaagccgtgtggcatttgctttcttttacttttatggttgaagagaaacaggaaaaaaaattaagagcttgagaaaacttgggaggagttgtggtcgatgttgggtttagcatctctctttggccattaatgactaagactttttgtaactattctcttgatttggttcttttaagttcactttttttttttgttattattaaaattaaatttactataatctaccaatttaagcttttagattgattagtgacttaatatgatattagaacttttagattttcacttcctctaaaatttttttaaacaagcacagaactttttattgataaaatgaaaagggactaatcttcaaaagatggagattccacacgggagtgaagaagaaaagtgataaaagaggaaaaataacgattcacagttacaatgaaagatacaaggcgttccaaatattacatataacctttgaagagaagccaacaaacgtaacgacctagcttttctaaactaagttgtggtcgttttcaaaagtaaaaacaatgtcaaatcctcaaaaacgatgtttgtaaaacagaagtaaccaaaaaaccattaaaagaaattagttgttcaggccctaagtaaaacaataaaaacaatatgttcataataaaaccatctcagacatggtatagaaaacataagaaaatcatgaaagatagcggaagcaatatcgtagcggtcctcatttggccagtcatgggtatataaaatagggatttgtctatcctaaaaaggcaaacacaacatacagaagaataagttgtttttcttcacgttgctttattggcatttagtatcctgagagaagaatgaaaatgttcccatttttctgatttgcaggtaaaag

SEQ ID NO: 7264 - DNA, 787 bp, Cucumis sativus
  Intron number 1 from transcript Cucsa.142230.1 (locus Cucs a.142230) derived from phytozome v7.0 (chr-ID scaffold0107 9; pos 523352 to 524138)
gtgggtcttgctttatttttcatttcctcaactgggttagtctcgattctcttgtattgattcgttttttgatcatcggatgttgaaaaatctctctgattcttggattttttataatgatgtttgtgggagagagaaaataaaactttatgacccatgtttttgttttcccttttcattgtgagtttatggccttttgctttctatgatatgatgtgggttacggtttcttttgaggggttttttgtattgtgtgtgtagttgcgttttcttggatttagtgatctttcttttgatgggttatgttctcgagctggaaatctaataatgtggttgtgttatgagttctgatgtttttggtttttctttttgttttttttttgttttttgaggttctctgggagtcgatcgcttttcggggttgagtttttattttttgaaatcttttttttggttttgaaggtttcgtttcttgaatgacttgcttattgggcaatcgatcgtttcagatgatgagattgttcttgatgagtttgtgattgttgattaaaggatgttgctatagagtacttgttggtttatttttgtacaatgcgaggctgtcgtttcagtttaaatttgatgtgattgaagatatactgatagtactttgttcttttgtgattgtccggttggctttgacattggaaacatactgtatcattgtattattttatttcttgtgattaaactgttactattctggtatataggtgattaaggggctttcccgtgtacaaaatagaaa

SEQ ID NO: 7265 - DNA, 4711 bp, Cucumis sativus
  Intron number 19 from transcript Cucsa.112010.1 (locus Cuc sa.112010) derived from phytozome v7.0 (chr-ID scaffold009 53; pos 669928 to 674638 reverse strand)
gcaagaacatcgttagggaggtattacaattgaatttcttatggcctctttatttggagtagcattaaaacctaaaccttagggacataaatcatgaactggatatgtggaatcaattttattctgaatgcctaaaggatataatatgatgtttacttatttctctatatagtttccccgatctttggtaaggttccaatccatggattgtaatctgttaggacatattgcatatattgagaattaactaacttcaatatgatccaagtttatggtgcttgggacccctcacttgagaatactactcaagatctatttactcaacaacttccccttcttatatataaccactattgctagtaactgcctgaatatctaattacctttatactcctaaccctatactaatctaggtatctaacattacgctgcccttcaaaacaccttggtcctcaaggtgtgctaacaaacatgatcacaaagttgggcctttttttatttttttatttaccagcaatccccaacagtctggtcttcaatgttgaaaaagaaatcctccccttcagcttcaaaaaactcttggctccaataaggtccattgacttcagcccacaaagcagcccaatgttcttgaattttccttttcccaagcacgtcatagtctaggaagcacaaataccgatacacgacacgacactgacatgtcgacacccatttttaagaaaagtaagacatgacacgttggggacacgtcaatttttgagttaaaaacaattaaatatatgtaatgcatataaacatattacataacaaagattccaattaaaaacatcaaaataacaagtttagagtcataaattataacaagttttagtagagtagtttgttcaacacaacaaaagccaaaaggtagaaaactacaaaactacatactaaaatcaagaacatgttttcattcttctccaatgatctcttgagaatcctaaacttgagcctcaccaccaacatcggtaaaaactatagcttctaattttggttcgtccaaagataaactagccacctcaagcattcccgcatcttcaaatgaattaaatgaatccccagcaatgtcccacatttttgtctctcctttgagatatgataaaagatgtagattgctaaggatgtacaccaagttttctgcacattgcggtgtcatcttgtttcttctcatgaagtgcacaagtgaatatgtactccaatttctctcacaacatgaggaggatgaaggctgaactagtaacttcatagctagtgaatgtaaagttgtagtaaaggcaccatagatggtccaccaactcttggcggcatatcatatctattacatatggattcatggtcagcaaactgttcaaacattgtagagaaattggcaaattcaatgttcactttcttgcgctcatcctctaaactaaaatatttctttaacgcacttcatcctctctctggctacttctacttcttctatgactcatagttaaccctttgcttatcaccaacaccaagtgtttaattttcaacctctactgctctagtgggctaggaccataattaaattgttgtgcccaatgtctatcttgggccagaacacctttaccctccttaaaaacaatcgtgagcttccaacagttcgaccccataataaagcccaaaatcgtactggtgtcggacatatgtatatatatatcataacatcgtttcattcctgagacacatccgacacgtttttcttccctcccatttttggaactcaccacctacttcacctacagaatgatgggcctccaatgttttatttagaataagtggaagcccatttgaactagtaaaacccaagatttgagcgtttgtttcttttgccctaaccctaccctctttcctatcaatttctaccacgtcactggcaccatttccagacattttacgtggtcagcaactacttctcccacctcttcacgcttttcacccctattccaaaccaccttctcgggccactgtagatcgacttttcctgccattatcaacgttgccgaccgctgtaacttagccttgattgccgtaatcgatgcttctgctctcattgacttccccttttaactccttccagtgcagttggcagcgattcgattttccgtactctttgccatcccaatcaatgaacaatcggcgtcgtctttctccatcgcaattaggcattttctgcttctttgagcaacaacattttcttcacttgagtcttcatttcaggcctcacaagcaatcaccgccgaccttcctctatagtttcttatcggtcactcttccccaacatcttaaccttctctgtacagccattgcaaccactttttccacaagattttatcaaccatgctagttttcgcaatttttgcttcctcttgttctgacatatatccgctagtattaggtatttctttataactttcttcctccacccgtgcctggttttctttttcatcgtgtgaacattcttgtttctttatctctccaacttcaataaggtctcaatctctcttcgactacctctcctcttctttgctcatatttttctccttcctcgattcttctccgacttgtccttgctttcttttgttttgttctgatccatctctattttccacaattctttgaccaatattggagtttctcccgattctttgtcatccttctttcctttgcttgactcgtcccctaacgatgatctaaagacgtgatgatcaatcagtaacttcctaatttcatttgttgtgatgtgttatcctccatttgaatgctcaatcgctcaacacacctagccaaggatctcaacttctcctcaatcgctagcagttttagtacattcatacaaattccagcaagttcttgatcaatcccatttagtcgttcttccatccatttttgtatcgtttttccaattctcatccagattgttgctctaataccaatttgttaggatacaggaagtagaatcaatatatttcatatattgaaaattaactaagagctacaatgtgatccaagtttacatcatcttcactgtcttcctcttcatctctcatcatctacctttacacccttccttttcgttggatatgtgggttttgccagatttgtattttagctgtgaatttttgtcttcctttttaccgtgggtttcggtcctcctctttgtcgtgggtttttgtcttcctctcgccagctttgtcctttagatcccaatcttcatcttgttctccataagataacaagaagaccttccaatctaagtttgataattttatttcttttatgtttaatgaagacatatatattttgtttgatgtttaattaaattaaatgtgaataaaataaatctaaaaaaaaaatcaagaaacagttatcaaacatattttttgtttcttttcttttttcaagaaacaagaaacagttatcaaatacgtttatgtttcttgatctaaaaaagaaggaataggaaatcaggaacatggaacatggaacaagaaacaagaaacagggaacaggaacccttagggcccgtttggtaacgttccctgtttcttgtttatgttttcattttttatgaaatagaagtgtttggtaacgttctctgtttctcgttctaaaaaaaagtagaaacatttttcattttataaggaattattgggaacaaaaaagtagtttctctcgtttccgtttttcaattatttctattggtttcttttatcttctcaattatttctattggtttccttttcctttttctcaattctttttattggtttccttttccttttttcaattctttttctatttcattttcgttttccattttcctctcgtgattttctttttcttcctcttatttccatcttcttccccaaataaccactctccacgttgtttcctttttcttcctcttatctccatcgtctttcccaaataaccatctactcttactcttcctctcatcttcactgtctttctttttgcctctcatcgttttcttctacacgatgcctctccctctttgggtgaattgtgtttttgctgtgggttttcgtcgaatttatgggttttttgccagatctatgttttagccatgagtttttgtcttcctctttgccatgggtttcggtcctcctcttcgtcgtggtttttcatcttcctcacgccaactctattcttcagatctcaatctttatctcattctttataagattacaaaaagaccttcctatataggtttgataatttattttttttatgtttagtggaggacatatatttttgtttgatatttaattgaattaaatgtaaataaaataaaaaataaatctcaaagaaaatcaagaaacaagaaacaattatcaaacacaagaaacagaaacagttatccaacacatttccgtttcttgttctaaaaaatgaaggaacaagaaaccgggaacaagaaataggtaacggaaacgttaccaaacaggttaaccgcccaaatatctaatcacctttataaccctaaccctatagtagtctaggtatctaacattatcttgaatgcatagacaatggagtgtacttacacttgtatctcttttaattgtatgtacggtcaataacaggttaacagtgcatatcagtctgggaaaattttctc

SEQ ID NO: 7266 - DNA, 1535 bp, Cucumis sativus
  Intron number 1 from transcript Cucsa.256990.1 (locus Cucs a.256990) derived from phytozome v7.0 (chr-ID scaffold0222 9; pos 4401341 to 4402875)
gcctcgatattcttcacgatccgtggtttaacaaagtaagcctttcgattctcgttcgatttcggtatcatttcttctttgatttgatcctttgtgagatgcggtgcttgacatcgttttttaaccggagttatttgtttttgtttttttgaaatggaatctgtgcgtacttcagtgattttccaagctgataatctgtattttgaattaagatttgaggggttgatcaattatctgtgttgtagttaagtggtgaaaacacttgttcttagaaattgtctaacgaaataatgaagtactactcaaattcgtctataaatctctaagactgtaactcactatatgattattgacaaccgttctgattcttgagcatccgaatgctatccttggattctggatcgagttggggtaattttgtgaagaactaatcatatagagttcagcttccttttattagttgcactaagtaccgagtactgggtctgcacgaaaaagttcgggtatccaggattattagatcaatgttcactgtttataaacttcgaaataatcatatggtttgtgaaaatatgaattgggtattaagttctgcccaattattggctgaagttaaagagcattgtagggtcggatcagattctgtttatttaattttaaattatcggttaatgctctgcattttttttgtttggaatgtgacactattatagtgtttggaatgacactatttttgtttatttaattttaaattatcgggtaatgctctgcattttttttgtttggaatgacactattattgagctttcatgatgaagaaaagagagagatgccataagtgagagtcttacatacgttattttgaatgttaaactgtgtaatgctatttgaaaataatatcataaacaactatccctcggttttttcccaataataactttatcatatggaaagaatccgattcattatttgtaggtatatactggatagagtttttgttcacttttatggatatgaaattggaaaaaaatagtgttgttcccaagtactagatcaattactgtcaaaatccaacttttattactataataaacaactatccctctttcttcccccaacaactttctcatatgaaaagaatgaaatcgtcattttgtacgtattgatatgacgaattttttgttcactttcatggttatgaaatgaaaaaaagtgctatcccaaattctagatgaattctcgtcaactattactattacgtttaatgacttcttcatttcattgaaagaagggaaaggatttactatgaagagtgccttttccttttcaaatggttctcgtatcatatatacttccaacccaaagaagtacaaaactattatggaatttggaaaattgcatgttatgtgatttggagctagtttgatctgtatttcgattcttattttgtttcggtataagtgccgtttatggacccattcttctttatcatcatagtagggaactgcatttacaatcacagaacgtgacaggct

SEQ ID NO: 7267 - DNA, 5229 bp, Cucumis sativus
  Intron number 13 from transcript Cucsa.236070.1 (locus Cuc sa.236070) derived from phytozome v7.0 (chr-ID scaffold020 14; pos 33598 to 38826)
caggtaaaacatatttttttataatattttttgctttatttgattattttacatccttttttgtgtcattgttagaagttgttgatctcttgtttctctccttactaagttactgacaacataatttaacagtggaaggggtggtggtaaacctgatacaaaaagcaagtaaatgacattttcaatcatataatagagcttctcccttggtcatgcttcaaatttttccataccaagtttatcatggaagaacacaatgaacactcaaattaaccgttccgcaaccacccaattcaattaatttagaatgaacgtctacatctaaccaagtgaaaacctgcaccctcctttgctcccttgcaaagacaggggaccttgaataatgataggaacagttaggaatttatgcatagggttgtccattcatcaaccccatggggacttgctactccactaaggcagaaaatcttcttataggctgggaatgggagagggagttgcgaaaatatctttgtgagttaaatgatgacaaggacaagaaatatatcccacattcctgctatcactcttgacctgtttgcgaatttgatgtctgaaccaaatggttgaacgtttgactacataaatggataattagataagtcgataagcaattattttgttttagtaattcttagaaatttctccttaaggtgattcttcatgggatattaacaatttaaattacaattttcagtggaatattaactacacgaggaatgaagagtacctaatccttgcccggatcctccattaaatttaatgaggatagttttagggatggagaatcaaatgggggtctcgctttactcgcttgtgaacatccctattatggatcaccatccaaatcttaaacccttccacctttagaaaagaattccttcttcgaagattataatcacttttgaaccctttcatcccctgggttcaagaagttgagacaaaatggattatgtccaaagggaatctgagataaagaggtgagggaagtggtcgcttcaaacctagcaaaagatggccattagagatcaatgtagcttgtatgcaagtgatgtcatagatctccaattgtaatggaatatcataaaaagggtagataggtgaaagctatagtttttgggagtatagctcatactgcttagctggtgatatgctggagacaggtgaagtgaaggagggatcacttcagtagaggagtagtattatttggtaagataggaaaaaaggaagccagttagttggtcattttgttagggacacttctcgagagtgagagagtagtagttgttcataattacattggtgtttataacttgccttaggatgattatttgttcaatgaagatttccattgagattcctatcagattggtatcagagcaaaatcccctaagaaaattcacataatggtgcaaaagggattagaagaaaatatggaagcattggaacaagaattatcaacaatcagagttgataaaaaaaaactaccagcaattgaaaagattttggcatccaaaagcgattgagtgagcaataagcaacagaagatgctattgacatttgtaggaggagtaactaaaacacgttcgatgacatctgcaataatcgaagaatcatcaagtaaggacgttggagagaatttagaagaattaggttatttgttaacaaatctggtaaaaccagatgtaaatgatgtggtgcaagatcatagtaagtttaagaaggttgaaatgtcgatcttcaacggagttgatccgaattcatggctttttgagtagatagatatttcgaaatacacaaactgatagaactggagaaaacgactgtaccggtgattagttgatgactatagcggtgattgaagaacatcgaaatcttctcgttaaattggttgcactgttaccgaatgaagttttggaggagaccttcatgaatgggcttaagcaatgattcaagtttgaaattggtgttgggaaccaaatgggcttgctcggatgatgaaatcggcccaacaaattgagagtgagacaagacgaaaggaagtgggcctgagtgcgcaaggaggaggtaaggcccaaaacttatttgttaatactaaacctaatgtttcgatagcaataaaagagggaggaatcggtggaaagataaatgaaatcatttcgatgcgaacaatcatgttatgcagggagacagcaatgggaattcaaagagaaggtctgacaaggaggctatctgatgcagaatttcaagctaaaagaaaggaaggtctatggtttggcgaggaggctatctgatgtggaagtgatgattggagatttaattttgaggatagttttcttccactagaactgggaggtgtagacgttatagtgggtatgcaatggccgcagacattgggactcactatggttgattggcgaaacttgtcaatgaacttatgtccaggggaaagaacaatcaaattgaaaggagatccaattttaacaaaagcacgggtgagtctgaaaagtatgatgaaatcgtggactgaaacatatcaaggatatttgatagaacgctattcaatggagatggagagggaaatatcatcggctgagtggtatgggataggggaggtgcactccgtatctcaagctatttctactctactgcatcaattcgaggatgtgtttcagatgcctgaagaattacctccacgaagagagattgaacatcatatccatctgagaatgggaacgaatccggtaaatgttcgcctttatagttatgcttatcatcagaatggagaagttgtagaggaaatgttaactttggaaattatatggccgagcacaagtccttattctagtctggttttgtttgtacataagaaagatggaggagtaaattatagaaccttaaacagtgtgatcatactgataaattccttataccagtagtggagttgtttgatgaattaagggatgctaccatgttttctaagatcgtcttgaagtttggctatcatcagatcagaatgcatcctgaaaatgttgagaagactgcactttggacacacaaaggacactacaatatgatagaaagggtaggaaggggaaagcaatagtttgtgggagtatggctcatgttgctgagctggtaatgtgctggagacagctggagtgaaggaggaccactttagtagatgagtattattattagggaagatagggaaaagggaagtcagttagttggttatgttgttagggactcttctcgggagtgtgagagtagtagtagttcataattccattggtgtttgtaacttccttggagtgattgtttgttcaataaagacttccattgagatttccatcataatgctaactaacaaactttcttttttcccagtaatcttgagtctagtgaagatcgaaatatagtcaaaatgttctttaggttaataaaataattctctattccttaacaaataaagatcgtgttatcatcagaccagtggtaactggcaagagggcaaatttcttccctatccacatgaaaccaatcatcttcctatgactagggaaaccaacctgcttaggacttcaacaagcacaagacagaaaaaagagaaaagagaaaggagataggaggtcctcttgtttaagactcttgaatgcttggagatctgactccaacgtttaccattaaccacaatagcacaattacagttccaaatccaagatttcccaaaccacaattttaacattgcaaaataatcaagaaattattaggggtaacactttccagtttatcaaatttagtaattgagaatttagaaaatcaatcatgggagatgaggaatccatccatgaggatacgtgggtatatctgaattttttttttcatgtttttgtttttgtttcatttgaacagcaaaaatagaccaagtaaatataaaatctagcattgttgagacttaagaggaatattaacagggagacgttttcagttactatgttgaacaatatcaggtaatggttcttttcaccaatttgtccaagatccgtctagccagcaagattatgattccttcgagcacctaacttctctagactgaagaccaccaaggttcttcagctctccttagaactactttctactgcttgggaagtgagggccattaactccagatggccataacatggtcatctcagccaaatgaaatagggtaaagagataaagcacctccaggttaccaaccatatcttgtatgatgaagatagtattgttccaaaggaataagatagcctaaaaggagccctaccaagccaagagaagcaaaaccaatgtctttggagcttcaaaaaagatttgtgataagtcaatcaatatggtgaagcttggttttgtggaagatgaacaagtacgggttgactagatggcatcttcaacatgggcttgtttccgactacgtattgtttctaacggatagaactaagaatcatggggatttgagggtttcccgtattgtgagaggagctcacttctcgttttaattgattgatggctgtaaattgagaaagctcctggatgctctcactctctttcttgggatctcaaccattgaatttatgtcttttgtagatggcctatctgagaaggcaagcatgagataaagattgttatatttattttcttggattaggtcctctgtcacattattctctataagatcaaccaagccaatttcacaagtctgataaggggcttccatgtgttttgcttgttcttaaggttgaatgatttcttctctaaaagaacttccagttgcaccataatttgctggctttatgtttctctgttctaataggtttaaaagaggttgagctgttaaatgttgactcaatatatttaatacaagtgtgtttgatgttaatgggattatcaatgctaattcatttgttagtctttccacgagtgtcttgtatcctgtctctttaaatttttgccttttattctgtgtagttttctcatgagtagtagatatactgagtttggagttcttgtccaattgctttattatgcccttcatttcaagatgagggatttgtttatttttggaaaaattatgtaagtgttcttcattcaccaagttgtcttgctatattatcaggtcagactaaaacgacataggtggtataagaaggt

SEQ ID NO: 7268 - DNA, 1607 bp, Cucumis sativus
  Intron number 2 from transcript Cucsa.249380.1 (locus Cucs a.249380) derived from phytozome v7.0 (chr-ID scaffold0220 9; pos 126826 to 128432)
cctcaggtggcggatctctttggctttttttccaggtttaattctctctttaactcattaactaatttctttgttcttcgttttacaaaagccaattcgtatttggagtaattttggtagtgattaacattaaggttaggattaagagagaatgaactgaagaacaagatgtatccatttcaatttttcttcaatctctctgattctggcttgcaaattaacagcaaacttcaagtagtttaattcgtatgggatttcaagtttacctacttttaactttgttcagttttgtcattacgtgtaagaaattacaatgttactctccaaaaacaacaacatttataataaacgtttcaaataaaaccatctcaattctcaaacaagttgtgatatgaaataattaacaaatttagactaaaccaaaggttcaatgccaactgcttgttaaagaatctagattttgtttttatgttgtcacattcactaagttttcgcaaataattcaaatctacttttaaaatttgttttcaaaatgtgaacccaaatgcaaattctgaaaacattgtttttatgttttctttttcatcataaccatattttgaattttagattttaaaatacaaaattgtattaattagattatataatattacaaaataataaaggaaatagttaaaaatagaacatttaattttttactgattttgttttaacaagtgtaagtagtttgtcaattttattacttttttttttaaaaaaaactccaaataataatctaattaaaaattatataatactaccaaatagtaatcgttattttctttttaatccaaatcaaatagagtaacttaataaaagtttttttgtcaattaaatattagtacaggcgattaccactatcaaatacattttcaacaattatttaaattagaattgaacttttctgatatgatatgaaacacacttaagaaaacatgaagtataactttattttcaatgattctaccgttttcaaattcttttatgttatcatcctatatatctacattctaagctttacttatgttcaaaagtaattatacaacgaggagaaaatatctcaagttttaataatatagaggtgtgtttatttagacaaacaaaaagtttaaagatattaattatttataatttagtcaataaactattaattctattaaataaaacgtgtgtccaacactacttatatcaataattgatatatacttcacgttattaatgttttgaactaaaagaattgttagtatgtcataataagggtcaattttgttaggttgatgatatctaattgttaagttcatgcatgtgaattttggtgttatactctatggagtgaaccatattacagtaaaagtttggataatttttttaaaaaagttaaaattattcaagcaatattgtaaattagttctattagactttttataacatatggtataataatttataaacaattataaacttttgtttatgtcaattttctatagtacgctgtcaaatttacatatatttttaaattaaatttagctaattttgtcaaatgaattcccctattttgatgcaggtcc

SEQ ID NO: 7269 - DNA, 4376 bp, Cucumis sativus
  Intron number 2 from transcript Cucsa.366990.1 (locus Cucs a.366990) derived from phytozome v7.0 (chr-ID scaffold0362 5; pos 442607 to 446982 reverse strand)
ctcacaaaaagggagctgcacgggtaaaagctacactttaccttcattttctataatactagtctaatgcttccttaggtaaaaagaattcctattgcatagacagttgacttgcatctctatgaatttgtgtggaagcaacaaactttgatcagtacttcagtcttttattccctttttccattactggcgatagtgtcttctctattatatatatgggaatttccaatgttgatcatttttgccttttcagataagaagtatttttttctttcttttgttattttgtatagcttactgcttctacttggagttcttagcataggttttttagtaattactccacagactcggtcattttagtttagattggaaggtttttctgcaatcttcttttaagacaaaggatggtttatcactttgtcccctaggttttttgtttgtctttggctctttgaatgagcctctccatttcttatcattaaaaagaagtcatttattgctccatggtggttttaatgactttatgtcttttatcttcttaaacatgaattatcagctctggtgaccgttttatgctaatttgcttctagttcatcagttcttaccttatttcactcttgataaggttcgcgtccaacttatgaatcttgttagttttttagatggtatgtgatacttggaagcatccaacgtatgaatcctattacttcattgtcttgggaggatagcattgagaagaaatttaagggggaggaagtgggtacactttgttatctttctcttttggagccgattgagagtatgctgatttgggatgggagcttaagaaatggaatttagataaaacaggattttcattgttaaatgtgaagctaaagagtcagttgatattccctcttttcctaatttgcttggctttgggaaagcttaaatatagctgaactgagactttccgcagaacatgaaaaagttccaaattagcataggtctaaattcctagtccctagactatcccttttaaaattgtatttgatttctttaagctgaattaaccaaaaacaaggccaacatggcactaactcaactgctcaacacttttcttttttttgaaacccttgcagattaggacaagaagtccttcgtgattagagaaacaccatactaacttttggttctaaccaatggggtgacaagactgaactaccatatggtgagcctaatttggaaattcaagattccaaaaaagctgaaagttctttcatggtcattgccctatagaagtttgaatacccacaagaagcttcaaaggaagtttcaacttccaaaataggatgatctctccttctacgtgtcacctttgcttgaggaggaatcccattatcacatgttcttgcattgtccttctgtggctaaatggtggcagtttttcttcaatgtgttcggggtggattgctggcttccttaattaaatttatgattggcttatggaagtgcccaatggtaggatacttggcagctgtcggcaaggggaaagttctttggagatgtgtgacgccttccctccattaggggcgttggaaggtaaataatagtctggttttaaaggtaagtattcttctttagagtccttctgactaatggttcaacccaagggctcttggtggtgttaagtattcttcttcagaaagaaatgtgagacatttttcactgttgtgttgtgtccgtacggactgcagaagtatgaaaagagagaaatttggactctcctatatattctatcattcatgttaatgatgaactttatttggcatttaatagaagataaaaaggtgaaatagcaggtattgaatatgaaggtctcatctacgtacttgatgatttattagttcatccaccagagtttgctcactaattgaatatgaaaggtctcatctccatacttgttcgtcacctcttgatgatttattagttcatctcatccaccagagttttgcatgcttcaaatggtatctcagggatgctcactgagtctattaatgagatgcgttatggtgattcccttagggtgctttgagtcttctaatccccttggcatttaagagatgaaaatttgttctattgccactcatctccaatgctatactcgaagaaaaaaacatcactctctagtttcctccaatcaatgaggataattctctgaactgaaatcacaaattgtgtcgaagaaaaggtttttagttatttggctccatctctcatgagaacaagagccatcttctgggattactgttgacaagtactttatggagtagattttgatggtgttttcactaaaggagtatttcattcttcaaaggaccgttttacttctgcttctctttctcatcatgttgaaaattcttatggaacttatgatgtgagcttgagcagtgttgatgattacatgtttctctaagggttgctagcttgagtagtatcgatgatacgggtcagtttactatcattatttcaagaaagtgacaaagagactcatttttctatttcttcaccaacgccttagtttctcttattgaggtttgcatctcaagttacatgaaaatacttcattgaattcctagacattccttgttgaggtttgcttgctcttttgatattgaggtttggggtccttgcttggtgataaatttcttgagatggctttggtccaatttacaggtccatttttcaaagtgcagctttctgtagtgagtttggtcttttagtcttcctctttgccattttctttttgttttgtacactcaatattttctgttcttttcggttctctgtagtggatctttctgtcttctgtttagttctcttgtttgcagagtttgtttctctgagaatcagtttcgtttcatttattcaatggagcattttctttttaaaaaatatatattgttagtggttaaaggtacgcttttgctggtgctggtttacataaaaacataatggttggagacagtgtagtagagaaagaggaccagaattgaaaagaatgttagggatggaagagaggaaattaaaagagcgtagtgggaaacaagtggatgtgctacgctaagtcaaagacagttgatggtaggaaaatatcttaaatattagacaatgcttattgagatttgtggctaagcttgagcttggcacttcccattatggcatgaaccgagttctttctctctacacgcatcaaagggcccttggatattctcaaaatctcaagtaccaaaaccttatatccagaataacgtcagcagcggaaactgatttttctacgttggttgggcaattttacaaaggcctttcaattctttattcaaccaaaaatcatcgtctatctaagactgctggagttaatcaactaacacttgaaactttggcataagaagaaacctcacaggagatgaaatgcgtaggcctacagtggtagcctttactagtagcaagaataagaaatctttcgtataatctacagtggtagcctatatttgtaggtaagaaaaggagtaatggagcaaaaatattttgatacctataaataatgattctctttggggagaggaacagtgtcttgaggtgtggagaggtaccctggtgaagtttggtctctggtgaggaccatgaactttcatgtatctctttgggcttcaatatcaaaggctttttgtaaattatgacccagacaacattttacttggttgaaaaccctttctttagtgggtttttgtgggcttgacttttttgtatgtccttgtattctttcttttttttcttttttttttcctccttagttaaagcagttatttctatctaaaacatgttacgtggtctaaatcttcaatcccatcacatcattctacgttcagcctgttaaagtgcaagattaggtatgctgtcaaagaatcctccaaccctaattgctccatcaattcttttcaaccagatagagtccctcctcctccatccctctgattttaaggctaactctctatgctacaacgcttgatagttaatactaggcagttcataggatgtaatatttatctaatgattcttaaaaccaacaattgtttggttgtgacttcttttacgatctgatatcttttattcctgtgctactagctgtaaattgatcacatttcgtcttctgctcatcatgtgattcaggttcactgttttaatatttcactattaacttatgttgccttctctttttcacttgactaatgtattctcaacacatgcaacaagttagccttagcaactacacttacattttgtcgttcttatgattaggttgacattataggagtcggttgctactcctccaa

SEQ ID NO: 7270 - DNA, 2361 bp, Cucumis sativus
  Intron number 1 from transcript Cucsa.002600.1 (locus Cucs a.002600) derived from phytozome v7.0 (chr-ID scaffold0003 3; pos 112692 to 115052 reverse strand)
attgttgttgctccattttgcttcctctcttataggtacttttttattctctctattatattcattgttttctttctaactctatatactttactttccatatattatctcatatttacttttcaatgccctagtttgttgtttcatttttcataaatgttttgttatctatattagtgtttttatcgttgaaatgtcttttgaatatgtgattcggtgctttgaatgatcaagtttcgagtcttactcgaatttcctttttacatgcatattcatgttacgttatctatgattttagtcataagatgtaggcaactggtgttggtagtcaatctgcattttaaactattctctaatagtaaactatgctcagtaccggcatgagtttaattcaactgacacttatatatacctaaagacaagacgtcctatgtttaaatctcccaccctaagttgtattacaatgctttaaaagaaaaactattctcactctgttcttggatgtggttaactcactattagtaaatttgattttttgttttatttataaatatatttatgatagaagtttattgatttataaaatctaaatttgtgttatagtttgtaaatattttaatttattttactatatttaaaaatgtctccttattcttattcttattatttaattcaatctatgcaattacttttaaagactagatttaagatttattaaatttatagagactaaaattggatagttgaaaggatagagatgagcaccattatattgtgacatcgtagattacgatggcgattgtaatttgatgacaacttgttacgatatcagtttgttacgttttgtcacaatgtcatttattaaccgttattgttgtatgctaccatattggtttataattaacatcacatctactataatatgtaactattatattagcaaaatttggaacccgaattatgcatataatcaatatttacaaaacaaataattttccaccattgtttcaattaattttcacaaaaatacatcacaaacttctcaagaacacactttgtcgtatcatttcaatactcatcacttcacaatttaattccaataaagagctaatatacacttcatgttccaaatcttaaagaaaaaaagaaatgaagaaaaagccaaagatattctaccaaaatctaagacctctttaacaatttaacaaaagacaaccctatacaatatgtttcaaaactacacaatgcaactttcaaaagcaaacaaccttcatgtttggaatatctcccatatttcattttttataatcaatatctaatttcatttgtacccaagatcaagtgagttggaaaatttgttataagcgcagcacctaacgtttcactgtataaaattggcacactttttaaaaagtgattcaaatacttttatctccatccatctcgagtatatcaacacaaatttatgttaaatctttattttctaacttatccattcttttggacctttttgatacatcctcccatatttacatttactcgaatttctaaatttttaattgatttaacagcaatcttctcaaatttctccaaattgtgtgtattaattagtagtgtgctttttaaaatttaaaatgatttggaaagataccgaatttttggtgtgtaatatgagatgtacactaagaaaactcaaaagatcgaattagagaaaataattttttaactaaatctggatatcaatcttgctcgaaatagaccaagaataaagtgtttgaagaacttttaaaaaaggtgtgatacttttaacggtgaaacttttgatgcgcacaatttcccaagtgtgttcttacatctaaaacaaagatgggagattcaaggtaagcttttcaagtgctcgaaggtgcctgaaatgcaaatcaacctgttcaagttgaatgagacttcaacaaaaattagccattagaatgtaaaaactctacattaatattcaaagaatccaactaaccaaagaccccaaatggatttcaaagcatacagattcaaacatcctctcctaaaggtacaaaccatcccttaaaacagactacgaaggtacatttgacagtgccaactgaaggaaaaaaaatgaaaataagcatacctgaatctggtagcaacaacaaatggttacattattacaaaacaaacaaaaaccacatctaaagccataattcttgtatggaaagctaagcaacttctaaattattataaccaaaatagaatattttaatcttacttctttcactcttttgaaaagttttaaaaattttatgaaagacactaactattataatgcacagaaaaggaccaagaccgcgc

SEQ ID NO: 7271 - DNA, 3696 bp, Cucumis sativus
  Intron number 3 from transcript Cucsa.112170.1 (locus Cucs a.112170) derived from phytozome v7.0 (chr-ID scaffold0095 3; pos 865173 to 868868)
aaaagaggactacgggggatctttttgcaataaaggttaattttcacattgatgcttaaataatgttcccagcatgttctacctgaggttttggcctcttcttttctgtgcttgtgatgagttcatcatttagtggtatttatgtttcttcttcttctttaggaatttctatgacatctataatcttttttttggaaacggatacaaacctctttattcatgtataaataaaagagattaatgttcaaagtactagagaattatactaagagcgaaaagagcgattgaaacaaaagtacaaatgaacaatacagacaacacaaacgaaaccctgagcaaaacagtagaaaaatatggctctctttgtataactctcttgtactttgtgttcttattaataaagaagttcttgtctccatttaaaaaaaacagtagaaaaatatgaacaaggcaaaattaaaatctttcaacaaaaagcccaaaaacaactgatgattgcaatctaaaaacgtcaaaatggatgggaggaaacaccaagggacagcaaacatccatgcagcttcaattatgccttctaagtagtccttaaatcttgagtgagtgactagaaccagaaaatttcaggagaattgatataactcaagtgagaatttttattaatgtttttgaagttttgaatacaagaaaacaactactctatttatagcaaaagcataatctaatcctaattaataaaagaaacttaatcctaatcctaaataataaaagaaactatatattttttttaaatggaaacaagcctctttattattgataatgagactaaagctcaaagtacaagagcattatactaaaagcaaaaagaattaagggaaaatacaagctaaaacttaaataatcgggtaacataaatatgatggaattctaaaaacgaacccgagcagaaaataacgagctaaccaaagccacgcaaagacaatacatcagtagaaagctaaatacatgagggtgtctaactcagaagggaaaaaagaacgtaaacctcttcatctttcaaggcgtccctaactttcagttgatcaatggggtttttaaagtctttagcaataagagttcctccggtgaagctagggagatccaaaatcttgatatctccaaaattcaagaaaataattacctctattgaaatatgtaatttcaatagttgaaggcatagaagatattacctctattaaaatatgtaatatattagaggctggggctttcagttgggggtctgccccttttcatttctttaatagttggttatttgacaaacggtgttgcagactcattgagaactccttagattctgaaagtgacgaaggatggccaggctttgttatatcatccaaacttcaatccttaaaaatttagctgaaaaatttgaacagtgacagtgggaaagccagaaaatataatgaagaaagcttgctgaaagctttagcaaatgaagaaggtaaggatgagcaactggctttggcaccagaaagttgtaacctaaaatggatgctgaaagctgaccttctggagctatgtagaagtgaggaaggagaccttattcagaaaagtaaattaaattggttgaaattaggggatgagaacaccaagtttttccatcggtttctagctgccaaaaaaggaagaaatctgatttccaaattagtcaacgaccaagaggttccaacttcctcatatgtggagattaaagctccacaagctttgcagtagttaccaatgatcagaataaaagcttgacctcagaattttcagtagaagcaataaaatttgcactgaaattgttgggaagaagtaaagcgctggggccagagaatctatcgcagaattcttaatcaaattttggaaaaaattgaagagagatttccattccctttttaaagaattctacgctaatgggaagctcaatcttgtgtaagggaaaacttcatctgtttaatcaagaaaaagaggatgcttcaaaggtgaaaaatttcaggccaataagtctcactactttgacttacaagctggtggcaaaagtattggctgaaaaacttgagaagatcatgccaagcattattgacactcctcagagtgcctttttagaaggaaggcaaatcatcgaataccgagcgaaaaagaagaaagggtggttgtttaagttggaccttgagaaagtctttgatagggttaattgggactttttagaaaaagtaatggtgcagaaaaattctgaaaggaagaaagagatgaaaggccaaacatggaatctctcactttacaaaagaaccactatcttgcttcaacaatccttcccaaacaccttgaggaacactgtattcccattcaaatattaagattaaatgtctgagggaccagaaaacatgtctactttcagtgctcaagccaaaacttaccacatttctcaactaaggagttcaaatgatctggaataccacattgatgagctcaagccaagacatgctggagttaatttcgaaaaaggcagtctcggataatctagacaaaagattatggctgttggaaccgtcaggcaaattttcagtaaagtcgtcaacctctcacctttttccttcaccactaaatggcagattatacaattactctgaaaatcacccagggagtttaaatagggtaagacaacagataagacagaatggcctaagaaagccttagttctaaatctgatggctttcctttctctaataaggcaatctttgtttcagaaaaggccaagtaattcataaagctaacttaaggatcctcttgtattacctcccacagatgacatgaatagcggcaaacaactacaaagagaactgctgtactcctataattgctgctaacctacctaactaagaataatctcgaaaatttactctctttgtataaatctcttgtacttcgagttcacattaataaagaggttttgtctccgtttcaaaaaaaactgttggaggaaattcttttcaatttttcgaactgcttgggtttttggaaataactttagtcataatgtacaacagctactataagggcatagtttgaagaagaaatgacgacttttatggaaaaacatggttaaagatttggtttgcagatttttgttttaaaagaaatcaaaggacatttaatgacaaggagatgagatggttagaccgtttttgttcggcagctcataacgctttagcttggtgctccccaaataaagaattcaaagcttttagcattcaggagattagcttagattggagggcttttattttttcagattgataattcttcttgtagttggattttggtttgtttctctgcattgtatggggtgggggcagatttggcctgtatattgatcgtttgttttgatgctagttattaggaggagatgatgagggcactaaaggggtgtcaacctagttgagatgtctgggtgtgtctacttatctccatgatctcattgtgtgctctttgtataattctcttgtactttgagcatttgtcttgattttattttgtcttgattttatttaaaaaatttgtgacaaatcacccccctttttacagtataataaaattattgaacttgcatttattgaatatttatgtgagcaacaccaggttttgaagaaagcggat

SEQ ID NO: 7272 - DNA, 4549 bp, Cucumis sativus
  Intron number 2 from transcript Cucsa.219220.1 (locus Cucs a.219220) derived from phytozome v7.0 (chr-ID scaffold0165 8; pos 1073979 to 1078527 reverse strand)
aaaaactgaagctgacatccgtcctcaagggacaagtaagattcagaaccctgttctttttctcccaaagaatgtcgtttgattgatgtttttagctctttaaacgccatcaaacttgtacatagcacatagaaaaacaaatgctatagacttgaaaagtatattttcttccttcacttgtagaaaaaacaattgcatttttcttcaaaatgacacttgaagcagttacatcgttatgttggtttctcattacacaactttttggaaatccattttgatctataaaggattctcgttttcctttacaagaactcccactggctatatgttttccatgggcgtttgtttttagtattttcttggaaaagattattactgttttcttttgaaaagtgacattgtgtaaatagagcttgaacctaatggaagtgcacctttcgatttttttactctctgtttgataatttatctcttgcatgtttcttggaatacatgcaactttttctgttttctttcacccatatgaaagactatgatttgaaatgtgaaaaagtaggctctaaaaattttactcatacaaaaggcgacttggaatcatcatttcaattaataaagaagttgtatgtctacatttttttttctgataaaagaaaaaacttttgttgagataaaaatggaagaatgcatgggcatacaaattaccagcctatgagcccaattgtgagaagggactccaactatacaaaataaaacctatgggggattgtttgaaatcaaagcttagagggaaacatgaaatttgacaagagaccgcatctcactgggaatctctctcaactccttaaacacatgattattctgcttccttaaatatcccacaaaatagtgcaaaccccaatgagtaataaaaattgacccttctcataaaagagcagatggaggaggaatttttcaatcatatcactgaacttcctgctccatgctagcagaaaacctaaagtttgaaaggactcgcaccacacaactttcatgaattcacatctctagagaatgtgatctaggttttcatttgcattccaatagagattagagattatagcgcaacgggccaactaacaaaggcatcttcttcccaattcgatccaaaatattaactctttttcatgtaagacatgcctaagagaaatgctaggattttcaaggacaaagtcaaatccgctgaagaagtcctacaatttgttgttttcaatgcattcttttggtgtaaatctttagtggctctacgaagccgtagtttatcttattttgtcaacaattggaaatatctttggatatttgggattcttttgttttctttggatattttcattctatcaatgaaaattttcttatccggaaaaaaaatgccatgagaagaagttgacttccctagggatcttagttctctaaagtgtggagaaaactgactcacctgtgggagaatgatcaataaacctaggaaagaaagagttacatgagaatccctccaaaggatcaagactccacacccaaaaccctttttcacttgtttaaaaacaacagccttgtgcaaggataagagcgatgccacatccattggttccctatcgcacaaagggcgacaaacccaaatgtaaaggagatagaacttcttgaccaaactaaaaagtccaagagaatgcaaattttaaaagacgtgaggtagaaaagacgtgaaaacattgagtagaggggtttatccctcacccactgatcttctcaaaagtatgtatcatctcttctcccaccacattgaaccaaaggagagaaagaaggggtctcctttagaaatacccttccaagtggctatatccccttgcaataaccaatcaaaattacgagggtgaaacttactaagaataatcctatggaaaaggtagtgcactctaggggaaactgccaaaaccatttggctgaacatcaggttaagcatttcttactatcaacgaaagtgtttcttatctattatatatatatgtatatattcatattgaagagcatcaaacctgttgtggattagaaactattttgctgaataaatgaaatacaaattgaaggggatgtaagccgcctgaacccaggttaagaaagttacagagaaaaaaaaacttcccactagggaaaagagaagaaaacctatagttaccaaaaaggttgagcaatatgcactgggaaaaagctgacaaagcaatgtgctcctacaagatagaaaaaattctctcctaaagatttagtggttcctttcctaccaaatgctatagagaaaagctctaataaggggcatccaaaggagcttttggtcgtctttgttagggtgataatcagagcagccatggagaagagtaatgataatatcattaggaagaataatgtgcggcccaaattagttggagggtagtccagaaacatgaaggcgcaatggatgaaaaggtggtcttgccttttatgttgtttgtgcacaaggcacaacatagataatcgagaatttaaaatctgcggcatatctttcaaagcgtcttgcagctgaaaactctccaaatagtttttaacctaggccatctgaagtgaaaatagtgaagaaaagtattgtttacaaaattcatgagaaatctaccatgttgcacctctaccattcaagtttcatctgactgaattgatcagggcttaaattctaagaaagttggtaggcaagcaagctacatcagccccctaccaatttaaatttatcagcgattgagatctttcatgttgaaatggtcctcccaaatgccttccaatggtttgaaggaagcaaaaggcccaaagccatttgaccaagcgtgaatgattttcaactgaattttatatccacctagatctcccaattctatcaaattctggagccattatgtgtttccatgctgccaacagaccatcaattttagaggtgtgtgtatattaatttatttatttttaattacaatagaccatctcttattgaagaaaaataataaatgatagaatacaagggcatacatttcatgggaatggagtcccttgtagtttgatggctcttttctgttgggttgctttaggggaggctaggtaaagaacttttcagttgttaccaatgccctactgtgaagaaggaggtgtggaaatcaacattaagtttttttgacctaaagcttggcagaaatttgaaggatgatgagacctctgaatgggctgatcatacatatatcctcccaccagtcgtcttaaagggaagactcctgtaattcaatcatggatgaccatggtccatgactatgttcccaaggttcaacttctttgttcaccaccgagcaccttgagaacaccaacatggctgatttctctgattttaggttgttctctggttcttttggaggaataaagtcttctgatgtttcttattaaaaaaatacgtggttgaaaattaaacagtaatcttgtgtattacaaagaaaagagcagaaatccaaactgaaccgaaaatgccaaaaggtcctaaacaaagctaatataaaaagtaaagagcaggaaactacaccgaacacgagaactaaaaacagtaaacttgaagaacttgaaccaaactcctaagtcctaaaccttcctcaatttaactcacctccaatttagtcaagggtggaagtggaaccaagttatggtttcaaatcaagttttatccaacctccaacaaggatatgtctccaatcaactttatcaaaaacctcacgaattttgatgatcactcctttcttattaacttttttcccctttccaatcaccaacgagattattaacaatgggataaaagtcaacaatttgtctctccatgaacaaagcttattaaagttttgcgacctgtgtatgcaaggaccttctataggtaattgaatctttaagattttgtttcctcctttctagcatttagtaactacctttatgcttcatggttttacagcaccacttaaaaccttgggaattttcaggaaagaagtattccaaccaaatgtcattccaaaaaaggttgtcttatagagaccaaataactgttaatctagaatatattgaaaaattaaggatggaagtactacaataattcccaagtactttgagttacttgcacactcctaacaattgtttccttcatcctttcccactcactatttatatatcacataacaaatcctcctaacatgctcctcaactagttccaacaacacaaactttaacacaggggttagtagatgcactcaaacatctcaactacattgatatcctcgtagcatccttattatatctaaaaataacatataaaaataataaaaaaagtaatccacagacaatggccttgatttcttctattttggtggtaactttgtgcccttttgaatgtttgattttatgtttattttattctccaaattctaacgcaggcctttctaatttaattgatgtgattgtagataagttatttggaaga

SEQ ID NO: 7273 - DNA, 6732 bp, Cucumis sativus
  Intron number 15 from transcript Cucsa.271510.3 (locus Cuc sa.271510) derived from phytozome v7.0 (chr-ID scaffold025 00; pos 349691 to 356422)
cgacattcaaggcttttgtgaataatacggtccaggtatgctaaatccctaccaagactctacaaatccatttgtctaatgtctagtttgggaagtatgttttttggaaaattattttaaatggccaaatttataactatgtgtatgttaacaatgatattttactatattttataaatactttaatttagatttttctcgtctaattgacaattactaataaaaaattgtatttgtatttgtccaaacaattttagttgagcagctctccattatcacacattgtgtatggaaattttgaagatgcaaccttaaatggtaaatggtcgagatgaaatcaaaagtaaatatttagagttgctaccttagaccgtctagccatacttggacaataattacattttcacccttttaaaaagtcatcctaaaacttaccccaacaagtccaagacagcctaattatactcccattcagttcagcggccacaaattctaacattaaacagaaaaagaaaacaaaaaaacaaagattactaccacattacgtttgttgtgagaatatttgcccttcaaaattacaataagagacattttcggagttggtcaaaagattaaagaaaggaagccaaattattacctccgacgagaatcataatcaacaaagttgtgtttcaaacttgagattaattcccatgctgaagagctcctggcacaacaacttggctccatagggtacatttaccctcacgatatcatcgaatgattcacaaacccgacaatatggacccctcatcttacgaccaccagccactgatcgctgaatcacactagcaacattcttgcatttctggcaaacgtgcatctgggaagagtcactgagagtgaacagccgttcgtgcaagttggcagaggcaccatgggctataagacaatcacgttccatctccccgaacttaatccctccaaaacgttttcggtcagcaacaggttgtcgggtgagagggtggacagggccggtgttgcgaaatttaaccttatcttcagccatgtggattaagcgctggtagaaggttggacccatgaatataagagatcgcatcatttcaccagttcggccattgtacactctctcgcttccccatcttgaaaaccctgccctgctcacaaatattcgacatcaaatatgagtttcatttttacgatattttgcattgattatctaaagaaaaataatctatctgcatttaaataaaattgattatttttaatatttgaaaaaaaaaacttctttattaattgaatcaactaatttaaagtcctgtttggttttttgtttatcaaaactaacgtccgtgaatttctttctttattatctattttttactaatagttctaaaaaaccaagctaatatttaaaaattttaaagtagttttaaaaaattttgcatttggtttttaaattcggttgtatttaagaaatataaaatcatcgtaacaaaaatataaaatcttcaaatgagattggaagtacactaattttctaaacaacaaaatggtgtttacaaacagggctttattgattcactcaggtctgagtttgccttccgaaaaattaataattcaaaatatttttagcgggagtgattttgaataaccaaaagtggttttttttgtaatcaaaagaaatattagtaaatgaaaagtagttgaaaaaagttggattttttttgtaaaaagatgaaaaaaacaaataacttacttgctaactacttgggttttttatttgtagtttgaaaaaattatgtttgcttctcacacgatctcgtacctataattttcatatttcgtgggtcaacaattgagtttttagatgaattcaaaaaacaaaaacaagtttttttattttttagtttttttaatacattcccaaatgtagacaacaatgaaaaacaagttttttatttttttgttttttttaatacattcccaaatgtagacaacaaagcatagaaaccaatagttggaagtgatatttatagacttaatttttaaaaaccatacagttgtagaataaaaactaaaaattaaaaagatcatgaaatattgattatctaacatgtactaaccaaaagatcatggatttataaaaaaatgcagtaagaatcaaaacacctttaaaattagtatatgtgcattattgaaaacaaatttgagaaaacacaagttataagctttatagctacattctataaaaagaatatatatgtgtgtgtattgttttcagaagtgttgaaactagaagttattctaagcagacatttgttttaataagcattaactcagaaacaaaaggctgagtttctacgaaacgattcataagttgatggaaatgaaaacggttttttaggttagcgaaattaagaagaagaagaaaggatttaaacgtatttataaattgagataagtgcatgcaattaaacttggagatagccatgagatgagatctactactaccaaattaccaatttaaaagctctatagaaatgaatgataaaacagttacctgtgaagctggtcagtaatggcatcaacagaaggagttgagaaaggtgttgcatatttcagagaacccccagcagcgatccctttcccgagagccgcttccaatagttgaccaggagtctgtcgcgaaggaaaagcatgtggatttataacaatatctgggactatcccctggatggtgaaggggaaattctcttgagactccaaaaaccccagaactcccttttgtccatgcatacttgagaacttgtctccaagacaaggagatcgaacctgccaaaagagatgatgtatttgagaaacaggcgattttaatggataatcaagatagagagagaatatacaaagatcaataaggcctgtttaggccacatttgctaatcatttggttctaacaatggttttgtatctttctttaagtgaaggggttgaattctttactaaattctggaaacaaaacttgtttttagaaactacgttttttagttctcaaaacttagcttaaatttttaaaacattggtaaaaagtggataacaaagtaagaaatttagagatggaaagagtgtttataggcttaacttccacaaatgagaaacaaaagccaaacggttactaaaaagagccttaataaacactcttccaataaccattacaagtttctttgttttcttgtatacttttcgaggagtgttctcaaaattcaagttttgaaaattaaaaaacgtagcttttaaaaacttgttctttttttcaatagttagcttagaatctaaatatttacttaggaaaagatgaaaacaaggataagagaaatagtgagaagacaagtacagttatcaaaaattaaaaattaaaaaccaaaaaccaaatgattgttgcagaaggtataaacaattttcacatctaatatgatatcctaggaggcaccaatgattaatttgtaattcaggaaagtacctgtctgagggatacaacagcatagttcttcccgtcgtcgttagaagagagcacaactttctgaaccatgcccttctcagtgtgcttcagtttaatactgtgatcggctccagattctgcacatctaccaatgacaatgtctccactctgcaaatttgcacctatatatgggaagccgtcatcgtctaagctgtcaactcttccaattttactttgagtctttccaaaatttattgcatcatcggattttctcctcttctctgaagattctttattatctacctcagccttgtaactccggatatgctcagaccgaaacatgccgcgctcaagagaggctctgttcattactaatgaatcttcttggttgtaacccaggtgaacattgactgccacaatagcattctgaccattatagaactcgggtttagggagtataccggcgtgagatgagaggtatccaggtgttccaaggcaatcagcagtcattgtacgaaaaagtggcctttgtggatagtgtaattggtgggataaagtatccacacgaaaattagaattggttggtgaaaatccaatagcttgattagagtgcttctgggattgaaaaagagcccttctggcatgatcatgatttgcaaaagggacaagtccacagctcaaacctaataaaaatgacatatcaagttcacaatgggaatattttgtggtcccttcgtcttccataagatgcttaatactccaagctacacgacagtcttcttcttcttcagttccaataagttcgattattcccttgtccaaaagggattgaaaagtgtagttttctcccttagacttgtcaatcctatttaagttctctacaactaggagaggacgtaatatccttccagcatcggaaaatatacgtacttctttcagttgttcatctcttttgacttctacctatagtacatggaaagattcaaaagaaatgaatatatcatagatcacataagatgatcagagcatatgttgcaaacgctttcaaataaatagtttacattaaaaaacatctattgaaatccgtgaaagtagatggcaattatctgccacctgtgacgattaccaacagatatgagatatacctattggacgcaaaaaaaatgcccaacgagttatatggtagatattaactataagtggaatagaaatttttgttggcttataaaagaggcaaattctagcaaacaccagtcaccaactgaccaacatacacgttgaaaatgatttcttggaaataattcagaaaacaatgacaattgactggactgcatcaaggtgccttaaaaaaatagtttgaaatctcatataggtcaatcaaagaattatttagtgaaataacctgatgcagaaacggattccttcgtcgcttgcgtctcacgtttgtgacaaatgaaagggaatcttcacaaactccgacccattccccatcgagaaaaattctgtacttcccacaaaaagaagtagatgtattgtccaccaaattctccattccacagcgaaacaatgtgggagttatcgacttcttcgtgtttaagcttacaagtcctgtgccggacaaatttttaatgagcccacaattttcaccatctggagtggagagaaagcaaacccttccccagtgagaaggatgcctgtccaaaaaaagatacattagacacttttagaaagtagaaaagataataattcaatttatctttcctcttcattatccatggatcccaacccgagatcaacttctaaacaaactgtcaagggaaggtattcacaatctcataagctcattcacatttgcacattttgtaaaagaaagaaccccaggaagtttttaaaagttgtttcaagtactatctataaacttgcaactacaaggcagagagatgaaccccatgacttttcaaaagtagctgtttgctaacatttagtacaacctatagatgagtagtacagacaaggcagaagtgtccttagaatcaaagctcaaagaagagaaaatccacacattaatatatcaacatcatagccaataatacaaaaaggcaagacctatacgaagtcaagataactcacgggtatcttgcatcaccaactttcccagtgtatgcaacctgttgacgtgttctcctcaattccgccattgtctgcaagggattagcacgaccaagagtagccaccacacctgaaatcctttccatcctcttaaatgcatgcgcccatgctccagtagagaatgctcgagatagaccattagtgattatggaagcatccaaatagtgttctattggatgcacttgacgatccccatagaggtccctttgtaaagctttttccatgcgtctacgtgcatgtgcaatatgtactttaagctctctttcaagcagttctgcagccagctcaaacctcttattgcgaaaatcatccctattatcacatttcctacggccagtataggcttgcagaagacatttaaccatataaccaaggaaatgacacttttgctttgagcctttcaagctggcaaaaagatacaggttcagacaatcttcaattttatcagcaggtgggaaactggtctttctaatttcattgtccaaaaaagtcaacgctcttttacctcttcgaaagtctttccacttatcatcattatcaacttcacgaacagaggcaaaaagaatattcagaacagttggatcatctctgccatagtcaattaaatctactatttctttgtccgatgaaacaccaagtgcaaagaataaaatccatacaggaacttctgtggacaaaaaatatacattgaggactttctccttgctttttagatcttcagacttggaattttcaactagtctaataattagtctatttctcttaacttctgatctgtatgccacagtccagccttgaacattagaaatccagagccttctcaaacaaatttgctcttgagcaataaatatctggaatgaccatgtaaacgatattaaaattgttaaaaagagaacaaaagttaaccacttgaactaatatgcatgcggaataagaaagaaatatctacaaaaatttaacatggagaagtatatggtataattaatcatttttacaaaatatagaaataaaactttgtagaactaatatttcttgactaaattttatgtcccatcaggaggcag

SEQ ID NO: 7274 - DNA, 3965 bp, Cucumis sativus
  Intron number 8 from transcript Cucsa.364930.1 (locus Cucs a.364930) derived from phytozome v7.0 (chr-ID scaffold0361 1; pos 2392826 to 2396790 reverse strand)
caattggacattcacctccaaaccgataccttcaggtactcttttacttgtcttgtggtcttttatttttgtctttttactttcgagagaaaaaaattacttttagcttaagtgttagaattatgtttttggtaacaaattgtcaaataaggaggaagttgactattgggtcatgagagctcattcaatttacgaagagcatttgtcacatggagataaaaaataacttgatttaaaaaaatcatcttttttttgccacatgacatgcttttaagtgggatacatggcgatggatgtagtgtagccaaggtgatgtgttctagcgtgcaagtgcacacggtcaagttataatatagtaaaacaaccagtaaaggcttgagtattatccttagggatcaattaacagttaatatttagctattttagacttgaattgactttagctaaggaaacaaaatcggatgttgagcaatttgtaaaagtaaaatgaacttgacaaacaacaactaagttcagaataaaagacgttctctcaactttatatgatatttctttaaaaaacactagcaaacacattaaatcttataaaaacaactctaaatataaggctaaatatgcactctttaagcatgtatcacaaggacgctcaagtaacttttgtttacaaatgttgagagaaaaacgggcaaaattatcaactctagtaagcaggaactttggggttaggtggacattttgtaccaatatcatttttttgaagacagaaagctacatgaagttacaaaagtcccattcctcagcggggtggtgctgctcgattgccaattggttagatagcatttcattgggtttaagtttctttggcatggggtgtatttttttaggcgtttgcttcaacttgatttccagccacttctttttgctttaatcaagcatcttcgtagcatttttggagcatctttgaagggcatgtatcattggtggtcgattcttcttgtcaaattgttactagttggatttttgggttgaaaggatgtttggtgttatgtttcttagggcttgttggcaatgacttaagcaaaaaaagtttttcaaaaaatgaattttcatctaaacgttttttctaaaaactttggaaaagaaacacacatgtaaacagcaaccttttttaaaaaatgtttttaggtaaaaatttatttgatttgttatatactaaaagttttttaatatataatttcaaattataataaaagaatttgtccatggtgttttttaaagaagttgattaacgatcatcaaggatggtggtcagggatagtcaccctgtaaaatgataatcagaggttgatgacagctttcgttggaagtcaaacaacggcaatcaccaaaaactggttgttgacagttgattgataaaaaacgattgataaaagttgattggtaacaattaccaaaaaatggtcaaagagagttggccgacaatgtttgctgaacaacaatcgacaagagttagttggcaactgtcattgaaaaacggtcgttggtagttggccaacaatttttattgaaaaatggttgataaaagttggttgacaacggtcaacaaaagttgactaccaatggtcaccaataatgatctacaaaatttggcaaaaaattgtcaatgaaagttgaccgacaatagttactgaacaactattaacaaaagttcgacaatgatcatcggaaatgttcgtcgatagttggttagcaattgttaacaaaaacggttgattaaagttggttagaaccgaccaccgaaaatggttgacaagagtaactaacaacggttaccaaaaaatggtcgaccaaagttggctgacaaggatcatcgaacaatgatcgacaaaagttccatcagcccacatataaataaggaccaagaagaacaagaaaggatccaaagtgcagcaaaatatccgttgggtaagagagcaatcctcgaacaaccttgggaaacagatgctaagggtcagcaaatcaatccatccactgattggaccaaaaagtgaatatggaatcgttactaagcttgaagagagtcaaagattccatcttcctccaaactcatgaaatgcaaagcgccattaataacaaatgaagaggcacaagagtcaagccaatattataccacaatcctgaacaatggaaaccaaatgatcaggtatatttgatggcgttaaaaggggaaaagcaatgtgagccttgtgcaataccatttacttccacctcagctgtaaataaagcctaaaggttcatgcgttaatgtcttcatttgccaatttagtatgatcattttgggacagaagttattattttggtcatggagaatgaccaagaaaggttgagacatgttcaagaagattgtagaatcagtcctacaataattatgatgttgaagcttattcaagaacacctaatctctacatcaatcctgaagtattggaagacatgaagaagggagtaaagaaaatcaatcgtttgatgggaagtatgactcaaagcacatatcaactttcaaaacaatggcaatagcttaaaaaggaaataattcaagaaaatcaagaatccatccaaataggccatgacaccatgcaagaaatgaatagaaatgaaaatcaatgtgaagaagaaaaccaaccacgtggataagaaactgaggaaaattggaaactcacccaaaattttaaacacagaataaaacatggtcaaaactccaaccattgaagtgaaaatcgtggacaagagaaaaaggggtgagcaaccaaattactgactctgaacgatgaaagtggtattggcggtgttgcagtcgattgtgaagcaacgtgggagatgacatgcttcgaataaaaaaaattacgtattctggcgaaatcactctttttcctctctttttgatgtacagctcaggattgacttctttgagcatatttaagctcattttagatcattttgacattgaattgctatctcaaatgtatcactgaaatcacttacaagtaacattaaattcaacgtagtcatattaaaactaatctaattccacagcaaataatgcacttttagttgcgtattagtgctgcttctccaagattccattagttttttcaagttgagcttggccttagcttgatcgtttagaagtttccatagttaaattttctgtcttatgcttacacaggattgtgtttatttttcagtttaattttgtttcatgtgatattgtaatttgagctcttgctcttttcattaatatcaatgaagtgttgtttccttttaaaaaaaaggcaattgaaaatttaggatcttattatacataaaattcaatctcatacctacaaggttagtgtttttttataaatcttcgatatgttaggaacttattagacataacatcaaaagttagagaatttgatagacattttcaaattttatggatttattatagagaaacttgaaaattcaggggtatttagacactttctaaaattcagggatcaattaaagaaatttaattgtacaagaaaactaaggtacttggaaatttagaattgaggccagtgaatgtgatgctgtgagatgaattagatctattactcgaagtgagaaggttgaactatgaactaaaagtagcactagttggagatataggtgttgagtgagttgacaatcaattagggttacctcggtcgaatttttggtttcatcgcaacttcgctgtaaaatcctaatttcatgtctctatggtgctcctattccagtcttcttgaaagttgggtaactttatggtcttatttcatttccatgtccatatctatgcttttcttggttgaaattttataaattcagtgctctggtcatatgcattttgcttgttatctccaacagggtgattttgatatcattgggggtacatcggcttt

SEQ ID NO: 7275 - DNA, 984 bp, Cucumis sativus
  Intron number 1 from transcript Cucsa.178490.1 (locus Cucs a.178490) derived from phytozome v7.0 (chr-ID scaffold0122 7; pos 726623 to 727606)
cttggattcgattgtctagggcatacctttgaaaggttagttttgtttgtcttatgtggatttttccttgttctatttgggtaatttctgttatggtcgtttatgttggattagttcttagggttagatcggatcatttggattctaacccttttcttgagtttttattttgattttatttcccttaattttggttttttctttccttctttttttcctgatcgagtggtttttttttttttttttttttaatttataacaaaataaattatgggttatgttgaattgttctagcttttgggttgcattatcagtttttcagaatcggagaatagtgatgaatgttaaagtgttgttgcttcggcaaatcccagatagagttctgtcagtaatattattttaaccttagttctcagttttttggtttatttatttattttaaatttgtttctggtattgtattctgccttttgatgggttagaaaaaattgtgccatgatcatgcttgtttttaccaattttccagcttcatttgggaacctaattaagtaaagtttattttatgaaattggtgaactgtgcctatcttattttatgtagaaatcagtccattactttagaaagtataatgacttacttctgtttttttggttattcttgtttgttttttatcagttatgtgtagttttatgtatcttgtaagatgatgtcttttcactcaagactgtagattgattgccatttcttttgaagttcgaaatacttatttttcgttcagggctttgactgttttgaatttaaaatggacattttattttgctaccattttacttattttgcagtcactacttcttgaattaatatagttgataatgtattttgtgttgccactcgctatctggtgggagtggggagggacaagttgttattgttttccccctctttgtcatgggattaaatctgctatgtttggtttttttgaag

SEQ ID NO: 7276 - DNA, 2888 bp, Cucumis sativus
  Intron number 1 from transcript Cucsa.253290.2 (locus Cucs a.253290) derived from phytozome v7.0 (chr-ID scaffold0222 9; pos 1944771 to 1947658)
ggtcctctccatccaaaggcagcctttccttacaggtactgtgtacatgactttcttccaaaccctaaacccttcaactctctgtggtttcctttgaattactttttcagtgtcttgtatgttatgaaataattgtagaacatagcaacagaacatgtcccctcttccactcactgctgcttgaaatccactatttgttctgatagaaaaactccctgagattctctcttcttttttgcatttaaaaggaagctgacatattccaacttcagcagaaaattacatgattctgtcgttttcctcatcaatttttacccttgtatttaatacaaagtgaaaaaagaaaacatactatccaatttttgatagtttcggttaggtggggtttcaaaattttacactttttactgatagttatattcattagtagtgaaaatgatccggtttcgttaaactgaactgatttactgttttaaatgacgatatttatacgggttcggtttgaaattcagttttggtattttaaaaatagttaaacaaaaaaaaatggttcgttttaaatacagttttgttcttcaaaattaaaacgatctagttttagaatcggttttactcatttttaaatatacatatagtagttcaatttcaaatttggttttcgaatgtgaagccaaactgatatttcgtattcaaaatttctcagtttcattgagttttcaatttggctcagtttgactttaaaaggagatagttaaatttcttcggtttgcgtgaacaccccagatactcactttaaatccagtgttattttggtattaataagttttgagctaagtaaaactatattaaactctaagttaatcaaaatttcaaagttaaaagttgagaggaagggcagatatttttaaacttcaaacatatggttgattttaaaaatccatattttctactatttccagttggggagattcaaagtggcctccatgatgcaaaaatttcttacatcatactcctcctatttatggcattagattcttcctcattcttagaatatttcttactttacatcctttttcctattgccttcatattctctgtcttgtcttctggcctaccaactccatatattagtgtgttagcaactcaacttctataataacactattcaactccatattttgcacattaattttcctaacttccatatattaacttctgtttggaagattgaaataatatgaatatgagttgcaaagcacaacatgacatatccacttcacataggtgctttatttcctccctagctaacatgattagcttctctcgtcattgacattaattccatgtgatcccttttgctgttaccgcaagattttccttctgagaagactgggtactgaaagtgaaactcctcccgtccctccacaagtattgttatttttaattgggtcttccacggttgaagtttagttgtatgtgttatcagtggcgtatccagaaatcatatgtagggaacactattaacaacaacaaaaattggaatagatgagatttgaactccttcaaattttaaagggggccacatccactatatcaaaggcagaatatagtaagaaatgacacattatttaatatatattgtaatttgacacttcaaaactactattaaaatacaaaaaccgagaatttgaaggaaggcacgtacccctagccccttaatagattcgtccatgtgtgtcactctatcatatttgctcttttatcttcttctgtttttcaagtcaatcataaatattaaaatctctctttacaaacaaaagatatctttttagtttattgatttggatgaattgttcgtaagctttgaaaataggtctttttagtctctccacttataagattaaactcatttgatctaactttttaaaaataagtttaaaaggcttctcttataactttagacttttactttaaataattatacgacattttaaattagaataataacttttaaaaattatgtccttttcaaaactatttttcaaaattttaaaatttcatataattatttttgaaaatcaaacataaaatatctttaagaccttctaaacctatttcttcaaactccttgactagagactggtggggcgggtttattaataaagctcgagagtaaaaaaatccattttaattttagaactcatagaccaaaagcaactagaaaataaaaagaaaaaagtattatttaggttagatagtaaagtataatagaaaaaaagttgtgtattgacatcttgttttcatttacttttcttcaaccgttgtttgtggaatatcattattattgttattattagtacttctacgactatatctgcgttatctttcaaaatatattttcttttgtatgcaactatttattctgtatttgaaaatataacaacaattattattattattgttgttattatggatgtggatggatgggatagtgccataaggggtgtacccacccagaaaattaataatttaggaaacaaaagagatcaaagtgggagcatcttctcatgcataggaattaggatgattcccagcaactattcaaccaaccaatttgtgttatacatattaactactattgggctcacaacccacaattaattatattcatttaataccccatttttactcattcttttcactcatttttcaatgtttattttcagctatccctaaattcctcacagaaactgctttatgattcattctcaaatctctttgggattcatttggttatatttgaaaaccattttttttatttttttatttttttattttaaaaaactatgttagagaaaaagaaaaaggtatttagtggttcgacacgt

SEQ ID NO: 7277 - DNA, 1476 bp, Cucumis sativus
  Intron number 3 from transcript Cucsa.327160.1 (locus Cucs a.327160) derived from phytozome v7.0 (chr-ID scaffold0315 7; pos 147322 to 148797 reverse strand)
tcaagaagcatttctcattaggaaagactagtaagaaaacattctttctgtcaaagactatctagaaaagaaaagagttacccactctaaatatgtgcaatgtggcctttaccactgtccattcaccaaactatgaagactggtactttgatagtgggtttatagacatatgacaggcaactctctcctcttctcatgtctagaaccaagcaaaataggtcaagtcacttttggagatagagcaaaaggaaatgttctgggaaaaggtaatataaatcatttgggagctccaactctcagcaaatcttatcagtgcaagtcaactgtgtgaccaaggttactcaatcagcttttcaaaagaaaaatgtgttgtttcgaatacaatgaatgatatcataatgattgggactcgtctatcacacaactgctactactggaacaataataacaaaagtctgatatatatccaatctatctaaagttgaagaaactatgctctggcataaacgagtcggacacataagtgtctcgactattagtaacacattaaaagctaatgtagttcaaggagtacaactactgaaacaatcatctgaaatcttttgtccagaatgtcctttgtccggatcttatgggtcctatgcaatttgaaagtctgggaagaaataaatatgtgcttgtggttgttaatgacttgtctagatacacatgggtaaaattcaacaaagaaaaagcagtacctttaaagtctttcgatctttatgtctacaaattcaacacaaaaaagataaatatgtgagaataatcaaaagcgatcatggtagagagtttgaaaactctatgctctctaagctctctcattacaaaggaatattttgctcctttaactcctcaaactggagtagttgaaagaaaaaatagaactcttgaagagatggctagagtcatgcttcatgctaaaaatcttctcttatacttctaggctgaagctctcaacacaacatgtcacattgatagccggattgctctgcatcctggaacattggtgaccaactaccaactatggaaggggagtaaacctaatgtccaatacttccatgttttcataagcaaaagccatattctaaatgacagagaatataaataaaattgggactctaagtccgacgaaggtatctttttgggatattcaacaaacaatagagcttatagagtcttcaacaaacgttggtctctcatctgataccaatatcattgccacaaagtagatattcaaaaacaaaattgacgaaaagagaaatgtcataaaaaacaaagctcgtcttgtagcacaaggttacgctaaaatcgaaggcatcgactttggagaaaccttcactcttgttgcacaccttaaggccatccaactgtgtttaggaatggcatgtttccgaaagatcaaactatttcaaatggatgtcaaaagtgttttcctca

SEQ ID NO: 7278 - DNA, 1970 bp, Cucumis sativus
  Intron number 1 from transcript Cucsa.352430.1 (locus Cucs a.352430) derived from phytozome v7.0 (chr-ID scaffold0353 3; pos 269323 to 271292)
tcaatcaacgaaagccttcccaagctctccaagcggtattttaatataaacctccctctctttgtattttttttttttttaaatcttttcttcttctttcgaaacctttctgcactgccttcgttatatttttagcttcttggttttttctttgaactgtgaattaaattacttcagttgagttccggttgctaaatgggacagaacagtcgctaataaggtgttcttccttgcttgacaaattggagaaaggtttcaacttcttgtagagccgaattttcagatgataactatcattcgtacatttctactaattgggtttttctgttattcttattccatcattaaaatatctgctaaagaaccccctttttgacatcccaattttctctgaaggtagacgagaaaataccatcacaatctggagctttcttattctcagcgttaaggatagcttgcttgacttccatctctgaaaattcaattctgaagtttggaatgatacatcttttttattttaatggtgataataacaaacgcgaatgtctgaagctcaagagagggcaatttgtgaaatccccattcacttctcccaccaacgctcacgaggaaaaagaacgaagaacagtgggaatggaggacgcaagtgcttgaaagaagatagaacgtattcaaatgcttcatttagtggccttactaagaataaataaagtaaattgaaaagaaaaatatttcccattgacaagtgtagtggccaataacttcgctgttatttcgtacagcgctgacaagaattctagagctacggaccccagttatgttagagtagattttttgggaatcaaagtagtattagcttcactaggaattccattttgatgttgctctttatagaactcttagaataccaaagagtccccttttcttacatccgtcaagtctataagaagaaagaatccgtcactttccttagcgctcttttatgctcaatgttaaggatagcttgcttggtttccatccctgaaaatggccttctgatgttttttcattgatattttggtgcgttggatttattctattaatcaagctctcctgcgagatgggtagttccttttgtggctagttggggtgtgtgctattcggagactttgaggttagagaaacaatgaattttttcaaacgcttgagagatcaccgattgaggtttagtcctttgtttgatttaatatgtccttgtgtgctttattaacgaagccctttcataattatgtgttaactgtcaagtcttatttcttttgattggagtccccttttatggtttatctccctttttgggttctgtttttgtatacccatgtgctattttatttcttcacaacgaaagtttagttattcataaaaaaagtcaagttgtagttaaatttcaatcagcattctgcacaattgcaacataaatctgtcatcacgaactgattgcattgatctgtatatttgacatctgattcatgacatactgaaaaacaaagaaaaaaaacactacgatggggttatatttgtcaacattgttttgaaagtaacatttcaaagatgaactgtattatagaatttgaaatgttttaaacctttctgttcattgacctaaagatgtcttgcacctatgtttaccaattgtatactactcttttttttgtacaaatggaattgtatgttaactcattttataccattagttttctacccgtgttgattgaaaaatatattgacaaacatatggtattttgtaccttttagaagaaacgatagtacacatgaatgtagttgtagtagtcagctcagatggctaaatcaatggtcaaatcatggatggagcgtattaggctattagctaataccttaaagaacagaataaagaacaataaattttattaatagcttttggcaccttgtttgtcatgttcgaacaggttgta

SEQ ID NO: 7279 - DNA, 1442 bp, Cucumis sativus
  Intron number 3 from transcript Cucsa.050480.1 (locus Cucs a.050480) derived from phytozome v7.0 (chr-ID scaffold0055 5; pos 60381 to 61822 reverse strand)
ctttaaagaaggtaacatcttgttatgttatgttatgttatttatttttctctttctttcatcctttttcatttttgttttgttttgtttttgttttttgttttttgcctttatgccgcatctctcttaaatattatttcagatgaagttaaagaaaaaagttcattgcataaatgcttcagtgcccaaatctaaacagacaagctcttttgagaaagagaccaaactttttcgagtgaaaaacgtacttgatgaactgaagaagtctcctgcagtaaatatgaggtgagcttagttctatagctcatcatcatcaagagaggcttgtctagttagtttcttattgttctctaattcatttcttttatgttattttattcttggtagaacttttagttaaaataaattgaagttctaaaagaaggctgaacaaataaagaaaagaattatgatagtctgggacgtgtttttattttgttttattttagttgcaattagtcatttgatctttttttgttagattggagaccctgcttctttttgtgggcttggtcgctcttctgttctttcattttttctcaatggagttggtctttaaaaaaaaaaattaggcaaaggaaaattatggtgagaaatgaaaacaaagaaaatagtaagtatgggttattctgcatgtttcaacactattctagttctctttgggctactatcgcaatggctaaaggaatgaacttagtgatagacggcctgattgaaaactacaacactccccccgatccattcaatgaattgtgaaatagggcttctttctaaactgagaaaagaaaaagaaaagaaaagctaatcagttgatgattgtaaacgccaagtttagctaagagttcaaatgctttgaaaataaattatgaaaactttgctcatcgcttggatttgtcaggttttagtttgtacgaaacaaatgagatccattttaagaggttggtgattggttggtttaaatcaagtgaactctgtgaacttgcagaacctttgtggtgtttcatctaatgtttctgccctgtgggtgttgtgaacttttgattgaaaatttatgtcaaatatgatcaatttccagtgcattaggatgttctgaatcaatatgcgcatttcatgtttttgcctgttattttcagtgatcctgaagttgttacaactattgaagaactttcccgaaagttggagtgcagagtacaagagaaaaacacgtcaaacatggttgcgaatacaagccaaagcaccaagctttcatctgcttacagaaggaagagaagaacaataaaaaggaaaagcaaagagaatgagacgacgagtgttgacaataagatcccaaaagctaaaggctcttcacaagtgttttattttcagcagaagttcaagtcagaaaccgcatctcatacaaatat

SEQ ID NO: 7280 - DNA, 1604 bp, Cucumis sativus
  Intron number 2 from transcript Cucsa.089760.1 (locus Cucs a.089760) derived from phytozome v7.0 (chr-ID scaffold0089 4; pos 1148685 to 1150288 reverse strand)
ccattctcggacaggtaattcacattcaattatatatgctttcacttcttgtttttgtgcaataaattttttcactcaacgtaagtctaacgacagtatatcacaaagtattataattaacttataatgtttggaggtgatttgaaattattattaaaaatacaagtttagaattactctaaaacatacctttcctctcatgtttacttttcgtaattattctagttcattttagtttaaaagtataaagtaattttcaatatctaatattaaagtcaatttagatttataaatattttgaaaaacatttacaaatattaaattagaatatacaacacaatatatgttagttggcgacttgctggttctggtagtgatgagaatgtttcgagttcttaaaatatcaccaaccattttcaagttgttttgtatatattttaaaagtgtctaaatcttattttatttataaattgtttactctatgcttctaaatgttttattcattattttaatatgagaagtgagaattaacaattatctttaggttaattattgatttattgttaattgctaatagccttaggttatacaaaatttatatccgtctaatttttttccttcttattataaataatatttctactttgaaatgtaacattttgaattgatataatgttttacatttagtcataattttttttccaatgctcaaaacatggtcgagagaacaaacttctcccattgccaacttcactttatttaactgcagggagaaaaacctttttatttgcagtgttatatatatatattagcagagtaaaataactcatttttgaaaaataacaaaaaatattgacttttgaaacaattgaaagcttgattcttcttaaagcaacaataatgattaatgcattaatgtttgtgaggccatatcatgctaggtttttaagaggaatgattcaaacgtgacaactttaagcaagtgggatattaatgaatcaattaattactaataatatttgttatttaattaaaacaatagaccgacttggatcaagtcaaattttctcaatagttttttattaaaagaatatttttcgttattttattttagtttctttcactatttaattttcatattttagtaaatcttaataattatattaatctaatttcacatactataaagactcaaataactcttacaaaaataaaaaatactaaacttatgaattatttttaaatataacaaaacgaataaatttatatttttaacagttttatcatttaccttgtaaaattaatttctaatgtcttttctattatattataatttagttcacatttagttgggtatagtctaccaaacttattggtttaaaaataattttttcattaaaaattatttgaatgtatgtaagaagaatatcccaagtgtactcggagaatatgacaatattatggcctgacccttttgtttgtatatgtttagagtaatgcaatgaagttttaaaataatttgtattgtatagtatagtatatgacaaatagtaacaaatgatattattacaaaaaaagtaatgagatttatcataaataggggt

SEQ ID NO: 7281 - DNA, 5106 bp, Cucumis sativus
  Intron number 2 from transcript Cucsa.163330.1 (locus Cucs a.163330) derived from phytozome v7.0 (chr-ID scaffold0114 4; pos 2719486 to 2724591)
gcgggcccttcaaaatctgccgagaccctattcaagtaagcaagaaagaattttttgtatgtagtttttgcccctttttcataatgatttcgttttaagtaagtctatgcacatttctccccatttttcaattatgtatttcacttttgttcaagaaacacttgaattgctattcaaattctaaaaaccaaaacagacataatttatgcttttaaaaaatggaaaaataaacaaaacttatgcatagaagtatggtttattagcttatttttcataaaagctaaaaactaaaaactaaatggtgattaaacttgcatgaatggggttttctgagttggcttatggcgtatattagatatattctgggttgttcagtacacccattaatgctagtccacgtgtcagtttgttagttctgttatttttctcttctctggtatcaatctgtataaattcttgtggaagattttcaataaaagagttgaggaatattttatggtatcatcactcagctgactggtgctttgctctccacttggactcgcaacaatcacatcatggttgcctggatcgtgaacttagtattgaaaggaatttcttttagcatattgttttttaattcagcacacgcgatttggcttgatcttaaagagtgtttttaatggaagaatggtcctcgtacctttcttatgaaacgtagttctgccactttgactcgagaccaacaatatgttatgatgcatttttcgaaaatgaagagtatatgggaggaatacgttacatatcctggttgcacttgcggtaagtgttcttgtgaaggcgtggaagctttctttcagtatgagtacctaatgaatttcctcatgggcttgaatgaatcatatggttattcctgatcccaaattttgttaatggagcttgcatctaccataaataaggttgtttctttgatcgttcaagaagaacaacaagtaccaaatttggcatcacttcctacaatcggtctatcatctactcatactattgcaggtgtttccaaggcacctacacaaagatcttttgtggatcccaatcgttagtgtaaagatgtccaatttgctcccactgtgggaaatctagacatactatagatcgctgccatgaagttcatggctatcctcaaggctgaaccaagggaaattcaagccaacatactagtgtacctactgctaactctaacatgccaacaactactccagatgtcacagcaacaaatgtttctacttcaatcgaaaaagcctcaccatcatatgatactcctacccaatgccatggaatactcaccatgttacaatcctaattatctgttgtcaagactgaggcagaggcaagtacttcatatttggctggtacttgttcattttccaacccgagtgattgttggataattgattgaggtgattctgccgatatttgttttaaccctgcagcttttttgtcatttgtaccagttaatacatctttggtattacttgacaaaacatggttgacagtaaattatgctggcactatatgtttgtttgatacacttagtttgcagagagacctttatattccccaaattcgatacaattttctttcaatcattgctctcacctctgatgcttctgtcttgatgaatttttctcctgattcttgcaccatttagtacatgtccactttgcaaatgaccggcaaggttgatctcaaggatggtctttacatactgaatgatttcatgacttcaaatgctatgcagacacaaatatatgcaacttcaagtccaaagacctccattgatttatggcactccaagcttggccatccctcccttactcatttacatcatcttaaagatgttctgtattttgattcatatagtcttaagcatgataaacgctgctatgtgtgtcctcttgctaaagagaggcttctcattccaataatcacatgtctgctcatccctttgatttgatacatgctgatatttggggaccatttgcagtaccgtgctggctatacatacttccttacaagttgatgattgcacaaggtacacatgaacatatttgttcttttttaaaggaaacgagtctctattattaatattaataataaaacaaaagctacaagtacaaaaggattatacaataagtataagaacctagggatcaataggcacacctgaatatttcaacttagttgatacccctttagtgtcatcatcatatatgtacaaactaagaacatataacataagggcaaatgaaggcctctacaacacaagagaaaataaaagcaactaaaaaagcgataatccaggaactaaaacaccaacgatggactgtccaaaagcatcaataagtaaggaaggaaaccaaaatctctgagccttgatttcatgaaagcatcccaattcagattgtaatgagagatgttgtacatgtaaaattccttaaaaatagtgcaccatgaggaggcattacgatgagcattttcaagacgatcaacccaactgacagattgttgtgaaaagtcctttgatttctttcatgatagagtgttgtgaaaaattctttgatttctttcaaaccacaaattggccaataaggctttggctgcgttccaacaaagaatttgtgcaggtttattaagaagaggccttcctaaaagttgtctaaccgattctctactattcaagcgaagcacccaagggattttagagatggagaacaacttttccccacaactggctgcatatgaacaaagaaaaaagaggtgagaagagtcgtcttcacgttggagacaaaacagacaaattgagggataaaaacaactatttggcaattttctctgttgaccaactaatgttacccaaatcaaaatattcacccttctttggcttttaatcttccaatacagtgccttatttaatggggaagagagtgccttatttaatggggaagagagtgaaagatgagaggttaaagatttgatcaagaataaaccttttctctctagtgagcaaattcttttataaagtgtctcgagtatcttcttgttgaatacatcagtcgagctaacaaaatagcaaaattcatggaggggaagcaactaaagctagagatgtccacagggcagggacggggataccactccccatccctaccccctatccgattccccatcgctaccccctatccgattccccatcgctaccccctatccgattccccatccccacgaatttcccgcggggctttagcggtgattcccgcgggaattcaacaaaaatattagccacttgtttttttgctttagttttttgtttttttataactaaatataagtataaatttatgtgtatatatgtatatatatataaatagatatatatattacacaaacatatatatatctatatatatgtgtgtgtttgaaacggaaacacaaacatttatgtttttatacacgcacattcctaacggcatggagggtagctcggaaatcctctgacatgtggattatcatctttatgatcgtcttctgggaactatctagctcgccaactcgttcttctatatggacaacagagctcgttgaactgtcccatgctcgtactttccagttcttacaacttttgtctcgagtgtcgaccattatcaacaacttttgtataggtaattcgttgaggcaacttgtcaccgcatcaatagggtcagctttctcgaaaattattgaatatgggtttccaagaagtagacggagtcaagaacttccgctaggtagaacatctgctcttcgagctctaccagtctacatgggacttgtccatctttttccctgccaacatgtttgcatcttaaccatcaataagtcaaaattggctttgataccacttgtcacagtcgtgatctttcaaacgcgggacgagcgattgtttgacacttgctcaaatacaaagagcaagtcagtcgtacgatgtagcctcccttcacgtttcgagagaaaatggttttataaaacgagaaagaaaagttcggtaaacatcatttgaagaaagcattgaagactatgaattgcaaagaaaacttagattgcaaatagtacatcaaggcttggttggggattcaactagtgggtctcccagaaaactgccaaataaaaggcgtcccaagccgaaatatcacaatgtcctgacatcaaaaggaaaacaataggctattttagacatttttaggtttgacaggcttgcatatgaaaagtgcaaaatgtcttgacatcaaaaggaaaacaataggctaaactaagtacaaaaaataaagataaggtggtttgaggatgtttgggcatgcaatcataggcaaacaacgttttggacaagcatgctcacgacaattggcggcaccatacagatctgacagtagttgtatataatttaccgacagcggcagttgtacaaactgtatcgacaacagcggttgtatgcgtcggagatactggtcgacggcagcctgaatggtggcggcggcagcatcaatgaggtcggcggtggtggcggtgaggttatcattggtggtcaaagtttatgtggtagggttttccattcattgtcaatgactgctagggttttgttatccatggttctgatacaatataaaaaataagaaagaatacacttgtgtacgtagaaaaccttatttcaggaagaaaaaccatgatatgaatcttttctcaatattaaaagaatacaagggatagaatgtatatatatatacaatggcccttgaaaaaaaagaacataaacaagggtataaagattacacaaataaccttattactcagtagatatattctgagttgtttagtttcaaccatacactaggccacgtgtcagttcgttagttctgttatttatctcctcttttatcaatctgtataaattcctgaggaagcttttgaataaaagagttaggaatattttatcaaactcatgtaaaaagagttgggaatattttatcaaactcgtgtaaaagcttataatccaatggtgcaggtacatttctcccgaacaagttccaattgagt

SEQ ID NO: 7282 - DNA, 6548 bp, Cucumis sativus
  Intron number 2 from transcript Cucsa.194020.1 (locus Cucs a.194020) derived from phytozome v7.0 (chr-ID scaffold0133 7; pos 168275 to 174822)
aagtcctcaaacggggatacaacttcatcttcacggtacgttctcttatttcgagcataattttatatatttctttctttctccaatcaatcatttttcgaaaaaaataatttcattttcaactgcatcaattttatttaatcaacatctaatgccgataaatcttagtaacttacgctttcaagtttaaccctactaattaagaattctttgaaaagttgaaatatgactcctttggagatgcggaaaaaatatagatttacaaaactcattctatcattctcttaataaccactttcttttcaattggaattgaaatttataaactaagaaaataaataaataaattatttgaaaaggtacgtgacgctactttcaaaatctataaaatattttagttcattagtcaaacttatttttttgattgaaattattgagtttgtaaacatgttttaggttgaaattagtagagaattaatccaaagttaaagttctaattagttttagggttcaatttatgaaatggaaattttgaggtataagttgatctcttttactcatttactctaactaaattgcttaaactattactttgataaattttgtagaagaagattttctttggtgtgacctcaaccaactaacttgatttacgaaggaaatttatgaaatccaaatattataactaagaataataaaattaagaaaatatcttcaatgaaatctaaacagaaaaagaaatatcaaaatttaaccattactattttatatatatataaaaaaagagtattactgtgattatgtttatttgattacgtagggtgttgattcaatttgtattcgttatctaacgaatgaaactaatataaacttttgtaattaaggaaaaaagtattaacttagtttagaattattttcacccctcaaattctgttaaaatgtttcactcatattaatgctgggaatagttcataatgacggctttattatatttagggcaacaattaggtttgacttagtttttacctaattttattctcttaattttgtaaacacacagaaaacaacaaacaaaattgctacacaacagttttttactgaacaagttcttgaacgaaatagagatagatgttgccttggatcatccaagtttcttttttttaaaaaaaaaattattgtatttaagcatgcactatttttaacttttatttatttatttcatatcttgcacccttttttaacctttagcaattgatttacctctttttatgtataaaaattgatttttctttttttttaggaaattgatttaactatttgatttatgcttccaatagaaatattcttatatgtcgagctttaaaagaagattcctagatacaaaacaattaataaagagatggtcaaaggctttttatataaatctaaaatatttaaatgctatttgatccatgtggattactgtttagtatttgaatgttgttggtgttcttcatataattacatcgtacaactagtctaaaataaacaccaggaagaccctctagttcatctgtcaattattaaagaaaaaaaaaaagcgtatattcaactctctagttcatctgtcaattgaaaatttctgaacaatatggctggctagctgttttgaattgttaaatgtatggtagggaaactcaaaaacaaatgaaaaccctcaattcataccatgtgctatttggcaaccatggattttttaatataattccattgcatcatcaataattttgattgaattacacatttaaaaacttttgaagattcaaaattataccatgttgaaattttatttatttctttatttttaaattcaggaatctattatagattaaacaaaaaaatatgtaatttcattgaaaataaaatctaaatttatatctaattgaacaatcaagttttttaaattaaattttatcaaaatttattagaaacaactttgaaagttttgaaaatttagagttaattgaacaccatttgcattttttttatttaatttggaatatgaacatttttaaaataataaattattaaaactatttaccagatctagtgaaattaatcaatatctcttttaatatatatttttttattatccataataatctccatttgaaatgtgtgtttgttccaatttatactatacaaataccctccaaaattgaaaaaggaaaaacaagtttttagaatttagtgtatttgaaaacgcttccaaacaatagcaatgataaaattggtatctgtgaacttaattaaaaataaataaaaaatcaatgagaaactcattggacagagatcacaattgttattattattattattattttgggagaatggcccaatgatatcttaacatctagagcgatcaaaacttaaaaagtctacatatacacaatgaacaagatttgacttttaaaatcttaaatttatttactaaataaatggtgaagttaacatcattcactagttatgggtgtcagtgtgttattaatttattagatgatttattcccagcgaggggaattttattttatattagtagcttatttggattgttttttagtataataattattggggagattcaaccttttagaagatgagatgcatatctcaaaatcaaagcttattttaggtaaaatatgaaatgatttttaattagtttttagataaacttataattcaatttaatcgttagacagatagttttttgaaaaaaaataaattttcatcatcttttcctatttagtttcttgatcacaatttaaatagcacttcttggttaacttcatgtgttttagtcttcatctttaaatttattgcaatgtttgcttttgtcccttgctagagtaaaagaacgaaaattagtttcttttttcattcatgaatgttaaacttggtttagataagttcatatttgagaatatggttggagattttgatttctaatattgattcatataatataagtatttgaaaatttacaatgttgtaaacacggtgatgattagtgtagtattgaagaaacaattatcgaatggaaatctctcgtctcatacttaaaattctaattaagtatggagaaaattaattctcgttaaggtagatgagagtttatactcacccatccaatggtagtaggcgaagaattgatcctcaccatccaatagtattaggtggagatcaatcctcaccatccaagggtgatatgtggagatgaatcttcgcctcccaattaaggaagagagagtataaatactctttggatgtctcatttgggagatagattggaaaaccaaatcaaagtctctctttctcaatgtaagtgttctccctttctttgtcttactttcataattcttcattcacattcaagcaaaagaaggcgagatctcgaaatcaaaaggagggacaaggatgaagactggtagaagtttcccaaatgagtaggcttatttgtcttatcggattcttcgttatgagagaattgaatcagtcttctttgaattaataaagacagaagaaaaatctgttaccggggtcactcaagggaataaaggggtcgggcgagtctattccgcgtatgatctctttctgaagagagatctttagtactttctctctatttgtcttactttaataattattgaggttatcatggttaaactcttgttcagttctttttattcctagctagaaagacatagggtgtactaccattggatggtgaggatcaattctccacaatactaccattggatggtgaggatcaaatctccacaatactaccattggatggtgaggattgaattctgcatctactaacattggattgtttgttttctgtaagaaacaaatttcattgacgagtgaaattacaaaaattgtcaaaattaaattaatgaggttacataattccaattggtcaaaagagaagaaagggtataaaaactaaagtaaggtacgcaactataccaactcttggcatgaaagataatgatgtcaaaataattatcaaaggaggttcctttgtcttggaagggttgcttgtttttctccttccaagtgatacataagaagaaacgaatcaaatgctaccacattagctgtttttgctgagtgaaaggatggttggagaatgcagatgtgagggctgcaattttgtgtccttggggaaggcaatgtaccaaccaaagaaaaggtggactttcttccaaaacctcttgacaaaattaaaatgtaaaaaaagatgatttattgagttcggtccattcatacggctgaggcaacaatgtggagaaatggcatcgtaggaatggtgaatttgaagtttctctgttatgctaatggtagagtgattaatttcctaaagaaaaacttagtttttcttttatagaaatcatttcaaatagtagcatggaaggatgctaagggggcattttcaacaagccccaaatcataggccaaggatctagttgttaaatgtcctttggtgccgagctccaaaaaccatttatctatggtcaatcaaaggtgtgtaatctgtagactgctcataagatcaattcaattggatatctcataatcctttaagtttcttctgatgatgagaaaccaaccatgactaggtcatatagatcatgtatgcaagatccttttttatgttaaaacatatgtaaaacaataattagcttatctaactgtttcaagaaaacagttacttgtaactaatcttgaaatgtcaataagtaaacaatctcttggccaagataggcagacatttcatttgaggaattaatttcaacttgaattacatcactttttgtgtgtacaagttgtataatccaggatagagctctttgagtgcagagattttgttccacctcttatctaaaaaagaagtgtccttttttttatcgacgacattatattgattctgactttatctttgataagagccacgaaatccaacatgtctctccaaggacgcctagcgtaattagaaaatgagtggtttggctaaagagtcatgagggagctatacgcttcatatatttatcatcaatcacctgtttccaaagagtcccacccttgttatagtatcagcaaacccacctagcaagaaggacaatggttcttgtcacttctcttaataccaaagccaccctaagcatgagaatggagtaacttgtcccatataacaaggtgggaaccatgttgagaaatgcacccctcccatagaaagttcttgtgtagtttctcctaattttaagcagacaatttgaacaatgacgtgtaataggtagggagactagggtgggtgacttgtagaagagtaagacaagtcttttttccaaatatttttgatgactggctttcaaaatgatatcagttttggttttccaaataagggaagcctaaggtaggtatttggccaatgatgcaatttataattgtatctagtggctatctgcttcaagttatcagttgataaacaagtgctataagttcagttttattaaggttggtattaaagcctgagaccttcccaaatgacttaatgatggtgaaaaggttatcaagaggatctttacaataatcagaaaataagatggtattgttagatcaatctgtagagaattagttctaagacaaaaaaaaacccttcatttgaccacatgtggtagcatttaatgagcatccatgtgagacaatccaaagtaatgaagaaaaaaaaggatgataaaggatccctatccgagacctcttgcaactttgatcttacccctagggcggccattaatcaaatcaagaaattagaggaagaaatactcttatccacttacaccatgtgtcaccaaagccctttgcttttgggagataattatcaaatatcatattaatcatcacacaatgacaattatcaaatacataaattatatgaatcaatattagaaatcaaaatttctaactgttatcaatgagctgtcaataaagattacaaaattagagataaagttatatcactccaaaatataaaattaaaaagaatttttaatttcgaaattagatttaagtactattatgatcgatatacatttatattttgcttattttaataattgtacttctaaagtattcgtcaacactttttgtttataaaatttagacaaaaatgcataataaaatctctgtaagacaaatttatgattacattctaagaaatttaatgagaattgtgattggaaaagttaagagaaaacaaaaaaaatgagataacggaacaggttactctaaattaaaatcaaagtatgggagggaaaaaggatgaagttttctgttatatgtgaccaacctatttcaaatcaccaatatttctggatgaatttagcccattttctctcttgatggcccaattagtaacaaggcctaataatgaaggtccattatataaagaagcccaattaatcagttttatgattgatttccttgtttcacaggacacagacgta

SEQ ID NO: 7283 - DNA, 2025 bp, Cucumis sativus
  Intron number 1 from transcript Cucsa.174120.1 (locus Cucs a.174120) derived from phytozome v7.0 (chr-ID scaffold0121 9; pos 81525 to 83549)
cgccagcttaatatctatgtgagtttcttgtttcttcatttctttttttctttctttaacttctatctttgtttttgtttcgtgtttcctgtttgtttccgtctttgttcttgtgggtttctttcccttctttagaaagaatggaattcttttttaaaaagaacctccatacgccttcttcatcatgaagttaatcttttcttctgtggtttaattttgatattatagcaatatcttcttgttttaggtgccctaattagtaataacgctattgaggaatggtggtgaaagatttactttgaaaaaacttgggatgatgttgatgggggcttgactgaatttgtgcaaggtcggttaaattttgcttctagacagggaaacctttatctggtccactttcttacaacaaaatgttcaattatgtgcacaactttgtacattcttttttagtaagtgccaaataacataacatatgccttctatcagaaccgacttgcttggggctcagttaccatgcaattgacatagttaccctcatcctcttctgtaaattctctataatcatattcttttcaaaagtattagttggataatcttcatttcctttggcaagtacaagtttcttttggttgctacgatcattactttaggacattcgattgtgccccagggtgggaagaagtgtagtattttcaatgaattgctctagcatgtgggtgatgatactattggattgttccatggaggttttgaaggttggctactgtcagaagggggttttggtggagagggcaaggagttccatatttcgggttttccattgtcaagatctggcttagggaattttttttggccatataaaggccattgcagttgggagactaggcagggtttgtagttactgttttgccaaggttcgtagttattgaataaagcccaatttcatgaatgattaaaatgattcctaaaggaatctcaggctgccattgaaattaaccacttgtgtgcctttagttgataaaatttctcaatatactcggctactattggagtttcttggggatatttctggtttctttttttcagtatttgctggtggaggaagaaacctgagttttaagtacggattttatcttcaaatggaagcgaacagggtttccttccttcacttgttctattcagtttttttttacccattaggcttcagctcctccctccgcagcaagcaactagcttaaatcttctcctgtatccaaatgctgagaaagcattgaagtgtgccaaaccccaaacattgcctccacgatctatttgaccccctcaacatacatgtgaattaaatattttttacattgtaaaatagggatgaagatagaaatagctttatcttgtcgctagttgatagttgatatggaggcatgccttatgttgctcttaggttgtctgacaatgaccttgaaaaccaatcaaacaaatgatgttttattcttttcaattcattcccttaagagccttgggttagtttcttgtcagttaaggttgaatgtagagggcctgggttggtgaggaaatttcccaagtgtctcactttgttctacttaaatgcatatttcctttgtctgcagcaatttcttttactccttttgacattctctacaaatgtttattgtttcatgaattcctgatttagtcttgatgcaatttgaggctattattcttggagttgtatatttctgatcaagcttattaggtgtgacttgtaaattgatcatgcatactacattttttgttgtgttcttgatgtgtatagtttctgagtgcatttgtcattcgacgtacatgcttttaggctcttgcaaaagaggaaaactgttagacatatcgtataagttgctagaggagaaacaactacatttccccctaactgctgacatatagctttgaatgatcaaatcattgttataactagtggtttcttttattattttagggttttcggaaaattgatactgattgctgggaatt

SEQ ID NO: 7284 - DNA, 3544 bp, Cucumis sativus
  Intron number 1 from transcript Cucsa.031980.1 (locus Cucs a.031980) derived from phytozome v7.0 (chr-ID scaffold0042 9; pos 1254767 to 1258310 reverse strand)
attctggaggtaagaggggtttatttatttatttttattttcttcgttctgttctgtgagatacatgaacatgtgtgtttatacttcgtcgttacctccatacgtactatttgatgttttttatgcttaattggttgattcttattaggttccttatgtttgtattcctttgttcaagcccccatatagttttttattcttgtttttagaatactcgtcaatattgctgctgacctgatatttgcgtggttaattattgatattatttcagatttaggattaagtcttctcaatgcattgatattggcagaatatggctactgtaaaactgtcatggtagtcaggatagtttactatgatgctagctgactgaaatagcatagtagtagggaagttaccatgtccatgggaattgttctacaatgtttgctgctctaggattaatttttttcttttattttgagctgaaagaaaagttggctcaagtttataattattgtacaggtcgcacttaaaatggttaatttgtctgtaaatacgaaggaaaaattctttggtatctgatggggggaacaagttattatttttttttgataaagagagaaatgcttcattaagaataatgaataatgaaaaaatctacctaaaccaaccctggaaaaaaccccattacaaggaaggatcccaactaatagaaatcaaactcaaagagtagttacaaaaaagctttgagatcgaagcccaaagcaagatataatgacgaaggagggaccaaagctctatagaatccctctccatgcccccaaaagttctattgttccatttcctccacaagctccataaaatcatacgagtactggcactccaaagaaacctggctttctctttcacaagtgggttgagaaggtaatactcgatcatgtctctaacacctctaggacgagtactcactctaccaaggcgaaaaagataattctctaacagagagaggagggaagccacatttaacgattccctatcagtaagagaacgtcaaaaagcaaaaaaaaaaaaaaagtgattgaactcccctaccaaaccaagaaatcgacaatgaaatgatttttgagggaggagagatggtaaagacaaggaagtaaagcacaaagaggtctatacccaacccagaaatcctcccaaaagtaggtctctctcccctccctcaccacccaacgaaccaagttagcaaaactaggaagatccttcacaatgtctttccataaattccagtaagtacctctaatcactttagacaaccactcaaaagtgtggagaccaaatttactcacaatgattttttgccacagagagtcaggttcagagttaaaacgccagaaccatttagctaagggggtttattgtgaagactaaggtttccaatttccaatccacctgaaccaatcgatttttcaattatcttccattttatcagatgagagcccttgcctttcctttcagctttattttttaatataagtcccaatcccaattaggattatggtgtccaccacaactaaattacttactttgaattcatagacttcggagttcctggcagcaattgctttgtaaatctgaatgaggagattgttatttcttatggaaattaattattcttctgtcatatcttcagcttctatgttccaggtagtggagttgggtttagaaactggttctagagtttgtctatggagttaattttgtggtaactaccctatagtttagtttttctaaatggttgaaaggaagctcataagtccattgcatcgtccttgatccacttagaataaaatagatatctaaatgtctaattgagcacacctacgctagcttaatggtaattatggccaggattttgaacggccatcacaagggatcttgaaatgaatcctttcttacaaaaagaagaaaaatcatgaatagttgctagtatacagcaattttcccagcaaaggttcttataatggttggatcctatttttggcttaggacggtggaggagtggcttttcaaagctccttcaggtttgtgtttgaaaggaaaggaaaaaatagtttggggttgtgcggctagacacttcttttggcttctctggagttggtactccagccattttcttcaatcagtcttttaattgggttattgtagattggaaatttggaaggtcattcttttgtgcctgtattggaggcccctagcccctagcccctagccttctattcttcctttttgaatctatatcagtttctaattttaaaacaattaattttccgtgtactggttatcaacattcaagacaaagagggggtgtaaggctagatcatagaggaacactttaaattctttcaacatcagccaaggaggcgttaactttaatattggtacccatttctttagagggaaccagaattcttcgttctcttaccatagaatccagcttcgctatttcggaaataccttctttgtttgagtttatttttctccatctaatggacataatcaatgcctttttatatttttttccaaaatttactttttcaaagagtcatagacataaccaacacctcttgaaaatccaaaagtttatgggtgagaaggatgccagtttggttgctaaagcgactagctgaccaagaaagggagccctgttggagagatggagtgtgggtagtatttttccaatcttactacttttaactgcacagtggaattaatcttcatggctatcttagcctttttaaatttatactgtcaatgaaattcagttggcttgtctcataaaaaacaataatgataatacctccaacagccaaatttcagacaaaaattgtcccttttttaggaatttaatccaatgacttaattcaactcatttctatgatgggctattgatcttttatctctaataaatatgaaaaaaagaatgttgaaaagattcaaaaggttctccgttcccattgatagggttacaaccttataggatggatatggaaaatcatttacttggacaagttctccataaaggtcacatattctgataatgctccaaatgaaaccacctacctgcagtttgtactcagctgcagaactcttccgcatgatctgcgcattgctgcgatgaacctctcgattcccagtcttgcacgcaagtacaaagtctttgctctgatcccaaagatggtgaaaccttctttgctactattctgatgattttagttgaggtcttcttaatgcattaaggttggcagcatttattactgcctctattattttattgtcatatttggtttgttacactaaacaactgaaacaagagatcatttaaaatgaaaggacagcagaaaaattgttctttatcttttgggattttactacattggttgtaccagtgatttatttgttctttttggtaactgtcatatgcttgatgaatgatctagattttttatttttgtaatcgtcttttaactcttgtttttaatgtagaatctcctgttaaagtgaa

SEQ ID NO: 7285 - DNA, 2296 bp, Cucumis sativus
  Intron number 3 from transcript Cucsa.122710.1 (locus Cucs a.122710) derived from phytozome v7.0 (chr-ID scaffold0100 0; pos 84803 to 87098 reverse strand)
caacataaggtatgatgtgtaactcaattactgaaattgtctctgtgaaccaacaagaattcctttctagatacgtactttgacaggcatggtggttttcgagttttacagaaataaggctctctgacttgatggtttcacaataaccttttaacatgataattgggaagatttgaagaaggaaattgttaggatacttcctaacaagaatcaggatctaaaatatatcaggaatttaaaaaaagaaactgcaatataatccaagtataaaggaacttggaacctccctcatgagtgctctcacctcagccctagatcactctacaaaatagcctcatctaatgaccaatatatcccttaatattagtatgaactaatattcctatctaggtacctaacatacgttgagaaagtcttttgcaaagttttgtgagaggtagattatagattcagccatgaatgaaacttgtgtgtgcccaattctcagaaaaggcaaaggcagcaaagtaaaagagttcatggcttcatgccaataagccatgtgaccagtctgcattagataattgcaaaaactttactgataaacttaataaggtctccttggtactatatccattatgctagaaccttcaatgcaggtaggcaagttttagatgacgtgttgacctgcaaaggaagtaattaaggactataggaagagaagaaaaataaggtgtatgtaaagatactacagatgtatctttatatatattgaattacctccacaaattacaatataaagttcttcaacaaaacacaatacaagactcaaaacactattaaaatcccagatcacagcagatcatcatcttacgtaaaaggaactacaaacaaacattagactccacaatatcataaaccaaaagcaagatcaaacaataaaacctggacccttctgctttctttcctcgcaaggataagcagcctcctcctttccagaaattatcttcgatgcctttctctctccttcgtcttctatttatcctaactaactaatgggccccactgaggaatggtcctgcccttttccctctctcaatgctccacgtgtaattctgtttttccctttattttttctactataagtaataataggaggcctagcagtgtagtcttcaagataaatttttaggatcctaatttttgagggtttctcttgttggtctttctcagttcctttgctcctattagggagcttacttttttccccctccctctctgaaagttaataatatctaagtgaagttctttgcatgagaagttttgcatgggagagtgaatgtctaggaccatatccagcagcaattttcttgtgttacggccacaatagtgcgttcttttgtaggtagcatgcgaaagatctagatcattgattcccttcggagttctttagcttctttgggattatgttggtgcataaaaaggattgctctatgattgagatccttaggaacttccctttctggatacgggtactaggtagagtgttgtagcagacttgttcttttgctattttgtgaagattttgggttgagaatgatattagaatttttagaggggttgccggttgacagatttttggaagagatgtgggagggtgtgatgtttattgctcccatgtgggcatccattaattggactttttgtaattaccatattggtctcattcttttggattgaagcctacttgtgtaagtagtttgtggtctctttttctgggcttgttttttatagttttttttatgtgcccttgtatattcattcattgatccttgtacattctttcatttttctcaatgaatgttaaactttggccaaaaccaaatcaggttgacaatttgaaacttgttgggtaacttttacttttgaagtggtccatttatttgaccagtaagaggtcacggataaggtatggcgaagcacaaaggtccttcatcatcaccaaatatattgtattcgggtgtgtcaaaaacaagttgcacactctcttctatttagagatggtatgtttatacacgatctggttgagataaattaaaagataattgaagcttgatggaaaattaatttttgttgaatttataccctcaatatggacatatacgctttctggcgacacagcaaaatttcatttgtgctgttaattcatatgtttggtacagtaatgactattggaatttcatccatcttattcatgtttattgatctcttacattttcctttttatcaggttttgattgaagcagttgaaaaccat

SEQ ID NO: 7286 - DNA, 7133 bp, Cucumis sativus
  Intron number 10 from transcript Cucsa.109220.1 (locus Cuc sa.109220) derived from phytozome v7.0 (chr-ID scaffold009 34; pos 142498 to 149630)
atctctttacacctgaagtgaagattattcaagaggttggttcatgatatctataccctaaaacatttggaatatgtaccaatattgttcccatatctttccattctttttcatcgtctctcttcattttcatagcgattaataatccatgatgcttgcattgtagatgcataaagtgttgattccatatttcttggccctactcataatgcccgcaaccctttgcttagaagggacgttattggtatgttcgctcaccttttagattttgctgaagttttttgctattgaattgtatattcacgtgtggagatattcaggaggcgaggcaggaacgctgatgcatctctgtccctttttgacccccgtttaattttctgcttctgccaaattttttgtttaatatggcggggattgggaagattccaccatctttagtacttcaaaattttaattaaataaagtaaattcctctaaaaatatgcttttaatttccggcgagaaatttttactcttgctaggataaagaaccccatctaaattttgggagaaaattttgtccttgttttccacctaaatggggaattattgtcttgcttgttgatttggtagtcaaacaaaattcgatcttggatgtacaaaccacaaatatttggttttggttgtatatatgataaaaatataggaaaattataaaaaataacgaatttgacaaaatagatcattaatagatattggtagacactgatatccttctgctagtgacattgttgatattttattatttttaaaaatgcccatgaaatatatttaaacagttcggttgagttcagttttataatatactgtaatgtaatataaatggtttagtttggttttagattcggttttcaaataaaagacgaaccaaaccaaaaatcttggtttccttataattcgaaccaaatgaaattgaccatttggtaaaaactgaatttttgatttggtttggtcggtttggttcacccctaccccatgagattccatccctaccgagagaaagaccatccttacattcacttgtaggctaattatcaaactttcctcaactctcgaagtttgattcttgcaggctggacgagacctaaagtttattagtttatcaatgtgtggatgcctttcttttggtgcccttctattactggtaatgtttgatctcccaaccattctccaacctcatttggactctttgtgcattaactaactccatggcttgttcccagtttgtaaacagtaggggttatggtttggcaggctgctggtgcgccctcgtcggatttcaatgggtaaaaacaacacatccctactttctttaactgcaaataggtgttcttctcacctcatactataactttctcttacataggctcggttttttaacgctcttcggcgcgtcctctctcccaatggagtgctttactctagtgatgtaagccattatgaagtggtaaagcaaaaggctgcataggtgacagttcaagtaagcttgtagtagacattattcaataccttctcgatgtcgtcgtcattcgagtttgataaaggtatggatcgaaaccaacaggttatgctggcagcttgaaacaattgtactaaaaaaaagatgtgatttcactagcaggttttgatggttctgatgcttggatgaagttagaacagaaagcaaaagcagctttatctttggctatattcgctttgaagcctttagtatctcgtaaaattatattgtaaaggaacttttaaaattttaagaaaattatactatatgtatgttaaagaacttatgaaacaaataatctgtaaccagaaaacaaaacaaaacaatagtctactcaccacatttctgttgaagaactcaaccccattttgtatttatcttccgtattcaacatacaagttgtttatagatataagaagcaagttagaaaataaacgattactatgaaaaatagaagttatgtgagtttgcattttcaagatctctaatgaatgatcaacaaaagcaatttgattgcaaaagtgaaagtgatcaaatttttttataaaagaatagaaaatgaatggatgtttctatgaaaagaagtttttccaaaaaaagaataaagactttattttaaaaaacaataaaagaattttttttaaagatcttattagattaactcgagaataagagatttaaactcatgatatcttgtgcactaaactgacttgacaaaataaattatttacacctcacgtaaaaaccaaaaaagaaaactatttgttagataaattacccattttttactactctcaaagaataaattgcacataattgctttttagaaggaaaaaaaaaagggaaaaagacctaagaagagtcaaaatgttgactctaaaaaaggcaaacaaaatctataaaaaagaacgaccatgaatattccacgtggcataacgtcattgaacgttcaccttcatcgtcttcctcacatgactcttccctaaatttcccctctgtattattttgaagctcaaacttcgcttctttcaattctccggcgccaaaaatgcctttcaaaatcctccactcttcttcttcttcattcgttcctcgtttccattgccccaatattctcaaaccattctctccctcttcctttcccctcactcgtccatttctctcctcccccaccatttcttttccttcctcttccatttcctccccttcacctctccatttctcgtcgcggaatcgccgccgattcccggttcttcgcgttgagattgagagagaaattggcattgaagtacaaaaagatgaacaagtattggggattgaaggagaagaattggggaaccaggggttgttgaatcagttgaaggagattgttacgtttactgggcctgctattggattgtggatttgtggacctttgatgagtctcattgacactgcggttattggccagggaagcgctgttgagcttgctgctttaggttttttttatttcttttctccttttcttttgcttctttgtgatgaattttgctaatggattgaggaggcaatagcttcttacttcttgcttccaatctgttgaataaactcaaccagcaatgattagttgagctcgttacttatttggaattctaaagactattgttaatgtcaactttaatctatatcaggtagtggggagagttctattttctttttttcaacttcatttgtttgtaacttttgactggcaggccctgcgacagttttatgtgattatacgagctatgtgtttatgtttcttagtatcgctacttcaaacatggtagccacggcccttgccaaacaggtctgaaccattatggtagaactctcggaaattgttagaaataacccaaaaggttctcatttttcacgactagcatcctttgtgatacttcatacttctttataatagtttttctcaatccttctcgacatcttgaaatttgaataaaaatttagcttcttttcttcgcgcatccaagctatcaatttcgttaggctcttagtggaatctcggctagcatgaagaccgggattgatgtaataaacccacatcagaaataaatgaggaggaggagaaaaaaatggcttgccgagaagcctaaaatgctatgaactcaccaccaccatttacggaaaaaagatcttgagaagcaccattaggagttcggttagttgcggtttgaagaagattgcatacaatcctggtcttcttcgattcctccgagaaagcccaaaaatccgatagtttggaagtgtcatgagttctctgttcaaatctcgaggtcgagaatcgagaaaaactattataatgagttgtcaaaaagggtgctaattgtgaaagttgaaaacattttagagttacttctaacaatttccccagaactttttactacagatatggaatacttggctgcatttcttgactcgaagggttgttacaggataaaaacgaagtgcagcatcatatatctgtattgctgtttgttggattaatggctggcttcttgatgctcttaagtaccaaactattgggttcggtggccctaactggtactcaacttctacattattgcttagttaaatgaaggatccattactttcatcaattttatggactatttatttaatttctcaccacatagacagttagagccttttcttctccttaaagttagaagaataacgtaccaggatgttattgtaaattttcagcttttgtgggggcaaagaatgcagacatcatacctgcagcaaatacctacattcaggtttgtcttttgacttgtaaaattgaagcaataaatgaacttggtatctatatttgaaaatgcaatagaagtttatcttatatagcttcatttgtgatgtacttcttctttttttatgtctctcttgctttttgaacaacacttccacattttttttctgtatggaaatttcagcttgtccagttttttaggaattgtcgtaatactttcactggggtctgtttgcttgatattgtattttttaccaaattgttgtgtttctttttctctgattacttttctcgtggtaccatattattgtgataattggttcaatgactttaagttaaacagaatccttttcgttggtagattcgaggtttggcatggcccgcaattcttactggctgggtcgctcaaagtgcaaggttcctattactagattcatgccaatgctccatctacttttcttgtcatggctttggtctgtttgttttatgattatcgctgttggcatatgaacccgtgggcttgctttctttgccatccttgctttgaaatgggaaagtgaaaaagaagtaaaaaaactgatatcctttcacctttaagctattggtttgcctactggctttatttgtgagtatgacaccttgactaatgtatgttttagacttgaggcccttacctctgtggtttatttcatgagtttcgtctgtgaacttgagcgcagattgttgaaatattttcataagctttcagatgaggcaccaaaagtgaaatagtataaaatatcgtttctgcatacttccagaataactccacgagttgcttgatacttcaccaaatttattaacttcaattttcatgtttgctttagtcttggcatgaaagattcctggggacctttgaaggctttggcagttgcgagtattgtaaatggtataggtgatgtggtcctatgcatgtttttaggatatgggattgctggtgctgcgtgggcaaccatggcatcacaggtatgtttctttctgttcatgttaatgtgtttactttcactgcatttctgtactgttcacaccacctcaattagatctcatgtttctcctatatggtttttagattattgcagcttatatgatgatagaagcactgaataagaaaggatacgacggatattctctatcagttccctcgtctggtgaatttttgtcaatacttggccttgctgctcctgtatttctaacaatgatgtcaaaggttctattttgtatatatccttacattcatctctttttctttgagtgaagtgtctaagattgtttttctcttaggtggttttttattctctcctcatttattacgctacatctatgggcacacacaccatggctgctcatcaggttatgtcacttatttcttttcattgttatcttctatgcaagtatgcctctttcttttcctttagaagtcattggccatgtcaaattgatggcttgctatgtaatttcaggttatgattcaaacattttgtatgtgtaccgtttggggtgaacctctatctcaaactgctcaatcatttatgcctgggttgataaatggagtgaatcgtagtttggataaggtgagaattgcaatttctaatgatatgcctatttattattacgatagttttggatgaatgttactataagttacacgaatttcatatagctagaaacgactcctgacattgtgttaggtatctgaacttcctgcacatagaactacacacaaacacttccaaaaggacacccaagaaccaccaaaataggggatatcagcctccctgtgttctattatatatcgacaagaaacccaagtgttcaacaatcacaaaatatctcacgatcagagtaaatgcttgaacaaggaaactgaaatgaaacaaaaataatcagtcggctagtctaagagagccgtctctcctcaaatgagctctcactcccaaacatcccctctccatactgaatccctaaaccgtacaaaaaccctttagctgtttccttcacgtacaatattcttccgctgggcccccctaactttctgcttgttgaaatcccttcttgcccttctttctttcatacacttccataataggaggtctcacacattgttatggatattcataattattaaaaatttccttgccttgacactcgttaagcagtggtgggtaaattatgacctagagccaagaattgacagtcattgtatttattgtggaaattcttttatattgtgtaggcttggatgttgctaaagtcactcatgatcataggagctatatttggtttggtattagggactattggaacatcagttccttggttgttccccaatctcttcacacccgaagagaagattattcaggaggtcagttattaatatccatatgctgccattttaatcgattctgttcttccctccccccatttttatgacaaataatagcattactgccatagataagttgctgaagctcacatttctctatttcttgagattttgcatgagaaaactgggttttatttataggccgaaactacatttagaattccatttcctctgatgtacactcggaggccattcaaagtcttttaaacattgtccaactgttatgtatttcaattcacgtttttgtttaagaatgcaaaaattaaaatgatggttatttaatcacccatgttagaaacacagggacttttttttttctcgataattgtggcgataaaaaatatcacatggtgttaaggattgtattttttgtttatttgtaattgcag

SEQ ID NO: 7287 - DNA, 2625 bp, Cucumis sativus
  Intron number 6 from transcript Cucsa.332260.1 (locus Cucs a.332260) derived from phytozome v7.0 (chr-ID scaffold0326 4; pos 19074 to 21698)
aaggatattcgaaacttggatagtgtgagaataatctttttttttaatttttaaatttttttatcactcacatggttttttattttcttacttaacaaacaaatattataaattctcatgtacaatattcttttttattttttgacaaaattaccactgcttgctatttgtgtcataagttaacatactacttctctttataaagatttcattctttctcgatgaaaattcgaaaaagaaatactacttttctcttataaagatttcaaaagatgctataataagttataggttggctcctaataatttgtccatctagcttaatatatatcttttgatgtttttatttctttgccttctttgcctcttcatgtagttggtcaactactccttgtagtagttgtgtctcttcaacttaaatgttggagttatgagatccctctccatgcaggggggttccaaataaattgcttttgatatctcaaccaaggataattttggtgtattttgagcaatagtctcttttcatttagttgatgaaaagtttcgcatcctttttttaaaaaaaccagctcaaccgaggaggtcctggcaattgtggttccatatggctaggagagagactcatcatttaattcatagaatttttgttgttctatacacattgagggggcaaaaagagaataattctttgaatttggatattcatggctctcaagagcattcaacaccatctcaaccattttccattgagaatgagaaaggtttttcgggtatgcttcaggctaagataactattcaatccacttctcttaatacaaattcattctccaataatgaagcctcatctttccaatatggaagaggaagaattagaagtggaaaatcagatacaacgtttttgccggagatctccaagtcgaaggatttgaatttagatataaaagaacaaattttgctgctttacctcttcactactcttaaaaaattgattatacttttttggctgagcaatttatggttctgacgtataagaagaaaattgtggcaacattgttgtctcttctttgcctctagtgctagtttgtaggaaatttctaaaggtcttcaagattggaggatttttaaatcattcaactgttactcctccaggttcatcaaccaatttaatttgaggtatttatcctagttcatctatcaagaatgtttcagatttttttgattctgacaaggagtcagtggtcagtatgcgcagtgatgaatttgacccagtagaatgaggttgaaaaattggtcactgaaatgccaactgctgagattacaagaccgaatagaatcccattttcaagtcctgtggtgaagaaaaaagataggggggtagaaattttgtatggattactgtaaggtcaatcaagcaaccatgggtgacaagttcccaatcctgttattgaagagcttttagatgagtttcatgggtcttatgtgttcttgaagttggatgtatgcttggtcatcgaattagaatgaatgaggctgatacatcgaagacgacccaaaagatgaacacctggatgcaataggtttccattatcttattgtatatatgggctagaggaagaaatgataaatatgaatcttattctgcccccactatatcattcaataaaagtaggtggtccacagacaagacttcagctatttagtgcattattgacgacgaaacctctaggttcctctgtggttccatttgtatacattatcatgcagatattggtcttctatttggaagaaagttcatagtctaagcttcccaactgattgaactcctcccaagaaaagcaagatactaccagttctccagtttccttcttactacgcttgaaacattgataaaacaaaaactgacaatagttcttaattgattcaaacacccaggaagacatggaaaaaatctccataaaaattatccattctgggcaacacaacgacctctagtgctttctaattgcagatctcattctaattgcagtgttgtatgcttcttgatatgaggcatgtcccaccttggagtctcggttgatttgctaacaaccgagcatgcgttgcccgtattccttttcacaaaaatcactgaatagctaccatagagatgcaagcacagctggtaattgcaaaagcccatccttagcatagatgctcgtatagataaaccctgcaacagtagaccatccctgtgatagtagaccgaccctgcaacagtcttctactgctctcgggcatcacattctctctagccactgtgtaggttgtcagacttgccataaaaaaggctagaatttgaaaggaaaggagtgcgtgccgaagattgagttgatgtgatgtaatatcttggtttaattattataaaaagggggaaaaaagcaaaatcctattttcatgtcttggggagaaacgttgttttcctgcagtctttcgtcatattggcctgattagtgtcttaatttcttttatatgtatgattagtgatgatatgaagataaactccattgcaactccagttttctaaattcttgcctttacaatcatacagataagtttttcagagtggttcttgtctaaaggtgg

SEQ ID NO: 7288 - DNA, 280 bp, Cucumis sativus
  Intron number 1 from transcript Cucsa.385150.2 (locus Cucs a.385150) derived from phytozome v7.0 (chr-ID scaffold0390 4; pos 517410 to 517689)
cgtcgaaaaaccctagcttcctgtcttctcaccaggtactcacccatccttgttcttctatcctatgtttattttgttgaacctgctactcgattctccattattgcaactattttactcttctttcttctttcttcttccttcaatctgatcttcagttcttgcgtattcttcattcgatttggtttggttagtctgtttgttataattgtagtttattgttttttttgttttcttctcaccagtttgtagctacttcttgggaaagacaaagctccga

SEQ ID NO: 7289 - DNA, 534 bp, Cucumis sativus
  Intron number 1 from transcript Cucsa.311490.1 (locus Cucs a.311490) derived from phytozome v7.0 (chr-ID scaffold0299 5; pos 1075173 to 1075706 reverse strand)
aaggcatgatattgtttatctctacaatcaattgctttattatggatttatttgctcatttactcgatcgattctgtgaattttagtgattactgttgttttgattgttttgttactgtaaattcgaaatagttgtggcggttaatcacttcttagggctatattttgaaatgtatggagcattgatgaaaagaagtagaatcaggatttgttgtttgtaggttgaggcgtcttggcgcttaaatctagaatttcaatttggcttagaaattacttgctataacttcttataacaagacattataatttcatcactggttgttgctattgttcttatcgtagtttagctataatgagatgagaagtgtttgtgctcatggtttcgatgttgactggatttgtagagatgtagatggaatgacaatgtgataaactgagacatctactttcattcattgtataatacgattttcaggattccttttttttgaatctaatagttcggatcattattgccttttccatgcttcagag

SEQ ID NO: 7290 - DNA, 1132 bp, Cucumis sativus
  Intron number 2 from transcript Cucsa.322570.1 (locus Cucs a.322570) derived from phytozome v7.0 (chr-ID scaffold0308 0; pos 2304379 to 2305510)
ttccattctttcagtggttagtcggcccttccgaggtattttcatttcattaaatcttcaaaatgccctcatctttatgaatctctttgtatattttgtttcacttagtactctctgttttctgtagaatcggttttgcacatacatgctttgaatagctattgaacaagtaatgttagtgaatgatttgaaattgcttgcgttctatattgtagatggcttttgtttagaccaagggtataggtataattaaatttacggttcttcgtcgacttaaggttttcaaacttagtctcgtttagtaactgtttcatcttttgtttttagtttgagtagattaagcttgttttctctccattcttacgatgatttgcattctttcttttaagtacaaaggctctagcaaaaacaaaaacaacatttcaacaagctaccttttttagttttcaaattttagtttagcttctaaatcattggtaaaatgtagaaaataaaggaagaacgttaatggttaccaaaacggagtcttatttatttaaattttaaatacctttcaatataaactctttgtcgtggttagtttctttctgccattgatgctatgttatgttaagtttgtttatatctttctcaaacgaagtttacttgtgatcccctgctgtgagctaaaatgcagaatcccaaaacaagttccattttaggattttaattaggaacgcagtttaccaagccttcaacataagcttgtaatttgggagaagaggtaacatacatgcaaaacaaagaaaactgtctctaatgccaaagttggagaggtagaaaacttcagaatttaaatgaagcttgaacttaaagttacctcatatacttataaagagaatcgcctagtcttaaattagttaggattagatctaattagccctaggcttattcaagcctagctaggtccaatttcacctacaataaccatcaaatgatcttttgttggagggtgatctgattactattagaggctgtgacagcagaaaccatgcattagcattttactgagtaattttgacatataaactttcaatatgaatgaaagaaaccttagatttcctcctgttttaggttgtggaagtggaggtaa

SEQ ID NO: 7291 - DNA, 1182 bp, Cucumis sativus
  Intron number 2 from transcript Cucsa.259890.1 (locus Cucs a.259890) derived from phytozome v7.0 (chr-ID scaffold0222 9; pos 6237671 to 6238852 reverse strand)
ttgaggagttcaattttagagtggggtggaggaatgttagcgtttggagtccaaatccgaaaaatccttcttcaaattgttgttggattcctcatccattagggagttggtttttgatgtggtttggaggattaagtttcctaagaaagtttagtttctttacttggctacttttgcttggttgggtgaacacttttgatagacttgctaggaggatgacctcacttgtgtagcctttctattgtatttttggtagagggtgaaggaagacctggatcatctcctttgggcctcaatttgactttttgtagttattctataggtgtgattttacatagttggagtaccttcttgtaaagggagtccacttttttttgtggacttggttttatgccggtgtttttttttctcaatgtaagattaatttttaaaaaaagatatatcaagagaagtgaagagtgattagggaggggcgtcaggtagtatgggataatattttctcgtcttatctctagtttgtggatgatatctttgaaagcctttgtaatttatctctggtactttttcagctttggctcttttcattacataaatgaaaaattttagttcccttaaataaaaaagaatacaagaaaaaactatgcttcgtaactaattaactaagttagctgacaagataccaaactagttcattaatggacttgctaatcaaggtaactacaaaattacccctaatgagcttacatcattcttcttccctaaaaaatcggacttacgtttaatttgatatgtgtacagcaggtttgagatctatcaccatatttcagctaacttccaatcattttttgagttttcagacacatgagatcctgagatggacaagtggacttgcggagcatgagatggggctctttagtgctgaatggaatagaccatttaggtacaattgtactacatctccaccaaggtccatgttaacatcccaggcagacctgcatattgacttcaacataattccagatacccattctggaaaaccttatttattaagtaatatctttagaaatttgcttgtgcttcaggatattgttacgatggtatcatcgtgtcttcatgatgaatactataagtgtaatctattctatagcactttgggttctatctgtgccatccctgattgta

SEQ ID NO: 7292 - DNA, 8211 bp, Cucumis sativus
  Intron number 1 from transcript Cucsa.140560.2 (locus Cucs a.140560) derived from phytozome v7.0 (chr-ID scaffold0107 1; pos 526759 to 534969)
gtggcagggatcaaataccaacagagacaattcaggtgcattttattatgctcatatccctgtttgtattctcctttcactagatgactttgaaaaaaatgatttcatatgtatcatgatggaacataaatatttgggaaaataagtttaggtttaaaaggtccctcgattaactttatacttttattttaaatgattatataacattttaaattagaagaataatttctaaaagtcatatcctctctacaactatttttttttcctaattttgaataacatataattacttttaaaaaatcaaataaaaaatacttgtcagactctttaaacatatttttagaagctcagtaactaaaaatgtacattttgaaaactcaggagccaaatggtccattattataaacctaggcactaaaatggtacatttctaaaacttagggaccaaacgcacatgttcatcaaaacttggggactaaaaaggtaatttttcctaaatatgttcacaattggattgcgtcctctcaaaatcgtttgagtaggatatgaataatatttctacaagccaatccatcatggattagattcagaagtcatggctacatagaggcataggttacctacttggaatagtaaatatctgttgattatttccgttattgttatattttcattgcatttaaagatatgtttgtgtatttattttttccttgttttgtattttcctactttgtatcgagtatttcttctatttaagaaaacccttttctttctaagtgaaatgaaagaaaatacattttacacatgatatcaaagcagaaataacattgaaaccctaaaaaccctaattttcttaaaaacaaaaaggctattttccttgttgccactgttgtcctctgccatcatcgttggcccttcagagttttctgaccaccacgtctcctccgtcgctcggtttaagccgtgttttgcttcttattttcacgggtccttctagggtctcacttctttctgtcagtcagtcaagtttgagctacggccgccgtgttctgccacatgtcgctgtctactgccgccatccccggatttctctcttttttttcttgttttttttcaaaattgcttttctccttttgggtctgtattttttcaacaatatggcattgtccactaccactgaagtcctagacaaccgtaccctaaccaacaatcgcattgtccaaatcactaccatttggcttaatgggaataactttctttgttgatcccaaagtgttcagatttatattcgtggacaatggaagaatggttacattactagagaaaaaaccgccactagaccaactaatcgttcatttgccaggtgggatactgaaaactccatggttgtgacatggctagtaaattccatggttgaagacatcatctgtaactgcatatgcgactctacagccaaggaattatgggtagtgttacttagaagcattttgatttgggcaaccagtcacaagtatttgagttgaatcttaaactaggtgatatatgacaaagaaacaactccattacacaatactttcactccataaaaagtatttggcaagaccttgatctctttgatacatatgagtggaagtctatagaagaccaaaagcattataggaaaactgtagaagatggttgtattggaaaattccttgcctacctcaaagttgagtttgatgaggttggagataggatgtttggtaaaactactattccatcaattaataatgttttttctgaagttcactaagaagaaagtcgtaggaatgttatgattggcaaaagacttgtcgattaagttgagagttttgtattggtgactaaaataccgctttgaaggcatctaaccaatccaacaagacacatgaaaaatctcgtgtctgtaaacctcggcatacacgtgaaacttgtttgaaacttcatggaaaacctgtgaactggaaaagttcttagaaaggagaggaattttcatcaacatgcctctaatgctactgtagttgacttctcaaccctcttaataaagagcaaattgatcaaatcctgaagctgttaaaaactaattcatcatctggtaatcctagtgtttcctttgcacaatcaggcaattgttctcaagccatctcttgcctcaactccgcttcgtggtttatagatttcaaagcatcagaccatatgaccaatctcttgtgccttttcgaatcatactctcctatatattgcaatgaaaaaaattgcattgtcgatgttagtttcacctcgattgcaggaaaaggaactattcctttgacagcaaaactcatgttacattttgtccttcatgtttcaaaattagccttgaatttgtcatctattagtaaaatctctaaggatgctaattgtcatgttgtcttttgtgaatctcattgtacttttcaggatcaggactcaggagagatgattggacgtgctaagatgattggtggtctctattacttttagctcagggcttgagtagtgtttgttcttcttctgttaaagatactataattctttagcattgtagattagtccttggacgtgctaagatgattggtggtctctattacttttagctcagggcttgagtagtgtttgttcttcttctgttaaagatattataattctttagcatcgtagattagtgcatccaaatttcttctacttccaaatttatttaaagatcttgattgttcaatttttcaatgtgaaagttgcatctttgctaaacatcatcgatccacgtatttgcccaaaccttacacgactttctcaccatcttatgtaattcatactgatgtgtggggtatgtctgaagttttgattcatagcgataagcattggtttgttacgtttatcgatgattgcacttgtttaacttggctttatccttgaacaaaaaaaacagaggtaaaagaggtttttgttcgattttacaatatgattgcgacccaatttcaaactaaaatccacattctccactcagataatggtactaaatattttaacgaacaattaaccaatttttgcaagataagggtattttctatcaagctacgtgtcgagatactccttagcaaaatggcattgctgagcgaaaaaatacacttacttgaagttgtaccaaaatatttgtggggtgatgtagtccttactgttgcgtatctcaaaaatcgaatgccaactgaagttttgaattttaaaactcctctaaatcactttagcgagttttttcctactattaggttgttttttgacttactaataaaattttgacttactaatattcatgctcctacccctacactaattaaacttgatcctcaagccattaaatgcatttttgtaggtcatgtgtcccgtaagaaggcttacaaatgtttccatcgaccatttggaaaaaagttatttgagagtatgcatgtgtctttcttagaaaattaacctttttttagcccaaattctcttcagggggagacacctaaacttgaagataatttctgggactcttcacctacctcaaacatcattagtcgtgaaattatgagttctaatcctctaatgctaaatgtggaaagttcttcttcagagggagaaacactacaaaaacttgaacttcgtgtttatactagaagaaacttgtctcgaagtaatcgagaacagacaactgagctttcacaggaccattctaattctccgatgaatgatcctgcaaatccaggtaacatacattctccttcacataattccctagtgcttctcataattttcctagtccttcttctgataattccttacctggtatctctgatcttgatattccaattgcccataggaaacgtacccgccagtgtaccaaacgtcctgttgcaaactatctttcttatcacaaattgtctaacaatcataaagccttcacatccaaaataacttgtctgttctaaggaatatacaagaggctctaaatgatttaaattggaaattggctataatcaaagagatgaatgcgctaaaacaaaattcacatgggacatagttgaacttcctaaagataaaaaaacagttggatgcgttgttttatatggaatgaatctctatttccttaatcatttaatagaggtacaagcctatatataaccatagagaaatacacttaaggaaataatatcaaataatatcttcataataatatcacctaagaataatctaattacattaataccctccctcaaacttaaggttgaaatcacaaacttgagtttgctaagaactaagaaaagaaacaatagatctagaatagattaaaaaacccgaataacaaacacacaaagaacttctaggctaaaacaaacccacaaagaacttctgggatagaaacatagatcctcgtatagagatctataacaaaacctaggaaggacgaaacaagaactccgggggcaaaattaaagagcaaaattgaagcaaagtatgatcaaagtaggacgaaaacggggtcttaattgggcaagagcatctcgtaggatcagaatggaaccgaatgaactaaactagggtctgaattgggcatgagcgtttcatcggatcagaatggaaccgaacaaactaaactagggtctgaattgggcatgagcgtttcgtcggatcagaatggaaccaaacaaactaaactagagcaagtgggaatcagactgaacaggtaatctggggtgaacagagcgaaaactgaacagagttgagaggttgagcggatagagggctatgcggcgttcttcgcaaacagagaagatgggtttcatggcggcgagcttcacgaacggagagcagacggagccgaacttgcgcgttgtcgtctatgagtggggtggagctgtggatcatggatctgaacagagattcagcttcttcgtcaggattgggagttttcaaccaaaaggagtcatctggtacgagtaaggggcagtggtagcgggtcggtctgatctggaacagtatggttcgaaggaggacaggatcgatagatctgggcggaagacgaaataagacacgaatctggaagtcggagacatgaacggagatgcgcagacaaatcggtggttgcaatgtgtgaataggtagatttgagcgaggacgaatggagacgcagatctgggcacgagaatgcgacaaactgtgtgaatggaaggagtagtggtggcggcagttgcggcggaaggagtagtggcggcggtggcagaatcagagacgaggattttatctatgcggtaaagcgaactacttggaggaatgatttgtattaattaccgatgggaatggctctgcctccgtcgacgaatcaacggaggcagacgaatggggatgtgacgactagaatacaaggaggctaaaaccctatagctctgataccatgttgttttctatggaatgaatctctatttcattaatcatttaggagaggtacaagcctatatataaccatagagaaatacacttaaggaaataatatcaaataatatgtccagaataatatcacctaagaataatctaattacattaataggatgtaaatgggtgttcagtataatatgtaaagttgatggtaaaattgaaaggtacaaagccatactggttggtaatgggtttactcttaagacctatggagttgattatcaagaaacatttgctccaattgccaaaattaattccattagaatttagcctctttaccaacgagatgttaagaaagtctttttcaatggggatcttgaagatgaggtatttatggacttgccacctggttttgagatagatctcgggattaacaaagagtgcaagttaaagaaatcagctcttaaacaatctcctagagcctggtttaaatgttttgaaaaagcagtcatgagctatggatttagtcaaagtgaagccaatcataccatgttctataaacatacaggaaatgacaaggttatggttttgatagtttatgttgatataattctaactggtatgtgctaggcctccaattactcaattttaccaaaggaggggtaaaaaggaaaattccacctagacaacatggttgttaggatgaccagtggtcctaacaacacgtggcagcagcagaaaaggaatatatatgtaggcgttttgtgctagggttgatcatcttggtcattatgagttttgaatgaactttgttcattggggagagagcagccctcttacttggctgtaacctgttgaactcttttgtgagcttaggatttccatattgactttatatatcaatatttatctatctaccttcatatatcatcttttctccatctgtgttgtgtttgtgagtgtgctggaaatattctgtggatttgtgtgggagtgggttgaatcttttgcaggacaaacaagatcctaccagtatgatgagacatgagtaacttttgtgaaaaaaaagttagttgatgatttccaaatcaaagatctaggaactttaaaatatttcctaggcatggagtttgccagtccaaaagtggcattcttgttaaccaaaggaattatattcttgatctactaaaagaaataggtttacttggctgcagggtagctgaaactcccattgagcagaacctgaaattggacattgctaaggaaaaagaaataaaagaaaacgaaaaatacgaaagacttgtggggagacttatatatctctctcacacacgtcctggcattgcttttgcatttagtatggcaagtcagtcatgcatgctcctagaccagctcactctgctgttgtttatataattctaagatatttggaaggtattgaaagcaataaacacgaaaacaaggtttacttggaaacccgagtaccgggagaaaaaccatgatattgttcttattattttctaataacttacaaatgtacaatgagggagaataaatagaatacacaaagacataaaaaaggtttatggtaaatctttccataaacacccatgggccaaacccacaaattctaacataaggtactccaggaaaaggcatagtatttaaaaaacatgaccacctaaatgtcaaaatgtacatagatgctgattgggcaggtagcacaacaagatccactgttggtggttgctcctttgttgaaggaaatcttgttacttagtgaaggaaaaaacaaagcgtggttgcaagaagtaatgcagaagcagaatttaaggcattagctcatggtatttgtgaggccatatggataaaaagtctactaggagaattgagattctctcagacaatgcctatgtgcattttaataacaaggcagcaattttcattgcccacaatctagtccctcatgattggacaaaacatattgaaattaagttattaacatttcataaaggagaagattgtttaaggaataatatgcatcccttgttccgacaacgtaccaaattgcagatgtgttaactaaaggtcttccagtgtgggaattcaatcacttaattgacaagccggctatggatgatatcttcaaaccaacttgaggaggagtgtttattatttcttttgttaattctttcctttattgttaatgttttctttgtatttaaagatatatttgtgtatttattttttccttattttgtatttttctatttaagaaaacccttttctttctaagtgaaataagagaaaatacattttacacaacatctaatgtttccgaaggacaaaatattattagataaatccagtaatctggttttgaatgtgtaggaacatttggttctttagattaaaagaagctccacgaccgttttctttttctcgtatggtttttgagtgagtgatatttgtggtagttggattttttgggtaaatgcatctgcctctttgaaattttttgcctctttctgtaatttttgttctagctcagtattcattgaatgaatatgattgaaatttgaaattatacggatctttgcaccatcctttttcactccatgctcagtttgtgggggcaaaagaaagagaatagaaagagaacgatactcattactcacattggactgctcaatatcttgttggacgccttaattttattttttaaaacaaaatttcttgctatgcaggttttgaccgagcataaga

SEQ ID NO: 7293 - DNA, 6693 bp, Cucumis sativus
  Intron number 8 from transcript Cucsa.355670.1 (locus Cucs a.355670) derived from phytozome v7.0 (chr-ID scaffold0357 7; pos 178716 to 185408)
ttatctcttggtatatcatattctctctctatcatttcccatatagaatgatagaatgtatttcgcttttatgtaaatagaatatatttgacgtttttatgaagtaatctttttgcaactcatggaaactagaggaaaagagcttcttctcttaaaaggcaatttttgattaaatgaataaaaaatactagaaacgtaaaagagaaaaaggccccataggagaggaggcaacctaaaccaattagggcctccatccacaaaatgagatcgatggtataattgcaagttagaaggtgatcaatgtccttgatcctattaaggaggacgatttccttaagttgtcctagatgttaactctattgtggattattgcttcagataagtgtgaccttctcgagaacttaactttacaaagcgaggctaaattggtattgagataaatatccttcctcctcaaataatttgtaaaattcccggtcctaaattaaagagctgatatatgctctcttcctagtggaccatggatgatggaagtgaagcccaagagaaagagatcctatggtctttcttcatcaaagcatattttggcatatttggcccgagcataaccaccccacctttgaggacaaagctacgaaattcacttcctttttaatcatcttgagttggtccagtggtaaaaagtagtcaatttcaataaatactaagagatcaagggtttaatccatggtggccacctacttgggaagaaaatttccttgatacccaaatattgatgggttagaggagttgtcctgctagattatttgaggtgttcataagctattctgaacactcacagatatcaaaaatgaaaaaaaaaaagaagaagaaattcacatctttctttggacacctttacttgtattttcttatcttggtctgtttttaaagcatacaaaaaaagtgtggaccttttttctggttagtgcactgtatattactgcatgaaggagacaaagcataattgatgtgaaaatatagaaaaacccttatacatgaggaattttgcatttaggcttagtgaattttgagttattgtatagttaataaagaaggaaaaacctcaaacatttcttaagaataacaaaaaagcctcacggcttaggagtttagagttccagccttggggtatcacaaaaggtgtgtacctaatgcatagctttaagacgcctctttacaaagtgaaaggacatatctgtggactgtgcataattcctaggtgggtgcttgggagggctttttttaaaacactgatcatgatgaaaattttctccattttttgtgactacggtcttgcatctcttgtacccaatagatttgctttctgtaatctacataacatcctttgcccttgtaatttcaaccaatcaatgaaattcagtttgtttgtttctcattaaagaaaaatcacaccacaagtcaaacacgggtgacactaatagaagaaaatagaactcaattcacagaatttggttggttgaaccacctcggtcttcttgtatggcaagacattttctacgttggaattttttgtaaaagaaacaattcattgattcaggggagaacacattacaatgtattatgagagagaacttcaattactaactaaaaaagataaacaaaattgagtgaaagtgtgctaagttttacaccaaaaaaaaagccatagataaacaagttccataaaataggtgaaaaggagaggaatcactaaagagccgtcagttcttttcactccataaactccaaaggaaaacgtgaataagagccaaccaaatcagtttcttaatatgatcaaaagcagtgttttgaaaggcgccattgggtgcatgcctaggctcaagttgcacggttggggcttctccttgaagaggcgaggcgttttgcataagtcttaactaaggcgcgcgctttccatgatgtgcaaaggtgcaaaaaaatggcaagatgtgggatttatttctatgggacttctgatggctttcttaattaaaaaaagacgttaaaatgtattcttttaaaccctaattgcatgtcttcaatgttagtaaaaaaaatccgtcattttcctttcttctctgctatttaacccaagcgtctacccttattctttttcaaagaagttgtgagtctgtgaccggcatttgccaccctttttcttcttcatacaaatcacgatcataacttcaaattcacgacaagcttttcaatttggtctccatcccatcttcttcagaaccaatatttggtgccattactcggttcttttggagcaaaaacagagaagactaagaagctttccaagtctatttttttcatcattaatccttgcaaaatcattagtggttagccaagctttgtagttgcaatcttcatgatgtactatgctactgccatacaattgacaaattttttctaattatttttgttttgttacttcatactaattttcataacataggtcatagatggttgatgatagtttgagaaaagatccgacatggaaatatggtcgattacaaaatgaccaagatataaatacatatgtgtgcggattttgttcgaaaataacaaaaggaggggcatacataatgaaacaacaacacctcgttggtggttatagaaatgtcaccacttgtagaaaatgtccggattatgtgaaggaggaaattaaaaagtacatgtccaagaaaaaaatgattaaagaacaaagaaatttgattgtggatattggtatagaagattacggtatcaaggacgcggatgaagatgaagggagtgttagtgtaaacaatttgaataaaagagcaacaccaagtgtctcgagcttaaagaagcctagatagatgggtttaatgtctatggatgcattttttacactcaacccaaaaactgtggttcaaaatagaaagaatgacaaggaaagggaaaacaaaattcgatgaatgcgacatacaaaaggaaaatgagggagcacaccatccaaagaattgcttgatgattttatgatgcttgagtttttctaaatgcttgcacatatgatattttcccccatgattgaggcaatagggcaattcagtcctggattgaaaccatcgtatcatgagttgagagtctcatgtttgaagaataaattagaagcaacaaatgagttggtgaggagccataaggcagagtgggccaaggttggatgcactattatggttgatggatggaccaatagaagaaatatgacactaattaactttttggttaatagtcctaaaggcaccgtgtttattgagtctattgatgcttcatcttatgtgaagaatggaaagatgtttgagttacttcaattttgtagagtgcatcggagaagcaattatgatttacaagtagttacggatagtgcctcagcaaatgttatggcagttaagaatgtagagtacttacaccttcaatttgttagacttagttctacgctacacttatatttacacgtttcagaagcctaaatgtgtactcattttctttattaatagggagaagcaaagtgactactattaatttggtctccttgtgccgctcattgctttagatttgatgttggaagatatatacaagatctcgaatatttgtaaatcattgaaaagacgcatgaagattagcaatttcatatatgttcgtcctggatttttaaacatgataagacgttttactaatgaaaaggtcttagttagaccaactgagattcgctttgctactgcttgcatcaccttatcgagtatacatcgtcaaaagaacaacctgaggaagtttgctttatgtgaatggtaggataactaatggagcaagtagcaactaggcaaatgactagttaaaactattttgttggctagtttttggactataattgtttttgctcttaaagtatcacgcccactaatcagagtacttagattggttgatggcgagaagtagcctcctatggaatatatttatgaggccatggacagagataagtaagctattgttaaatctttcaataacaaggaagaaaaatacaaggacattttcaccatgatcgatggaagaatcttcagttccatcatcctctacatgcagcaaagtattatttaaactcgatattctattatttgaatcctaccattcaagagaatgatgaaatagttaatgttctgtactcatgtataacaaaaatggttgcttcattggacatacaagacaaaatacttgcatgagctaagcaagtacaagagagctgaagcattgtttgtacaaactttagcaatgagacaaagggataacatatctctaggtaaatttcaactaaatgattactcaacgatgcttaattataagctattcttttaatatatatttttggttcgtgtctgtagtgaaatgatgggataattttgaacaatcaactccaacttgcaaaagtctgcgataagaattttaggtcttttttatagtgcttctggatgcgaatgtgtaattgatccgtgtttgagcatgttagcttttctctcctttaagtaccttgagaatgagaatcaagttttgttgatttaatgacaatggaactttctaattttgtagctttaggcttgctcaaaatcgtctaaatgatttagtgttcatcaaatacaatagagcattaaaatgtcaattcaaccttcaagatatcatcgacctcatctctttaaatgatattgatgatagtaatgaatgattgattggaagattggatgatgattttgaggaggatgagctagtagggatcatgtttcaagagttgttaggcaaaagaaacagcctactattctagagctagtacctcaagagctaagactaatgtttcatgttcatcctcgtccatcactcaacccacacccacacaagtaaatatggataactctgagtcggaagaagaagatatagatggctataagttcaacaattgagtgaatgaagatgatgaccaatttagtgatgatgagtttgatctttaggaattaacttctattttgaatgctgactattgtgtagttacgtgttgtgtcttgttttttttggggcgataattgactagtgaggtagtttctcgcatgattttgtgtagaaaagctaatattataaccttggttatattttatacattgtagttgggcctcattgacacccatgaacattttctgttttgtatatacacacatatatttatgtttttttatccatagcgtgctttaaaaaaagcctatgcctttttgtgcgccttgcgcctaggcttgagagggccattgcgccttactatatcccgggctttatcaaagaccgaccaaaagaagacccaccaacatcaatgtcaaggcatcagagatgttatgaaggtgagtgtaggacaaaccaaatgcagtcaacacaatatccaaaaactagcaacaaaagaacacttcagaaacaagtgaactggcgttttggcatgactgtcatgtgacacatatgacaccaagagggagaaagatacataaaaggcaaatggcgttgcaaataatcaataacattaatagcacccaactaagctcccaaagaaagtttgtaatctttttgggatatcatctttccaaatcatagagtaattatctgattgaactgaatccatagcaaccactgaccctgccatatgagatcttttaacagaaaaatttacagaaggatcaagcagccagaaccaagtatcgggagaggaacacaaactgacaggggtcaaatgaatagataaagaggaccattcagaaatctcccactctgtaagattatgacataaattaaattccaaaaaaatgtagaaggaatccaaacatttgccacagatggctcagactattgaattctaaaaggccgctgatatgaacaccacaattaagccaagtcatgtcaaaaagacgtagatgctcgatcaccaagacgacttccagtactatctgcaaccaaatcaatatatttacaaatgaatctccttctacgttggaatataaagaccagtaaagaataattaagctatctgcccactcccttggaacaaaagaggaaatctctcctttgttggccccccttctttcaatggggtggttttgtggggctgctttttttgtatgcacttgtattctttcattctttctcagtgaaagttgttatcataaaaaaatcttcttggtgtaaattcccttcttatttctgattaaagtatcacatctcttatattgtcatggaatagtatgatgtaatctctcacggtacattttgcccttttgtaatttcatacatcaataaatttctgattgaattttctcatagaaaaaaaaattgatataaaaaagccactacctgatggttaagttctctctgaaatcgtagaagtgggtagtcatgtttgaattgtgtttatttttatattctattgtattctttcttttcctttctatgaaaactcagttatcatcaaaaggaaagttggaacaaagatttatcgaatcaaataactttgcttatgaggtgtggttgtgagtgtgatcttcatgatggttagtaagattggttttgggtttattttttatgacagttattttacccctgacacat

SEQ ID NO: 7294 - DNA, 1305 bp, Cucumis sativus
  Intron number 2 from transcript Cucsa.298520.1 (locus Cucs a.298520) derived from phytozome v7.0 (chr-ID scaffold0290 1; pos 128459 to 129763 reverse strand)
caattgaacagtgaaggccttgaggtcaatttccttatgattttattgagatctagtgaatatgctattcaaatgtctaaattcatttcatctgatctgtttcatttattactcttaccttgtttgacgagttctgaccaaaataaccataatttgatgactagttaatgaaattattattatattccaccatgaatattgaaagactggctggacatgcaaaatgaaaatcacaaataatgggtctacaaaaaatatcaaatgttggctccaaacgttgagaaccatccaaaagaaatggacggccaaaaaagcctaaacgaaaaatttatagtgagccaagtttcacgcatccttccatgacctctctgctagtcttccccacaaaattcctcgtgttcctttccaactaaatacaccaaataacaaaacaaaataaaataaaaattgcctcccgaggaaccttcccattgttacagaaaggaggatgaaaactaatttcctccgcacatccctaagtctaagtgtgtgatcagaaatgaaaagcatactccagtccatcatggacgatgaattctcttcctgaaaaaggcaccttttatcaacagatgccaaagaaggaaaccaatctacccaaacaaacaaccattctgaactcttggagaacctcagcaaaacaaaagttgcctttctcaaccacaaacttccctccattcataaagcccaattcgaaagacttactttctattggaaaacgccaccaaacacgtaggcagtgataatcaaagaagaaagtgccagacttcttcctcccgaaaaaaaaaaaactaagcagctttctaacagtaactgtaacttcggcacgccaaagcctaataattggaaccaataattctgttgaatcttagcaagcaagagtgggttatggagtatccaatgtccattcagcagaaaacaccaataaatttaagtatataaatgctctaaaactccccctcatttatacgctttaaaatgtgtaaaatgcccaacatgtggaaatttcaatattaactaaggaaaaataaacattacaaaggtcgaagataggacttctttttctgataccataatagactatcaagcaaactaaaaacttaaacagaattacagaattaattccccaacagtctcatggattaaaatttagttattttcatttctatcattacaactacatatttcagttgtatgtcttatgtagtttgaattaattatgtttgcttttcaggggttgatccctcgtgctaaacttttgctaacaat

SEQ ID NO: 7295 - DNA, 1902 bp, Cucumis sativus
  Intron number 2 from transcript Cucsa.348790.1 (locus Cucs a.348790) derived from phytozome v7.0 (chr-ID scaffold0348 7; pos 234227 to 236128)
cttacacgtggagtggcaaggttgtttttctcttatttgatcttctaaattgttaatcgattgaagtgtcggtcattgcatcggggttctcttttccttattttctttgtactgtttttgaattatttgatgtgggtttttgtctttagctatttgatgagttcgtgatctggagtgggattggatgcagtattctctcgcattgatgatttttagattaggaaatgctaatttctgcatgtggtatttcaattgagtttgctatagattgtccaattggtttcctttgttgtgtgcttatgattcattatgttctcactatttttactttgttgtatcttgataaattcattgttggcaattctttttagagattattattttttcctttgattctttagtggatttggtcctgtctattgcgttgtattggtgtaaaactaagcatccttttaagaactttagtctctcttatgtagttcgtgattgtaaatctcgattttaatcacctttagatgctcggggtctcctctatttcatttattcatgaaatgtttcttatctaaaaagttaattgttgttaacaccaaagctggaaagactcacgaggattctgttgaaatgggattgggcgtgccaggcatatgctctgtggcatttggataattgaaaatccaactacagagatcctagctctaagggttggatgactttcaagattaaagtttcctcttgagtggtcttctttatatggatttttgtctaatggggacaattgcatattgattcctgatgctcattttttaactttggaactataatttatttctaaggataagttgaaattgaagtacatcatcaagagcctaaaaggttatttaaatctcctcaaattctaattgcttaaatggcccaagtccggtttctttttaactagaatcataggaggccactttgactgcactgcaccaactaaggtagcattattacttggaaggggtgaccacactacagattcagcaacatgtccttttgagactctagaattacccaaccaaatcgaagaaggcaaacaagttttgtttctggtgattctatgctttgagcatttagaaacacaatttttaaatctcctagcaagcatccaaatcattgcttttgttaaggactcttctagtttcaattagcttgcgtagaaggattctccacttccatattaattataatgttggaaacaattgatcacattgaactaatgcataacacaaatatacacacatatgtgtgtgtatgtgcatgtgtgtgtgtataatatacatgtatatttgttatttttccttttaaatctttaaggggcgtttggggcaagaagttggttattatagtcttagattattatagttgggtttatagtagtttgtgtttgaggtgtagattatttttctttgggttataatagtatgtgtttgaggtgtaaactgttttagttggatgtaatccaaaagaggggaggaaaatgaatccccaaacacttcaatatccaagatgtcattgttacaatatctctcctggccacttgccacttgccttacatacgaaattttctaggtttgttaatactgaatgccttgtagtaaagaatctctagcttaatcctgttaataaaacacgttagcagcttttaactatggagtaacatgttccaactgagagcttgcctcctaatatgcattgatgacctatgcttcctatgtgatgattttttttttcaatgtttgctttattattattttattacctgtacatgtagaaaccctggcttctctatattaaattcttactattctgaggtttatccattttttaggaccctgaaggtctcttcccctgtattcttggtca

SEQ ID NO: 7296 - DNA, 1827 bp, Cucumis sativus
  Intron number 1 from transcript Cucsa.042820.2 (locus Cucs a.042820) derived from phytozome v7.0 (chr-ID scaffold0054 0; pos 1145530 to 1147356)
tgggctccgaccagcaaggttcagaggctttttcggtaagtcaccaaggatcattgctcttctttcattttcggataatattttaattgtttcagtgttattctgaactcttagaacttttttttgggttaagtttaggtaaattcccaagtgttcgattaaggtttagcaagtttggacacgaacacgtttcgaattagttcggactcaattaacgtatgagtttttaacttgtgaaagtttgttggttctagttttggactaaattggagtgattaattaaggtttctggtggattttggtcaagcacgttcttgttcaaaaatctatgggtgtcaaggtttttgaatcgagttctaatacgtaaacattgtgtttaccgtctgggcatctattttttttttttttcaaggtagtggatttttggacagagaactgtctgttttgattattatgatttcataaatttttaagagtatgttttatatgattaaaggatggaatgaaagtgttttgtatattttttgtggatttttttcaaataaaagtaatatgtgaatgttttgaatgatggttggaaatgtttcaagtgatgttgaattgaaagtgtttctgttttgacttcggttacttttgaaaagttttgaaagattttgaattatttgatttgatgagttatgctactgaaatgtgtatttgaaacttcattgttttgtttcaaacgtttatgaaacaaaacatttcgaatgattcgataggggctatctggataggctaatttcagtgttttggggattttatgatattttgttgtagctcaattttgaattgacagtacatgatctaactgaaagttacttgccaaaagacatgtatgtgttgcactcaaatggcctcacacttaagtatttgatttttgttttggttgacattgttaatcaacatctttgattgaatgaatgactggtgttactgacaggtaactatttctgctgggttacttcaactaactatgcaactttcccactcgatattttaaagtattgtaggattaaaagttttgattttattgaagtattgactgaatgaaagttctgtttgattaaaagtatcaattgaaaactttgtatttgaaagtattgaatgattagtattaaaagcaataaaaatagaaacaccgacttatgtggaaatccaagtactgggagaaaaatcattatatttttgttcttattattttctgataaaaatacaataggtacaagagggggaataaatagaatagtacatagagataaaaaaggaaacaatatttagggcatttctcccaatgggctaagtccactaactctaacaattagtgttttagaaagtatgaaagttctgtttattaaagctattaaaggatactgagtatttttgtactcatcttgatttttcaaaaatgctttttagatgacatatcaggtgatgattatgagcacatgacatgaagggttgtttaccttagaatttgattgtttgatctaaaagttgtttgtagtaacttgcttttactgattgatgtaagttgtgaaagttataatggttatctgtccttatttttttgttttaatacttctattggaaaatatgggcagttacattgattttgttctttgatgttgttgggtttataagcttccctgtgttttagagtaatagcatttaaccctctctctctcagcttcttagcttacctacaatggcctcaactactgatgaatcttctcgtattcttcacgaaatcgagaccttgaaatctgccaagttcgacttagaacgtcg

SEQ ID NO: 7297 - DNA, 1104 bp, Cucumis sativus
  Intron number 1 from transcript Cucsa.302330.1 (locus Cucs a.302330) derived from phytozome v7.0 (chr-ID scaffold0295 1; pos 500758 to 501861 reverse strand)
ccgagctattctccctagccagtgaggatgatgtgcttaacgaagtcttcgcggatacatcctcggtgtaacggttttcaatatatatttttttccccaatctaaatttttagattcttaggatttattgaattcttttcaccatttttctcctttgatttgtaccaaatttatttcaccttccttagaagattttgggggatgtagggtggaagaaacagggttgttcatatgagatttgacttttgtattcctctcgaaatgcattgcgccctcgtgacttcggcgattgcttggcttatccttattgttcttctatttcttctccatgtcagttcagtttgcaaaaaaaagagaagaaaagcttccatattggagaatgatggtttaagaaagccacaaacaacattagaactctgtaaactcttttactagtttagcattgttgtcaatactcattactaaaaaggaatctcttttttcatttttcattcataacgttcctcatttttcttagaaacatcgtcatgtgatctttagaatacccatttcttgcctctccaatcttttagcttagcaaggttttatagtatatgaatagggttctaagattctgttttgaatttttcccacagttaaattgaacgcgctgcttcaaactgctattcgacgttgttcgctccgtctgtccgtcctatcttttatattccttaagtaataagcattactgtcagtacagttttttatgtctggtccttttttgtagataggaaaatgattaaaggcagattcgtttgaaattgttaaatttatatcatgagaaattatattgggcccattccatcacaatctcctatagctgaagctgagcttcattttctttcagcaccaaaagaaataaaaaagaaaagaaaagcaagctcttcttgcatttacttaaaaacatcaaaagtatgtcttgtttgattcattgaaacagtcgcacgtttcgtcgttgtgttattacaacgaaatatcgacgtcttacctggaagataattgtgtttgaatttctgtttattctttgcagacacatttgacaaagatatcctaggacttgaaaga

SEQ ID NO: 7298 - DNA, 2113 bp, Cucumis sativus
  Intron number 1 from transcript Cucsa.164290.1 (locus Cucs a.164290) derived from phytozome v7.0 (chr-ID scaffold0114 8; pos 150126 to 152238)
atttctctagctttgttcgccaacttaatacctatgtacgtttttcttatttacctatttcataatacactaaacaactttattatttttttttttaattttatggttcttcaaattctcaaaatttaaagattatgtaatgtaaaattgggcaacttaatttggttgtgttaaatgggtttgttccgagttgaactaatcaatttgtaacatagaaaagaaaaaaaaacactattggacacaaagaaaaaaagaagaggagtaattacaatgggtagttcttttagacctaagaagtattaggaagaaaaaagaaaccccttagaagtgaatcccaaactatacgtttgtgtctaattgaatctactaaaattaatttatagaaagataaaagaatagaaaaaaaaacaaaaactattgaacttttctatttagagtttgctcgttaactttgcattctaaagttccatcaatttctcatggttgtatataattgcctcataaatcatcacccatttatttgaatattatattactttcaaaaggctaataagaaaactaaataaataatatcttctccttaaaatttaatcttatttggaaatgtaagaaagaaaacaccttgttgaaatacaaaactcaactcaacctattccattttcttattcaatttttatttcaattttttttaccctgatagatgtctatttgctctataagaatctattaaaaatttcctttatttataaatattttcagttgttatcattaatcttttttgtaatttccaattttttaattaaaacttaacaaaacctaaacccctctttcaaaattgtattttattttatctcaatcagataattgttttacccttgtattctttaaaaccaaaacaggaaacaaagtaaatatatttattgaaaaaaaaaaggttaatatatattttaacaaattaatacaggactttaataattattagttttaaagtaaactaatacttcatttgtcaggttcataataaatttagaattattttcttcttttttattttgactaaattgatatttctggtcctacttgagactttaggtgagattttgacatccacaactttagtttgctaattaagtttgatttgcattcatatttcaggcccaaaaaatgatttaagttgtacttgtagttgtctgacctaacttgatttgaatttgcatcattaattttttttttttatttgacatgtttaattaactttttcacaaataaattaatgaatcatatttgttacctatctaaaagaatgaaaacaaaataagagaattaattttttcacaaataaattaatttatcatatttgttacccatctaaaggaatgaaaacaaaataagacaaacttcaaagccttaaaaaatccctattaagtattaattaagcattctcattttttttgggttccttttttttgttatcgaaattatttttcattaaatatggaaattgtatattcttccttcttttatgcatctttgcaaagttccattattttagacgttcttttgtcatcaaaagttaggtgataggaattctaattattatttaattttccaaaatataatgtacatttcaaacaataacaatttttttcacttgtttactatgtaatatatacatataaaacttgtttactgcatagtaattcttttttctcacaaaaacatgtttattgtataaatctaataccagaagttagcctcatgttaaaatcggttcaaacccccataaaaatgatttatggatccaccttggctagcaaacaaggttggctaaataaaatccactaagctggtctctttatttagattcttgagttatcagacttgagaaacatactaagcaactaagatttcaaaaccatttctaggaagttgaaaagtaaactaggcataaatcttattcattcaaaatagggatttatttgtgtttcttttttggaaaataaaactataaattgttcaagccttttctaatcaagttgcaaatttttttattcgtgtgtttttttctcttgttgaagggatttcggaaagtgagaacaacaaggtgggagtt

SEQ ID NO: 7299 - DNA, 2732 bp, Cucumis sativus
  Intron number 5 from transcript Cucsa.356370.1 (locus Cucs a.356370) derived from phytozome v7.0 (chr-ID scaffold0357 7; pos 1145595 to 1148326 reverse strand)
tgaggtttgtattcttcgtttggtctcttgtaaactagcagttggagaaagaattcctgttagtcattttataaaatttggatatttgacgatgatactctttgtgcaagagttcgttaggaatttgtccgtcattgcaattttccattaattgtgtggatgatggtctcctgaagggtcccagatcatgataaatgctttttaggtcaacctagttgtcgttgttgcaaaatgtgtcaccatcggcttaatattctacgaaagaaaattttgtttctaattaaattaatgcagctggctcgtaaaaatatttcacaaaatattcaattctcctctaggcttggagatcttgtagctataaaattaaattagttcatgctaagctttctgttggttgatttagatgcggaggcctgtatttagtgttgtaggagtgaatttttcttgtttcgaaaaagtagttattaaattgcacctactatttaaccatcatagtttgacctagtcgttaaaaaggagacaatctcaataactaagaggtcatgggttcaatccatggtggctacctacttagaaattaatttcctacaatcgactcccaaatattatagtgttagaagggtcccctcgtgagattagttgaggtggacgtaagttggccgaaatactcacgtatgtaaaaaaaattgtacgcactatttatttaatgtagtattagttctctattaaattgtatggaatatatataatcttagagctgttgtcaatttgttgatattaccatattcaagatataacattatattaggtaagtgatggtaaactcgaaagcataaacttgatatttaatttaatttttttgtaataggtcgcaacttattagtgtaaagtaggtcaatattagatttaactgcctagggatgttaccatatgcatggtagtgacatttgaaatcctttgagagtttgtgcacaagcatctcaatgctttgccattgcttaacggaggaatgtgatagagcaccgatatagtttctatgttttattgatatctccaatagaaattacaatgtaaaagagattcgtgattctcaaataatggaccacgattacaggaattaattatcatcaacaaacaattgaacttcaactaatcagtactaagaataaagcaaatcaagataacaaaatcgaaacacagaacaatagaacctggcctactgcttctcctctctctcaaggagtaatgcagtcctttgcctccatcaaaatttcaccctttcttccctctccaacatatctaattacccttctacccctgcctatactaatctaggtatctaacatagtgatggatgtgggtgtgcgatgttggtggatgctgcactagatggaacgacgacttggtgttggtctttgggtatctgttcttttttcaaatcggtcattcggggtttcgttttagatctctctacaaggatctttgtttttggccctgaagttcttgtttcatttttcataggttttgtttcaggggtttgattatgtactctgattttttcaatatgatataccaaattaacagaaaacaaagacaaatttcaaaaaccgaaaactgaaaaccaaaaccttaggcctttacttctttttttcttttttaatcttttaaaattaagcttataggcacttcttctaccttcaaatttcttcctctgttatgtgctttattctaatgatttaaaaaagatgcacattattgtaagaaatgaagaggaaacaagcttatttttaaaaaaccaaaaccaaaaaatgaaacgatcactgaataagctgtctttgtttgataataattttgttttttgttgtgtttttgaaaattaggcttataacttttccacctctaaatcttttgctttggtatgcactttttatacaacgccccatgctcaaaattcaaaattcatatccccaacatcccctgcgaccttggaacgtccttcttacttgtcttaaaggcctgtcagagtaaaagttgtcaccacaaaccaacacgagtcctttcagcatgctttgtcattactcacatgcatcctaggaaaatttccaagaggtcatccaacgtagaattgtttcgagctaagcactgttaaggaatgtgtatcttgttggtataggtagtaacttttcattttcttaagtttttctttaccttactttcatgtcctcaagattcccttattcagatgtgatattggtctattcatatctccctcataaactcagggcgttacaaatccatgtttttaaaaatcgaataaaaatttgaaaactaaaagaagtatttttgtaaatttgtttttgtttttcaaattttgcttagaatttaacctactcaattatggtaagaagatgaaagaaaatgaaaggaagtagacttaattttcaaagatgaaaaacaaaaattgaaatggttaccaaatgagctctcaatgattatcggccttgattagtttgacacaccaaaatcatctaatttgacagataagatatcaggcaaaatcttatgaactatggtatcattcaacattttatatgcattgtcaactctttttcccgagtaattatcaactaagtaatgcttgaatggggaataatgcctacgattctgaattctgaattcctttttctttatctgcaggtggcaaggacaggaagggtggcattggaacgaga

SEQ ID NO: 7300 - DNA, 3228 bp, Cucumis sativus
  Intron number 3 from transcript Cucsa.364380.2 (locus Cucs a.364380) derived from phytozome v7.0 (chr-ID scaffold0361 1; pos 1843501 to 1846728 reverse strand)
tggaagaggagaacgaaaggctcaggaaacgaaaggttagttttctttaaattcttaatgtggatggatgtggaatattttattttatacctgaatgaattgtcatgagtggtcgttaaattttaatgaattccatggtagaaatgaaagctcactctttcgatccaagtctggccacttcacttgtttgcccttgtaagctgtctagttcatattgtagaccacctctttatttactagatcccataaggctcttaatgacatatgagagaaaagcacagctgcatatctgagttcatccaacctcactagttttttatttttagattgaattttgcttcttcagcctgtgccattaaattggcatatttaatgcacatcatattgaacatatctgggaatagttggtctcctgacctttcttcttttatctcctcttaaattaattccctgccttgcatcaataacaataaagttttcagcatccataaacgttggtatgatttttcaatgaagttctttcatacggaatcatcaagtctgataagagtctaaagttcaaagagctttactttgccgattcaatcaatcaaccatccctgtccgtgttatcaacttaaatactcagctaagtttaggatgcctggtctgtatgtagccaatacctaaccgggggtttgagttcaagtttaatggcctgaaggattaaaggatagtctttttgcaagctagtagatttattttcatattctctctgttttcttatgctaaacaatggttgaaaagtgtctcactgtttctactattggctcctagaagtcttagaacattacaatttcaagatattgagaatcgagccatctttatttggtttgtgtataatgtatcaatttttttttttgtttgagttcagcatgtgaggtgagagatttgaaaacgtatgactaaactagttgaggcatactatagagccatctttatttcgtaatcctttttcttcatgcacttaaattgaacgtttcataaaccctgagggccttatgaaatttaagatttcatattctagttcaattgtccctacatgaggccatttgtaaagagtgagagtggaaatgggcagagagaatcattcctcttgttaaatttgggatcctctttttgaacaaaaattatgtttctttttttttttctgtacaatagttaggatccatttctgttatggttctcctacgaagggtagggaatatcgtcttattcacacattcttggccttttatgtgggtctcacaacctttctacatataacttataagacacgagtaatactattcatcgcatactggttcaaaaatagttttgtcagtattctatttgaagcacctttctgatttcaatatatttaattttgattttctgcctgttttcgtttagcaaatggacccaatctccaccactataagactgcacttgcaccttttaacttttttagcacacggcattcaaatcatgtctatgacctcatgtgcttctttaaagattgttgtggtctgaaattctcattagtcatgcctagttgctgaagccaaaatatcatgtgtatatatgtttttattacaaagccagctttcatcaagaaaaagaatgaaagaatacaaaaggactatgccaaaaagggaaagcctaagaaaataggagctagaaaacaaaaaaccacctaactaccaaacactgaacgccattaaaataattcagtcaatctcaataaaaaaaaaaggatgattcagttaaatattgtaagattcatatctgataggatattgttgcctattggcaatgatacagttggaggccttctgtttgacccctcatttaggaaaagtgttatcttgtccctttgtcttttagttgttttgtttttcctttgacttttgtgaatggtttttctccctgtttcttatttaaaaaacaatcaattattcaattaatgaaactgagatgaagcttgttggtccttcatgattgcaaaaacttcaaagcttgaaactttttagaattctcaaggacacagttgtacaacttatagaacaaatcttgttcaagtaagttcgtttcaaggcttgaaactttcaactcctttctagggtctttatggatactagtagcctttcctttggacttttagtagtccactatgttagcaaatagcacttccgacgttatgaaccaaaaaacttaaactataaacagtatacttcagtgagtgcaatagtttttaaaaatgttcaagttcaactagatcaaatcaagttggttatttatgatccagttgactcattcaatcaatggtagagcctatattgctttcttgttacagaacatcattctaaaagaatctgtttgcctttaaagtaattgtcattgtaaatcctgtgcggtggtgtcctttctgttattggttgtggatccaattgagtgttctggaattttttatattatgtggttcaatagtttgtttacctttattcttctatactgctgaagagacgtggatgattctgctttattatttcttttattatgttgtttttcttgggctgttttgaatcttgatcaagaaatagctcttgagaaaccattgtgaggtgagctgatagttgatatttaaaagtataaaattggatatttccgaggttaagaactcttgacctacctttcttagctccaaatgttgtagggtcaaatttttttttttaggatagtggaagtcaactaaatgctcatccagattgaatttgaaaagcttgctgttcgagcacttgcaatctttaggaaagatctgcaatcaaatctaaaaccttctttttaacataaagctaaagaaaatatgtttaggcaatcctcttggcttcttcttcctttcaaaattatgagttacttgcaaacatggagactcattcacgataggatcatagaattcattttactctagaattagaacctatctagacaattcatttcttgtttaaactggactttgcctttttgttagattactcattcggaaaatgtcatcctctttgggtatcatggcaatggcaatacaaacaaggactactaatatactgtagtcttttcatttagggtgtcttaaacatttgaggctgtatctacttaattgttttggtttttgcttcaaggagtttttcttacatgtaggagctggaaaag

SEQ ID NO: 7301 - DNA, 1317 bp, Cucumis sativus
  Intron number 4 from transcript Cucsa.044370.1 (locus Cucs a.044370) derived from phytozome v7.0 (chr-ID scaffold0054 2; pos 753643 to 754959)
aggttagaccttaatgcttctgttcgatatcattggtttgaatgagaacatttgtctggctggatgggcatgcatcatgattgtacacctacatacagtgtgaacttaaatgctctttgttgaggcttcacattaatttccctcagttaacctcgaggaaaactggccacccttttttcaaaagaaaacaatttggatacttacattttcttataaaaaataaaacttcctctttactttaggtagatttggggacacggcatcttcactggattaaatgaatactacatgaaactatttggaaaatgcatattcacacataacacaataacaacctttgctgttatatcctcagttacagaatttcaattggttagaatcaaactaaactgatttaatctgagagatattccttcagatgctgaagttaagacagccccaactccctatggcagggtcgggtttgtaatggagatcaaatttaacacctgttttcctgtgatcatatgtgatatggtgggttgatgctgaccccatgaggaatattagattggatcatacttctttggtaaggttcaactaggtggtaatcatgaagttaagtaaacaaatggtatggtaaaaactgaaaagatgtgatccccaatttcaggagctttagttttttggtacacttggatgccctgggttgtagggaatgaggggaagacaatctagataggtcctgggtaaggaccacaatgttatggtctgttcatgttcaaggtctattaaaactcgcatatttacttatactgtttaagatgacaaaaggcatcccctatttattgcttgcccttttcttttttttcctttttccaaagatagtcacatcaaattgtttttaggacctcacaatgtttataagttacatggaatactactttgttcattgatgattggttttgagataaacttacctgttatcaaatatgatatcagacccataagttcacagtagatattctgactaaaaagggaaaaaacaaagagatctaattcaagaatctgaacaaaaaagatcacaatcaagatgggtatgttgaggatcttcaataggtattccgttcacgtggactacactactcattgtcgattaattttgagatgaaactttatgttatttaatatttttctctttcacgtcatctaatccaatacggtaatatctgtagatgctttctctatgattgcaagtaaatcttgaaacttctgctcttactgatgttttccttgtgatgtacatattcaggcatttgctttggcgggactaggtgg

SEQ ID NO: 7302 - DNA, 5214 bp, Cucumis sativus
  Intron number 1 from transcript Cucsa.387810.1 (locus Cucs a.387810) derived from phytozome v7.0 (chr-ID scaffold0396 7; pos 149904 to 155117)
cgtttacaaggtattgccaatatgggatgcttttttttatttattattttctttgtattttgatgattctggaagtttaggagcatggaaatggacttgattagcttggagtggtcgtgtatcgtgggagtctagtaaggtgatttgagaatatcaatagggaatgaccacaaaatgaatatcttttctatattagtgatcaagaacagggctcgatatttataggcaaactgaaaatcagaagagtaaaacaaattgtacagttgtaacaataaaatagctaacagattgaaatacaaaacacacttcttaatgagctcccataatgccgtcctcaatccaatgtattgagaagaacagacattgagctcgtctctgaaaggaagaaattttgaagcagggagtggtttgtaaggatgtctgcaacttgttcagtagctggaagatgacgaatcaacttcattgtagatatttatttgcacatgcttaatttgagaatgtccaatgaaatttgcacttaggtgaacggcaattagattatcacattataaaataggaggttgacattgacgcacatgcaaatccacatgagccaaacttgggtactagttcgagaaataattgcttgcttacttgcttctttctttcttactttccttttttgaagcccatttgttctaacaaaaaggattcatgtctttttattaataaagatataaataatgagacaatagctcatggtataagaaggctatacaatgagcaatataaaaatatagatggattgggaggggcacctgaacatttcaactaggttgacaccccatagcgacatcatcatattcaccccctactaataaagaactaaattgaccaaacaaaatctactcagccttggccatcacaggcaaacacaagcggtgaaagagtttagaaatacagaaacaagaacaaaatacatgagaaacaaaaacttgataaaaaagtctaataggctggagaaaggaaagctctccaattcaaattgagatcttgagggttgtagctagcaaagcactttgagaagatacaccacaatgaggcgtttcggcagcgagtacaccaatggctattgcttggttctttgaagcccattgaatcaaattgcttccaaagtataccaaaaatctaggttgattttctgtcatcaaggtaaaatgcccaatctgcatcagcaaaaccttgggtaaccacatatattggcttttcgaacatcaaaccatgatcaaaagtgtctgctagattttgtaaaatatgcttcactgtttgccaatgaaaaatgttaagtgagtgcataaaatgacactctttgtttacactttcattaagagagtgcataaaatggcactctttgtttacactgtagtgtaggcaatctcgagtcttaacagggtaacatactgaacttttggtttaaagataccattcttccctctcgtaatcataggattttgttgagaacaaaagatgaattgagcaaaggtgcaaactcaaatgaacttacaacaatagtaggatatgaagtattttggtcagggggagtttcaaacgtggaggcacaagttcaaggtgagatatcatgaggatatcatgaggataagtggtgtagaatatcccccttcttgatgtttcttgagttttatcctaagggaggggtttgaattacagtcaaatataggttttccatcccctgtttatccgacctccttgatcaattaggtaaggcttccatctattccaaagtagatcttaagagaggctaccaccaaattagaattaaactaggggatgagtgaaaaacagccttcaaaaccactgagggttgtttgagtggttagttatgccctttggtctctctaatgcccctaacacctttatgagattaatgaacaaaatcctacaaccttttttgaatcaattcattatggtatactttgatgacatattcatcgatagctcctctaaggaagatcacctaaaacacatccaactactttttacagccttacaagaaaattaattacaaattaaccttaaaaaatgtgaatttttgtgcgatagattcattttttttggatttatcataagttgtaattgtatttctgttgatgctaaaaagattgatcctattagttcttggccacaacgaaaaactccaaaagatattcaatgctttttaggtttagcctctttctatagaaggttcataaaaaacttcagcactattccagcacctatgataaactgtttaaaaaaaggcagtgtccaatggggtcaagcagaagaagactacttctgtcaattaaaattagttttagctagtccccttgttttaaaactaccaaactttgataaaccatttgaagtcattgtagatgcttcgggtttaggtataggagctgtccttcgtcaagaaggtcatcctttagaatattttagtgaaaaaattaagcacttctagacaaaattggagtacatatgaacaagaattgtatgcccttgtgtgtgctttaaaacaatgggaacatgatctacttactaatacctttattttgctcactgaccacttctctcttaaatttctaaattctcaaaatacaattaatagaatgcatgcttgatgactacaattcttgcaaagatttaattttgtgattaaacatacttcgagtaagactaataaggctgctgatgctctcagccgaaaaggtatacttttcacccttcttcaatctcaaatcattgcctacctacattgtaccctacaaacactgattttaaaagtagttgggaaacttgctctaaccataaaccttgtaaaaactaccacattgtcaataagtttctctttaaaggtgatgttttgtgtgtttctcatacatctttaagagaggcaataattaaagaagcacactctagtgggttagctggacattttggccgagacaaaactttggctgcagtttgctccaaattcttttggccacaactcaataaggatgttactaacttcatcaaaagatgctccatttgccaaacaacccaaaatacaggtttgtacactcctttacctattccttctactatttgggagcatttagctatggattttgttttagacttaccaagaacccaaaggggtcatgattctgtttttgtagttgtagatcgctttagcaaaatgactcattttattccttgtaaaaaaacttatgatgctttgaatatagctaacttgttttttcgagaaattgttagattacatggaattcctaaaactatagtttcggatagagatgtaaaattcttaagtcatttttggagatccctatggaagaaattcgacaccaaccctctctttagtaccgccagccaccctcaaactgacggccaaatagaggtgaccaaccgaactcttggcaacctcattcggtgtcttagcagggagaagcctaaacagtgggacttagctttaccccaagcagaatttgtcttcaaccacatggcaaatctctcaaccggaaagtccccatttgaggttgtatatactagtctccctcgggtcacttttgatttagctaatctaccctatgttgttaatgtcagtatggaagctgaagcaatggctgaacgtattttcaagctacaccaagaagtcaagaatcatttagagcttgctaataactcctataaaacagccgctaactctcacaaacgctttaaggaatatcaggtgggtgacctagttatggtgtaccttcgaaaatcaagattccttgttggtcattattccaaaatgacaaacaaacgcatgggtccattttaaatactggagagactcggccccaacgcttactgtgtagatctcccagcaaacatgagaatcagcccatcattcaatgttgctgacctgtctccttaccatgctctagattccttctatttggcttcctaattttcactcaaggtcgagttttctctgagggaggggtttgatgtagaacatcctcctttcctgatatttctttaagttctttaacaattctttagctaattcttgagtatcttgaattaccattcttgtatcttgagattagttattctttggctaaatcttgtgtatctcgagttaccaatcttgtatcttgagttagtcataaataactaactcaactccaagttagttcaaaaataactaactcctaacaacccttgtaaaacttctagcctataaaaaggcttctccactcattaataaaaaatatcagaagtattattcataaaaattcctaagctttgcattactgcatcatttttcctctgattgcatttcttttttgatagaaacatctactttcattgagaaaaaaaatgaaagaatactaagacataaaaaaatcgacaagccccaaaaaaccccctaaagaaagggttttcttcaacaatttggggattatatttttccgttgcttgctggtttttttgttggcatttggattaaagtttctgtgatctctgtcggtgggatatgtatttatcagttttttttgggttgtaaggactaaaaggatttgttggtctggagatcttttcaatatatttcactattattgtccatttttggtttcctttgttactttactcacttgaggggggtttctttccctctcttttttctcttaaaggcaatccttgaaggttattatgtctcctttcattttttccatgaaaagttctctctacaaaaaaaaaaaaaaaaggaagaaaaaaagaagccaaaggaagggttttgtggaactgtgcggcaaggtccttgttgtcttcactctataaaaccttccaaattgttagtggccatcagtgagtgtttcaggaaacatctaattttcttgccgaatattagtttagtaattgatttgggttagcatgtcaatagattcatgactatcaacttgacattagactctgctggactttgattaaaaagtgatagacgtttggatgattacattctggtaaatttttgtagctttcttgctgcattctttctgtatgccaccgattatttccaatctctatattcttctttttgttaactgatctaagaggacatcatccttgcatgaaatgcaaactgtagagacctgcaagtgagttagttcgagctgtgaataa

SEQ ID NO: 7303 - DNA, 3233 bp, Cucumis sativus
  Intron number 12 from transcript Cucsa.311690.1 (locus Cuc sa.311690) derived from phytozome v7.0 (chr-ID scaffold029 95; pos 1225656 to 1228888)
gaactaattcttgaaagcttaagacactggtatggacttcacactagcttcctccaaaacttttacctttttttggaagaaatcgaccagttagactgtgaaacatgcttttcagttttctgcaaatatgattttgtatgcataaccttttgttaccattttattgtttttgacaataatttttttatcgatatatatgaaacaaaagaatggggaaataacttccatctcaaggaattaaaaagacttacccaacccaacaaaagattagacaagctataagagtgaaagaaaggtcacaatttacacctagtcactgcaagaaacacatcatggtcaaaaaaagaactcaaaaggtagctctttgcctacaaaaaggtctggtgaatgttcaaccaaaggagctctttctcctttttaaatgggtgctccaggaaagtagcaacagacacaacttttctcatacaggcagctcatagttttaagcatgtaactttgtgttattttctaccatgaacatactacattttatgcctgcttgaaattaggaaaacttcattgttgaactcgattgctgctgctttggatttgatgtgcttagctgatggatatggtagacatgtgcggcgaaagttgaatcaaatttaccctaattgcatctaatcctattagaaattaacatgtatttacctaagtaaattaaattagggttttaagaaatcatacctttgtagctctcgtaccgcaccaatctccacccgaacatgatctggactaccactagtgttgacccgctattctctggatttaaaatcggattgtgggacctgagggaaagatttgagagagagagatgaaaattggattagggttgggagaattttggtgagttttttttttaatttttaaagataaacaaactaaaatgccaaaagtttttaacacattaaaaaaaaacttctttaaatagacaaaatacatgcaactattgcatgcctaaactcacgaaaacccaaaacctcacattctattaactcttattgggcttagtgtcatcaccatgagcttccacttagctcactaatgagttggtggaattatgcaacaatgccttatttcttagtggtcttggtgtcatcaccatgagccttcacatcactaaaagttagtcaaagagtaaaatgatgatttcaccattcaagtcaaagtcaaaagtcaacattttgattttttatcattttgttcgtcttgactcatcctgacctcccgagcatgaatccgcattcatttttctgaaattcaaatcacatttgaatgtattattggtcaaagtttgacttttcaaattcaaaagtcaactctttgattttttgcaacgttgaccatttccataatttgcaagcttctaaatatgaatccacatttatatttattatatttaaatcataattaaatataaagctttatctctaaactaataatcgaccgctatatcacatatacttgtcagtttctctctccttacctaattcgaactaatccaacatactgttctaagttaatttcatatgagctaacaaggaaacctaatggatctatagatcatgagctcctctgagattaattagctaaactcttttagaccgagctaatgagccttcgttaactaacgggtcactcccctcactataaatagatttgtgtccatatgatataaccatgattagtaagttaatccttcacaggttgttcgcaatctcgactcggtcaaaataccattttacccttgagattacattttgctccttaagtcccactgatccactattgaacaattggtttaaggttcaacctataaaccaaatcctattgtgagagggtggggccccttgttcaaaacttggatttagtttttaagaaaacaacctatctactaactttataatgggtagaagtgaatttcatcttgaaccttatgtccccaactatccacccagtcttacccttgcaatgggaggcttattgggccaacaatgttgagctgtcctcaactatgcaggtcttagaataatcccgtgtgaacaagaactcatagttagcttaggattaagattaagttacttaggtcatcaataatcgaaatagtcagttttatacagtcaacggtgttataacgtaaaagtgactatttcagggtttcagtcttatgtgaactcttttttacataggatgcctccactttcacgtctccacatgagcgattcagaatcatatcgtttgtactaactacaaagtgagcccaatcatagtgtccttagaataaggcgcccaaccttattcatatattatagaccgtttaagttatatactcaaacttgatccatgtttatgtctttacataaagttcaagtttactcaagataatctcgggaccttagtttattggattcaagattatagtattcaatttcactaataattcctccataacacctttattgaatagaatatgattttaaactacaaactacgagttttaggacataaatttcaacattaacaagaaaagaagcaaggaagcttagaaatcattattttgttccctttggtgggttcactgtgttttatggtggagaaatctagtaactactagttctttaaatggaactctgcttgaagggttaatccatattgctgtttctaattcttcttgtttgtggattttttatttccccgattggttaatccatattgtgggggcgaagatgagtgtgttttattggaatcacactttggtattttcgtccaaaaaaatatttaaaaactctgctagaagaggatgggagaaacattttaaagctcttgacttaaaaatttttcttcgggagaagatgaatcgcaagcttttggaaactctaattatgtagtgctctaaaggtcacaaaaaaaatttgtgggcgcgtgtcttgggttcctttgtgggagctttttgaagacaagtccaagtttttgttaatttttctgaacttgtaccaaattatttttgtaatccccccccccccccacccacccaccaacacacacactcgctgtgtgtgtgatcaatacattttttgtttcttatccaaacaaaatagtagtaataataataaaggaagttgttatagatgatatcttgtaactgaacgcttatttttatcccacgacactcaatttcagggttgtcgaatatc

SEQ ID NO: 7304 - DNA, 3631 bp, Cucumis sativus
  Intron number 6 from transcript Cucsa.041550.2 (locus Cucs a.041550) derived from phytozome v7.0 (chr-ID scaffold0054 0; pos 117975 to 121605)
acataacttcccacaaggtaaagaatttaaaattagatcaattttaattttaagttcgcttaattctaatctctacattttcaataaatattaaatttagttcttgatgcgagagtgtacgggagagcattaattttttgaaaaaccttttttcaactataacacacttttttttactataaattttgaaaatatattctcatattgttgtatttatttgcatgaaaaaaattaaattatcataagtgttggtggaaattaatattgtttgtgaaatgtaagatttatttaaagaacacatgaatttcatattgataaaaaaaaaatattaatttggctacgtctatcttgaactttgatatctattagataaattaaacatgaaatttcgacacaaaattatcttattttggctttcacacctaaacatcttttgtgattatatatatatacagtgccattttaaaaaatagtaaaataaactaaatatttacgatatattgcaattttaaattctgtcaataataaataccgatagacttttatcactatctatcaatataactgataaaagcatatcggtctctattatttgtagaatctaaaatttcgctatatattgtaaatattttattaaatttgtcattttttacaattttatatatatatttagttgttgtcaaatatagaaaatgtaagtttttaaaaccagtagattttacaaaatatttacactttatagcaaattctatcattgatgatcattatattctatagtgatagaatactgtaagtgataaaatccaaaattttactatagcttgtaaatattttaatttattttgctattttttaaaaaatgtttctatagaaaaataaatcaaaatatttaccaaattctagcaaaatatcaaagtctatctgcgatagaccccgatgattactgtttgtgttatgatcttagcatcctcgatagctttaatcaatcttttaaaacacttccacctttttcttccctttcctattttgtcaactctccaccttaatttccttcttcatatcttcatcttcctcgtgttttgtttcttcttcttcagttgcccatttagatctaggtatatatattatcataatttcatgtaccccattccttatcaatgatctatcattctttgttatactcttctccttcgttaaaaagtctttttccatctttattcttgttagattaattgaagagtaattgttagaacacttcctaacttttattttttttgctggtgtagtttctattagtttctgatagacattgatagacttttaccggtctctattagccgactttatttatctcaatcactaataaaaattgatagacttctatcaacactcctctatcaatgatagatttgttgtattagtttatatcattaatagcgatattgatagatcacttctatcagtctctatcgatgatagaattgtattggtttctatcagttgatagacttctattaacctctatcaatgatatacttcaaccaatttctatcattaatatcgataaatactaatagacttttatcaactaaatattaaaggctataaacttgtatccatttccattagtaatagacattggtataggctttctctcaatctcttttagtgatagacttatgtaagtttttatcactgatagacaccgatagatttctattagtctctatcaacaacaaattgcatgtatcgttgataaacacaatggtaataaaagctaatagacttctatcaatctctattaattatagactcttatgctaatcttatcactgatagacttctatcaggctctaatgataaaattctatcagtttctatcattttaatagacagtgataaatttctatcagtatctaccaatgataaatattgataaaaaaatttcaatctttatcattagaaactaatggtggtctatcaacgtgtctatctgatatagacattgatagaaccctctaaacgtctaactaaagcaattgaaaccatcaaatcaatccgataatcaaactaaactcaaaacaaaacaaacatcaacacacaaaaccaacatcaaacaccaaaccaacaactacccaatgcaatagctagagcccgaagacaaacgcaatctcattcataacaaacatatatcattatagatatagcatttatgtacatattaccgagactcatgatagacaatcactgatagaagatttcaattgtgatagacattgatagcacactatgagtgtttatttgagattaacatcaataaaatactatctgtctatcaataatagacatgctctatcacaagtatttttatacctttggttgtacttttccgtgttcctttttagttttatatcttttggttttttgaatggttctccctttaattaacatgtttcctttaattattgtttccatttctgtaaacaaaacacagttgtgatgtaaaagactaagattggaaattaaataatacttcaaacaaaatgtacaaagaacttactttgaatgctagagagataaatagctaaaaatatcaaaagagagtgaacaaaaataaaaatcattgaaaacaatgctaaaattgtattaaacaacctaactcagtcttcgtcaataacaaccataatcaagatcgaatagaggttattctacgaaaataacgcagaaagaaaatttttgagctggaacgtggtttttctttgactaaaaagtactagaaaacaattagaaaaaaacatttcgattgaataaacatctcaagatgaataatcagcaaaagaaaaaaaaaaacttaaaaagagaacaatgtgacaagaatatttagctcgaccaaacccaaaacaattacgaaagaagctgcagaccacaaaaattgaaactaaagattagtataaagcagttgtggaaaaagaagaaactttggggtctgtggtggaaaaaagaagaaacgactggtggaaagtagaagaggaagattgaggagaaaaatagtataaatgaagaagaaccgtcactgcgtgcattgaatggaaattttagtttgaaaatgaaaaaaaatcgaagagaaaatcgtgatgaattgtggatcatgcgggtagggtcgggtcttgtgaaggaaaattgtgacatattttttttacgtttgggctgagcattttgggtaatttacacgggataattgcaaacttagtaattaaattcaaaataattaagtatatagcaacattttaaagaaattgcaaatataacaaaatttgtcaaattttatcaatgatagagtccatcactaatagatcatgttgtaaaagttggtctatcaccgatagattatacgagtctatcagcgatagtttggctatatttgcaattttttttaaatgttgctatatccttaattactattcctcaaatggtcatccattataattacccatttcactggactgctatttaaataatttgtgtattcttctatatttaaaaatctcttttattaaacttattaaatttattaataaaagatatttgtatgttttcgtgcttaatttttagtttggacaagagagagaac

SEQ ID NO: 7305 - DNA, 4585 bp, Cucumis sativus
  Intron number 11 from transcript Cucsa.149440.2 (locus Cuc sa.149440) derived from phytozome v7.0 (chr-ID scaffold011 10; pos 262672 to 267256 reverse strand)
atactcggtcttttctttgtgggagacaaataaaggtatggttctgctttatatggtgaagctactctctcgtattgctaattgtgtccaggaaaaaatttataaaatttggaccatgtcactttccattgcgccagtgctgaagtttttgaatggtaatcctcatgttacaattcattgagcagacgtagctgacatcgcatactggtgacttgacataccatattctctagatttgggtctgaactgatgtaattggtcacctgaaaataaaattaaaggtgtacaagtcttggtagtattgaacagttggctccgttcttggtgcataatcattgcttctctgtttaaaatttttcaaatacataaattggatagttgtccactgagggagaaaggttaataagtttactcatcaggctctcttttattttcatttacaaccatcaaatttccaagttattaatgcatctacagtcttctatgatcccctggaaatttccatcagaaattatcatgtgcataatcgtactaatgatgaccatccttcccccatggccccatcggttcacttgatgaacccccctgctccttcattcctttgatcttctgtgcgatcttcctcttcccccaagattccttcttgaaattgttttgatcgttttatagacattgtttctactgctttcttttggtgcaaaaccaagtaatattttgttcacaataacttatcttatttgatttcatttggagagcttcattaattcatccataggtgcatgggagttttttactcccttaatttatcaatctgagtttattttatttttttataaaaaatcttaaaactcaattgaagggacagttgcggtgaagaaatatttgggagggaaagtggaaccaagaatctaaaggagggagatgtagattccaaatattttcagtttgttacctcatagagaccaaaaacattttctttgagagagttgaggaggtattatgttgagtaagtgtgagagatgccgaggaagacttgatcaattgatttactaaactatcgtcttaaaccctaggcaaaagatatatccatcccctagattggaacccagtaaatatcatttagaggctatgaagcatagatacttcgtgtgaggtagggaatcaatcagtattggttccagatacatatgtatttgatggcgtgtctgtttttactttttttcttaataacgtctcaccttcccaattcttgaagggtacatgctagacattcccccaccccaccttcctcaccaccaaagaaaaaaaaaaaagaaaatctttgacaagtcaacaaatttttttgtttatcttcgtacctcttcctctagtcatcttctctaatcgatctaactctggtgccaactgccaccaaccttgtctattgttgtattttattgacttgtaattcaattgtctctaatgttgccttttgtattgtatattaatgttagaagttgtactattgtcattaacatgaaattacatgctttttagcagattgcatttgtatccttatgttaaatttatttatatcctagacttgtttgtttgtttttctaaataaaaaaacatatcctcaatgtaactgacatcccagttcttcagaaactcatcttcttcgaatcttatcgcatccatattcgtgtctgtgattcattgataagaggttttttcttgagctccttttcattgtagatgaaattctggcggctaaggtccctaggtgatatggtttttccatgtttttctttgttacttgttggaatactctcaaatcagattacaatgaaggtgttctaggaccttttttctttatagaatggccttatttattcttagtgtcagcaaagcaaaacctatattatgccttgttcccaaatgagttggaaaccactagactgactaatcttacctcatgacatcacgagcatcagttcacctgatgattgatagctgaaaatccaagagtccagtgttgcagccttgtattagttaaaagtttagtactaaaccctgacatgtagaaatatggtttgaaagaaatcaacacgttttccaccatacggcttcagtatggtccaaccgattcgtttaaatgcatcatcatggtactccatggtcaaaggatttcagggttattccacacaggacattcacctcaactggcaagcttttattgtttagccattttgagtccaactaaggagatttagggaaaggccctgattctgctcggttttgagttgtcttttagtctttttttaatgataggctgctgatgtaaaggtcttatgttttttaccatttttaatttctcaatgtcatttcatttctctatttttcggatatgatgaggacgctaaaggggtgtcaacctagttgagatgtccaggtgcgttttctgatccctagttctttaattgcccattgtataaccctcttgtattttgaactctgcctcattttttataataaatgagattagtttatttatttaaaaaaatcctgacatgtagaagtcttcagaggaaaacaagtgtttttttcttcttttctggattttaatccaatctctgaaagttgttttcctttttggtcatagagtaaaatcttcgtcttgggttgccttcaaatgccaactattccattccatatctatggccatcaaggggaaaaattcagaccacaaccggtggtatacaaagttgacctctcttccccttcatttttagtttcatgatttttctttttctttttattatatttttagccagcaacactctccataaaccaacctcaatatgctgatagcaccactaatttctcctacggacttaattgggttgaaacttggtatggaaacctactaagtgaattttcaaaatcagagaaaccttgaaattaaaaaaaggcaatctccttccgtcaaaacatgactaatcttctcaaggctgtcaaatactttgaagtctcctttgactttgacttagacttgcctttctagattggaggtcttgggtctcgttctgccaatgtcctcaaaacagtgccaacatcatccaatgttcttcagtgacttagccctcaaactatctcggtctcaacttaaatggaccttaaagcatttcttttggaaaccaatcattgaaggttggtggtaggtacacccttattctcccttctaaaatctccaattttactccatattcctctccaaggttccaggaaatttccaaatctttaacttataccaacgtaccgctcatcttttgaacaggtagctttctgtgttgaacataaacctcagaagacaactttaaagtcgaggtgttccaagattggctatcagtatttttcatggatgattgttgtctaggtgacagggtctgttctctctgttccagattcttcattcttgggactggccttttgacctttcaggttttcttggattgcaaacctcctagaatgcattttcattccaaatttatataaagttatttgaaagaactatagatgtacaaagatccaacacatgatccaaagaagtatgcatctgatcatctccattactagatgtgttcactccagaatccgaagattagttatatgttatatccattgcttggtgtcttctccttgtggcatttgctctttactcttaatcacttttgatggatccctggcccttgtcaggaatgtaaaattcaaccttgtagccctcatgctctctgaccctccaagattctatcaacttcttttggattatgtggccggagacaaaccaatgaatttttgtaggcaaagaaagtgataaatcatcgattgacccaaaaccttaagctgacgggtgaaggtaaatttaatatatatcatctagctgaaagaaatttcatatatcttctaaatcttaacggctgctgactggcgtcaaagatatacaaaaaagccccatgacttcatgctaatccaatgtatctcatccacaccctcatgctcttcgaaatgtttcgttcttaatttatgatattttccctaattagaggagtttttataactctcttagttgggctggagctatccttctctcttttgtctatttcacaggcatgaaactctttcttttcaggcttactagttactactgggatgcccttgttatctactccaactgttcattataaaagcgtgtatcacattcatttttaatgatatggaaaaacatttttgcagtttatgttgtcatagtaatttcagccggaattttggtttgaaaggatgcttggcaatctttcaaagtcttttttgtatttttcttttcaagctttagtttgtattgggaacttttatctttcatagttgctctttgattaccgctctattgttttcgttagtctcttttcattatatcaataaaaagttctatttccttgaagaaaaaaaaggtctaggaggaaattgctagttcttttgggaaataacccaattgatttttgtccttattgcagtgctcttggggtagcaaacccacaccaccaggaac

SEQ ID NO: 7306 - DNA, 499 bp, Cucumis sativus
  Intron number 6 from transcript Cucsa.176920.1 (locus Cucs a.176920) derived from phytozome v7.0 (chr-ID scaffold0122 5; pos 960614 to 961112)
cattggccgaagcacattcttgtccgttatacgtaaggccgtgattctttttcctactgatcggaggcttatattacaatccttatccatatcatatggatatactttgcatattccaagtccgaatgtggtaaactatttcctttgtagatcaatatgcaaagaatattaataaaacgacattgtagttcatgatttgaattatataacacggcttagtttcttccataggatttgattatgagtgggttcatttgtgtctggtacatcgactgtgaacaggtggaatataaaggagaaagaaagatgtaccaaatattaagtaataattgattgagttacagtttttaacatggcaaatcatattgttcctggaggctatcatttacatctccataacttcatgatataaaatgcacgtgattgagattaagctattccgcaactttctgataaacctatgttctggcgtgttctagggaggagcaatcagagattg

SEQ ID NO: 7307 - DNA, 1268 bp, Cucumis sativus
  Intron number 2 from transcript Cucsa.055910.1 (locus Cucs a.055910) derived from phytozome v7.0 (chr-ID scaffold0060 2; pos 75388 to 76655 reverse strand)
tgctgaagcaaatcaaggtactctctcccagatttctgatttttaaaataacaaacaaatacgatgttcaaattaaactaattctgaaaattttgagttaagaaatggagcaaaagcaccttaatagtataatcgtcaacactcaaatatttatcagatgtttaataacttatttatctttttaaaaatattaaaattttaaaaacaagtgtgtttggcaactaattcactttttttttaatagaaaagttgtttttaaaactacaaaagaaaaaaaataaactttgtgtttttaaaaaaagaaactagttaccaaatatatgatggagttaagtgatagaactagaaaatttgttgacaaaagctttatagttcagtcaaaataatttataagtaataggttttaaaaattaataaatttatagacttttgtacatcacaattgtcctctacgaaatctaattgaaacaagaataaattaagaagatattgaacttaaacagcttgttaagatgcataaattatttcaaaaattaataaaataggtataaaacaaatgaactaatacaattaaaaaggaaatgatttagaatataaaaacgacaggcatacaaataaaataacaaacttgaaaagaatagaaaataaattacaaaatttatctggtaaattagaagataaagtcgaagaagaagccaaaaagatattttaaaaagtaaaataaaaagtaataataattttaaatatggatgaatgcatataaataaaataacaaattttaaaagataaaaaatacctaaaaaactagctaaggatataaaaaattaaatagttttctttatatatattatataaaaaccataaaaattaagacatggtttctgtttttaataaacaaaaatttgaaaaacagaaaattaaaatgattatgtgactttaatctttaatttttaagatttacttatatatgtgtgtgtgtttgaaagaagactgacttaagagttttaaaagctttggaaggtagacttaattttgatattcaggtttttcatgtttttcttaatttacaaagtacgatttgtttggactttttggacaaaaggctcaattactcaacctgacctttactgctcccatataatgccttaactcaaactcctactcccatttcttaacccacaacatcaaaatgaactcaatactatggttttgattttatttgatttgatctgtggtgtgatttaggaccagaagggaaggcttgcaca

SEQ ID NO: 7308 - DNA, 1594 bp, Cucumis sativus
  Intron number 12 from transcript Cucsa.139520.1 (locus Cuc sa.139520) derived from phytozome v7.0 (chr-ID scaffold010 66; pos 729153 to 730746 reverse strand)
attctggttttggagtggggcttgaccatcagaaggttcgatattcttattatttgaatctacaaataaagctattatcataattcattcattcatacacacatttttttggaataaataaacatttcattgaatgaatgaaatagggataacccatgcacttataggtgattacaagaaatctcttcaatggagaagaagaaaaggtagattatagtgtgcaaaagaagattataagacccaaatttataccaatcaaagcattagtaagagccgaatccaaaaatctatcaaaaaaagagatgtacctgaaaatctattattatattctttcatacatatacatacatggatgcatatgtatatttatgaacgaacataatggaagtttccatgaaaggcaacaagttgaatcgttctgtgaagatatatatttatgttttttaaaactgataaaccatccatccaaatattgtttttgtccaataaaataattgttaagagttgggttctcaagtgcactatgaagcagctgccacagtcgcaagaaatctaaggggcttgttttccttttaatatttaagtaacacgagagggcaacaaggaaaggacccgtattgaaattatactaacggtctccctaaccatgggtattacttacaattacaattactaggataatgattgtgcattcttgtgggctttctctctctctctccgatatgaaaagtctaggatttgaaaattaggaacccaattggtgaacccctaatatcaaattctaaaaccccaaaatcaatttgacaacaacccaaagaatggattagatttagattaccctttgattgaaaaccaagagataaaggagaattagttcctaattccaagtttgaacactccacaagtaaggtgatcgaacttacttgaatgtttgttagaacctagatttagatagggctaagggtagttggttatataggtagatagatgattataaataggaagttggggagggaagaaaggcatgaaggttttggtgaagatattgggctgcaacattccttgaaagaaaggaagggcagagggttagggttctattgatatgttcttgagtttcctttgattactttgtatttcttagtttgatatcaataaatacgaacacattatggtgttccattaatgttcttggcatgcaactctgaattaagaattgcaaaaggtggtgatgaggctcgatcatctaccgaagtatttttattgatagaaattaccccaaaaaaattagtttgaaacaacttaaaggcaagacttaaacagcctcccaatcaaaccctgatgcattgtgaaaagactaaatttaccctacttaaatcttattaaaaaatattaaactggaaaacattaaaattacatcgcaattattaaataaaatctaattaataatttgatgattggtcggttcaaatcacacactctctcacacacagtataagctgatgtattggcagattttaattctcttatccaactgtaaatctaattctcatttttggcagatctgtttggcagtacaagatcttattgttgcatc

SEQ ID NO: 7309 - DNA, 1242 bp, Cucumis sativus
  Intron number 1 from transcript Cucsa.109460.4 (locus Cucs a.109460) derived from phytozome v7.0 (chr-ID scaffold0093 4; pos 388025 to 389266)
tcgagttgaatattttcatcccccgtttaacttcggtgggttgtgtttcattttctttctcccccttctttttctttctgattttgttgcctcattttgaaatttcattgtttgggaatggggaccgagcttttttttggtttctgttcttgtttttgttatctgggtttgaggttaaatcttctttctttaattgggtgatcgtccattgttcttattcttcgtgcattttgttgattggatttgcatttcaactgtgagtagtttattgcatgtccccttttcaatagtttgtttgtttgttttattgtgtctgtatttttcagcctcttgttcgtctctttatgacattatccattatctttaatggcaagggaatatgagttgtaaggattgtgtttcttaattgatttttctctgcagtttgttaggtagggaagaatctggaggtaaagtgaaggaaaaaagaagaatgcattacaatgcaacaattgttttaacactttttcttctgttctttactttctaatttttttaatgaattctattcatgtaaaactatggatatggaagtgggtttcattttttaagtgtttttcatttgtttggtagaataattaagatgaatatattaggcaatatgttcagttcttttgaataaaaagatagatcaattggaaaagtaagccctagacggaatgacaactttacctaaatcctcctcctttgaatggtgaactccattttttttctttctaatttaacatccttttgcctaaaattagattaaacattatagaagtaatttgttttgatctcttttaattaaataaacattcagaacatgcgtcaacgttttgtttgggaaaagatgaattaggaaattgatttattttcttctttggttgttttggttttaattcttcacctccaataatgtgaagcaacaatttcattttgtttcagaattttctggatttgatttgcaagttttattctttgtcctctggcatctgtgtatggagagttataaatcttcatccacattaatttgagccaagaagtttttaaagtttattacaagtttaagatatttttacgaaattgaagtgtttgtgatttcaaagaaagagtattgaatgtttaatcattggatcatgtttcaaataatttatttccgtagtttttcggttttattgaatttcaggttctaccacacttccgtggaagttgggtgtgtgg

SEQ ID NO: 7310 - DNA, 807 bp, Cucumis sativus
  Intron number 2 from transcript Cucsa.122440.1 (locus Cucs a.122440) derived from phytozome v7.0 (chr-ID scaffold0099 9; pos 659064 to 659870 reverse strand)
gctgtttcagcaacagacttgccttccagaaagtagcttctttcatatttctcttgttttcttgtttttataagatttaaatcacataaaactgatgcaaaaacttgattctgaaggactttgagtattttggttgaattgtaatgataacactcaagaatataatgataatgatgacttcatgctcaaaactgtcttgcatacatatgcttctttcattctaattgcttgtccttgagatgctgaattaattctaataacttcgaccctggtcactgcccatattctctcaataacttttgttttccacgattaatcaaactagttaaatcttgaaatgaatttgagctggttagtgcttatccccagaagaaattaagttgcactatttcctgaattccttctgataagaaatggttgaatttgtagtagctcgcagctatgcatacaagtaaaattagtagtgtgtactgttatgggacccagatcttttcaaaagctagtcctatcattaccttcttgtatcaaatgctatatatatatattttttaattcacactattttttgttgtttgttgcataatcattcttctaaattgactctacacgatatagcggttaacgtgttgatattcctgatgtgtggaacctgcaaaatatttgttttgttatcttgaaggcaaaaatttgagttatatgatgagaattcaagttttgccttttattattcttctgagactccatctttctaatttgagtattggtatttcagggtgaaaaggttccctttaatattggaaaatagga

SEQ ID NO: 7311 - DNA, 1688 bp, Cucumis sativus
  Intron number 4 from transcript Cucsa.058950.1 (locus Cucs a.058950) derived from phytozome v7.0 (chr-ID scaffold0061 4; pos 1058327 to 1060014 reverse strand)
ttaacttagagcttgttttttcagatctggaccaggtaatatcattgaaatcttttacaattcttttgactttttttggactgtggttcaacaaacaacttctttatggagtaccgattacaccaaacacttcgtaattatagcctttctatgattttcaacgattgcaagacccttatgcgttagtgctatgggggagggccctcttgtccctcgcccttaggctattcctttttgttctcttgaatatatctgtttcttataaaaaaaaaaaaattctatgcaagttttgctccttttggaatggaggctataatcatgggaaattttgcattctacttccaacaactttaattcatcatagattcatatgggaaaaatgggtgacttaatgagatcccatgctttcgagttataaatagaaacaaaatcaagttgtctttagaagctgtttgttgaatgttttgcattttgtcccctctttgatctcttttttccttgatggctcagtatgataaattgataatataaaggtgatcttggtagaggttttatttcttcaataaaaagtattgtatattaaaaaaaattattgcaatcgattaaagaagagatgagtggcatatcttttgacaggaactgactttgggctttcctgcttaggacataagattgaaagttgatacagctttttaaagttcattttattcatagagtgctagtgattgatcacaaatattatgtaaggtacactgaaactcagtaaacctcaacaatagcaaacagaaaccgtctctgatatgctttattcaatataattcaagagttcaccaacacagcaaggctaaacaacaaggaacaagaataagtgacaataataaggacacacgaccagctccttcgagaaggctggaaacctctccctaaaagctttaagcagtctttgcccaaaataaaccctacttttttaaatccccaaacactctttttatacccacatcactgtgagaccctcaggtgaattcctcctcttcagcagcattcgtggaggcctttgcttgtgttattcccttcttgcccttcattttatatgtctgtaatgttgggggtctaacatattactactatcagttgtttagttttttaatatttaaaaaaaaatgaattaattaagaaatgactttcagctaaaagaataaagtaaagagggggaagatagggtatccttcctacttatactaaagaagaccgtgatgaaagttgaagaatgtgttgtctagtagttacgatgcaggtgtggttttgacatttaagcttaaaatagaaatgaaaaacacttcaaccatagttaaatttagctcattccctatgttgatcaatgaaacattgttcaatgtttacttttcttcttgaactttatattggatgcatacaaaggtacaattataataagaggctacttgcggaatagcaagatggtttccttggggaaattgtcttacagcgtagttcatttgcacaagtttttccatgctattctgccatctatgttgtgtgaccaattcattggatttcattgaatgtgttatcttcctcccttgccattccgatgatctgatcaaatctaagttgtacattttaaaagtgatgcagattgagaaaagattagagaagctcaagaaaggcaa

SEQ ID NO: 7312 - DNA, 4259 bp, Cucumis sativus
  Intron number 13 from transcript Cucsa.118820.1 (locus Cuc sa.118820) derived from phytozome v7.0 (chr-ID scaffold009 98; pos 692417 to 696675)
aaagagcgtggctattgttggtaccagtggcagcggtaaagaataccatatttggttttatttacctttacatgtggcaagatttttgtttaaggacatttatttgatgatgatattaccttctatatgtggtgcagcttatgtattctatcttcttcttgtaccttcaacgcctcttcccatttacccctggttgtggttattctatctattgtcagtttctgttgttatcaaccaagatttttggtttcatttgatcagtgaattgctttaggcatgctttggaacagttaggtgtaatgtgtaaagtatgatgcactgagcttgatcaatggccaattgtgaaggaatccacaagaacttttagatttggaacaaatgatttgtgtagttcccttccacccaaacagttttttatttcatttcactctacccagtgtaagttctctgagttctgtttgcctacccagtttaaatacctccctttcactatttaaacctctcttccctccaactaactgtgggtcccagctctagcaaccacactccccataactcgtgtgctccccttatttcctcttctactatatagccaaatgattggtggctactctcctcctccaaactcactttgtcctcaaggtggaaatctggaaattgttgttggaaaatcataaaaaatctcccatagcctcatgtggcagtagtcccttccaactaatcagtacttcccacactccagttgtaggattctttcgatgtccatacacttctttccgttcagctatccattaatgattttcagacacaaaaggaactaactgatgtacctctgtatgctgtctcaacacacctttcagatgtgacacatggaaaacagaatgtatggaagcatttgtgggcagatccagcttgtagggccaatcctttccaacacccgatgaggcacggaaaattttggtgataatttttcatttctcctcttccacaaagacacttaatgatagggaagaattttcaaaaacacgaactcccccacctgaaattcaacatgttgctgtttcttatcagcgcaatttttcatcttttcttgtgcaatctgcaagtggtctttgagaatgccaaggctacatccctttctttgagttgctggtcaagggtagaattaggagtttccaaatcaccatagtatatcaaaggaggaggcacactttcatacactgcctgaaatggggtaatggcaacagaaatttgaaaagtggtattataccatcattctgcccaatgcaaccaagaaacccactctctcggcctttctccgcaaaaacagtgaaggtatgcttccactccggttcaccacctcagtctggccatcaaaatgcggatggtaggctgaacttcgattcaatttagtacccgaaagtctgaacatctcatgccaaaaattactgagggagaacttgtctcgatcagaaactatggatcttggatacccatgtaatcacactacctctttgacaaaaaacctcagccacagatttcgctgtatgcggatgttttaagggcagaaaatgagcatatttactaagtctgtccaccatcacaaaaatcacatcaagaccagttgcttttggtaatccattgagatatcacttcacacaatattcggaatttccaaaggcatcaataaacctgctggagataaagccaatgtcttattacgtcgtcacactacacattccttgcaatgtttcttcacgtccccctttataccttccaaatacagctttcccatcaaatgtttataagttctcaaatatctcgaatgcgcaccaagcaccgagtcgtgataagtgtggagtatagttgataacgaagtcaatgacttagatatcaccactctatttttatacttcaaaattccttgctgcagggagtaatccgccacatcttcgttttgtgacttcttgatgatttccttcaattttacgtctttctccacttcctctttgattaccagcaaatctaatatgcagcagtcaattggcacaaatgcaccgtagtaggaattctaattacgcatccgctgtcttattctctagctctggtttgtacactacctcaaatgtacaacccagcaaattagctgtccattttttatgctgaggttgaataagtggttgtcccagcagaaatttcaatgatcgttgatcagttttaactacgaatttcctccccacagatatgggctccacctttgaacagccaaaaccactgccatcaactctctttcatacagaggcttagctcgatctcttattgacaaggtgtggctaaaataagcagtcggttgcttcagctgaattaacactgctcctaccccatacccagatgcatttgtttcaatctcgaaaggcagataaagttgggtagagctaatactggcaatgtcatcatcacattcctcagtttcttaaaggtttcttcagcttcctctgtccactgatatgcccctgcctttaataactgagtgagaggagcaactacattaccataattctgaacgaaccgccgataatacctggttaaacctagaaaccctcgcagttcacgtaatttgtaggtactgccattccttaattgctctgacttttttgggatccacctctactcctttttcagatataaaatatgcccaaatactccactctattttgggcaaaactgcattttccctcgtttgcatatagctcattctctcagtatttccagcaccagctctaagtgtttcaaatgatcctccaagttctagctatagatcagtatgccataaagaaacaccaatacgaacctcctcaagtatggtttaaaaatagtattcatcaaagattgaaaggtggatggagcattcgtcaacccaaagggcattaccagaaattcataatgtccttcatggattctgaaagccgttttctccacatttcttggagatgaaacttattcgatgaaaatattagaaaagtatacaggattgatagattagtaatcactaaacagaaagtaattggtaaggacgaacaaagaaagacttacccccctcactggctctcctatctttcaaggatgtagacaaatgattaaaaaaactcccatgcccacttggaccttcctttcactatttaaacatttcttccctccaactaactaactgtgggtcccagatctagcaaccacactccccctaatggatgtgctccccatatttcctcttctactatactgccaaatgattggtggtctaaaaaatggcaagacagactcttggaatctctcgcttataaggagcacaaaaaatgaattggaagattggctaattctaaccaggaaaattcgaggtgatcaggcttagaccttgtacagactctaggagatgtccccttgaccttatcaccacacccaacaccccttcattcactgaaatctcttctacgtcatctggaaaataaaatctctcagatgttaaaatcttcttatagagggtggtcatgggcaaaataaacactatggagttcgtgcaaaaaaggggagaaaagattctcttcaactactctttccccaaaaatttcctcttaagaagagaaatggtggaacacaagattttatctttgttaacttcacctttgccattgttttttggtatgctttccttcaggcctttggttgagcccaggcatcaacctacatacgatgatggtggcttgtcatttctagaagctggcgtattctgtatgaatgaacttgatcagaatgctcctttggatcacatgggcagagaaatcatagaacctttagcggaaaagagtgggacaactcacagttatatgatcctattttgtaaataccagccacggaatacaaaattattttgtaactattctcatagtgagatttatagtaaacgggaggggtttttgtagcctctttgcccttttgtattacaaattggggttggtttctgtagatgtcaatggatagtttactactctttaaatatgcttcattacgcattttgacttttaaaaagataggctccaattcttttaaagccttgtagaaaatttttctcataaatgctcagttcccaaatttaaatctgatataaagctttcttttattgaatgcttgcagtgtcattgatgtagttaaattggtatctccatacaggcaagtcaactattcttcgtttgctcttcaggttc

SEQ ID NO: 7313 - DNA, 1329 bp, Cucumis sativus
  Intron number 12 from transcript Cucsa.200100.1 (locus Cuc sa.200100) derived from phytozome v7.0 (chr-ID scaffold013 65; pos 517951 to 519279)
ttcacttctattggattcttggagctggccacttcgtaagtatcaatttccttttacaattttgattttatcaccattattttataccgtgctttccacccaatgaaagttagttttagtaagattttgaaattaaaagaaatgtgttttttttcaaagaacacacatataaaaggtaggcttagtactaaatacatgttaaaatttgactttttctattgtaatttaattttcttctctccactctaacttaaaaatataaaacattaaatacaattatattttataaccaaacaagtttaataaaaatatggaagcgagaaacaaataaacatggttgtttttagaattatgacatataacaatgtaaatgtacgaaaatttgaacatttaatttgatgtgaggaaataaattataatgttagttatgttcatttgaatattgttaaaaaaaaatttgatatcaaaattaaaatttatagaaaacaattagctcaatttaaataaaaatcttattttacaccataaaattaattaaataatatttcaactatactatattattattattattattccagcattgtaaattgtagttaatacatgataaaaaagaaaaaaaattataatattgtttaaagacagattgttaaaaaatatacaattgaccaaaaaaattgtatgggataatatataagagagtaaaagtaaaagtagattgagatgtctcatcgaggcattgatgagggtaaaaaaggttagtgttgatgatggtgcggtaactttttcttgaaagtaaaaaagaaaagaaaagaaacgtcgaagtactgtgtgtggattggttaaagtccgaccaattagcagacaattacgacaactccgtctcctatattgactttcaatccttttattttctttcactttttaaaaaatatttttcatacaaatctctctctctctctctctctctcctttttctttattttaatttgttttctttttaaaataattattttggtcatagaaagtgactttttcttaatcaatgtttgcaaattttgtatgccaattttttttttaccacaaaaacttaattgatttgatgtgattgaaagtggcattggagtaaaaggattaaatataactaattctgtctaatcttgaactttcaatatatatataatttgatcaaaatataatttctcagaatgaattttaagagagaacttagttaaaaataaatagtttagcatttagcattttgtagtgtgacttactgagggtttatgacaagggacaggtaccggttgaccagccgtgcatagcgtt

SEQ ID NO: 7314 - DNA, 2898 bp, Cucumis sativus
  Intron number 2 from transcript Cucsa.048280.3 (locus Cucs a.048280) derived from phytozome v7.0 (chr-ID scaffold0054 2; pos 3108086 to 3110983)
caagaactttttggtgagttagctacataacactaaattgaggtccagaattttatgaattggttgtgagagtgctagacaagccgtgtctatgaaatgagggcctcccataaatctcgagtcgatttaagctcacaagcattggacaaatgtaggtatggtttagttgattaaacaatagtagaactatagcattttatttatgctatctatcttgttattggaaatattggataatatattattaacaagaataagtggtagattataggcttctggctaacaagatggaccatcttttgctaactcagattgattgggcactcttttggggttttccatgcttttattgaataggaaataaaatatctcattgattcaattagtttcaaaaggtatggaaacctctaacccatcccatgcttccaggttctattggaagtttgaatttgaacaggcctgcatgataaatggggaggtatatcttgaatcctccttttggtagcagtggaggtcttttctggtcaatacggtcatgctgggtttttatttatttctttgagatttggtcagggaagctagaagatctcttgtattagtgataaccaaggactttactcccccaccctttttcctcgctattttcataattagtttgctagggtccttctctctctcaaaatcccctctgaacacaacaaaggaatggataagttggttagaaactttctctgggatggtggagactataaacagtgtatgcatttaatcaagtgggagtgggcaacaaatatcattgtgggaggctggacatcaacttcacaaaaatagaatctttgctctatttttgttagtttctttaaaaaaataatcacactttcattgaggaaaaaaacaaaagaatacacagacagaaaaaatgaagcccacaaaaacgaagaggttcctgaaagaaaggcctccaatgaagcaaaataatgctaggataacgattacacaaaaaaaaggaaagaaagatttcaaaaaaaaaaaaagaaagaagaagaagctttgtggctaaagcccataaagaaataaggagtctagcaagggaccaacattcaaaaggattaagcttgttcccttgaaagattctattgttcctctcgctctaaagccccacaaaatagcacatattcttgcttgcctaaaaaactttccgttctccctagagagtggaaaaataacttttcaatcatctctctacaactgcaatgtctagccaactcaacactaaactcatgaaagaagcaaatccgtttttcgcaggcaaagtactctaaagaatgtaatcaagattctctgctgccttctactaagactgtgctccaacacgatgctattgaatgcatgttgggccgatctcttatcggcactggaaatgtgtttagttatttgagaggagggatcatgtctgattagctagttggtcaagaaaatggtagtaaagaagagaacgctgggattgctagatttcttgaagaatttgcccaggccaccctcatcctgaatcgacttttgactagctcgacattaagaaataacgtgtattgggaattatttatcgatgaaagtttgagttttagctttatcaatagcagaaataaatactttacggccctatcaaattaagcatcttcctggccaccctctccaaggtgttcactgttccactgagaaaaaactttgctctattttttaaatggctttaaagattctctcaagaaaataacaactttttggaagaaggcgatcacttagtatttatggggctaggaaagacgttagaaggccttggttagatatagctgagaatgttgactcttaaaatttgctacatttgaggctaacaacggggatcgtatcagactttggaaggatcgttgggtagattagaacagcttagaacatggtttcctagaactcttcactatttctatgaagaaaaatgcttccgttgctgcttgttgaaataagatgaaagaggatgagaattaggtttggaaaagaggcctctcgatggagaattacaaagtcgacttgggctggtgaatcagataaactagggtggaagaggacaagttgtggtccttgggaccctgagactcctcaaattctttttctttttctctctcttttgaactcgtttgatatcatatcctccttgaaagcccctttgatctaagcggtttggaagttccaaacttcaaaatagtgaaggtttttctctggtctcttgcacattgaagtcggaacccctttgatggtcgactggtggaagccctaggtggctgttgtttaaaaaggaagacatgttggagccttgctaggggaatccgataatcgttgctatgggtctatttactatccaccacttccccctaaatggaattatgcccgtccacttatctctaacccaatggcatttctgactattaaatttcccgcccccaggtcggctttcgagataggccggtaggtaacgtccagttaactaaattgaaacactgatttatccatgcctttccacaagatgtcatacatgaatttctctaatttttaactactaattttgggcatttgaatactgggagatggtaaagaggaagttgaactcgtaaatcattttggtagccgtatcctgattttatatatttattcaatggtagattcattttattttctgtttgtaacacttgagatttttgaaagctgattacatgttgactcacatatggagtgattgttgatgcgtgatcacaaatacattgaaattaatcgcaatttagttcaactttagactctagctgttttggtactgtaggtggagagaattctattgcaacatccgggagttaa

SEQ ID NO: 7315 - DNA, 1625 bp, Cucumis sativus
  Intron number 2 from transcript Cucsa.107410.1 (locus Cucs a.107410) derived from phytozome v7.0 (chr-ID scaffold0093 0; pos 791370 to 792994 reverse strand)
aagttgtgtgtttcaatcttccgaagagcggtatgtgaatttgattgttctgttatttctgtatctgtatctgtatctcttgagaaatttgatttcggcgaggcgagagagataggaggaggaagtgttagggttttgtttgatttaaccggtgatcggaggaggctgtggcggagacggtgggttagtgaatcggaaattggagagttaatagtggaagaagtcaactaaaaagagtgggaaaagctggaagttattatttcttaagaccaagaaaagttgtgttcgactgcccacctccactaattttgacatttttagatcatattttaaacacaatagttacaataattcatcatttaatattaaaattcactctcaaacttatataagtaaaaattcgacctctaaataatcagataattcctctaacttaatttctatgctccaagcttgaaagaaatagttgtaaaagtgcaactaccactatatttttaggtgatttttttttacggtttagaaaacttttgcaaaatgtcaagtttagctgtagttgcaagtttataaaatatttgacatttttgttaataatttttttttaaatcgataaaatgatgataactatcattgatgacaactataagtgatggttgtttcaattttgagaaaacgtgaagtaatatttgaaatagtagttatgcataagtttttagtctttaccaatttttggatcgtgtatgcaatatatatgtttttcgagttgggttggatcgacaaaaaaaaagaaaaaaactttattcaattcaagatccaacccaacccggttaaaataaagaattttcaatccaatttaattttggaaaaaacaaatccaacctacaacctaatacttgccgtctgctttgaatagtttgagttgttcatacagttgggatttttgtgatttgagaatgagatgtatgaaatactcttaaccataatccatggacatgaaaagtaaactcaaccttccatttaattggggattaaattggaaaacaacatctaccaaaacacctattcaattgttttttatttttatatatattttcaagtataagaaaatatactttataattttctttctgccattactaatcatttttaattttaaatgaataacgaatattaaagataatataacatgataacgttgaacaaatgaattttaaattacaacaaatagaaaattgaagaataagcaataatataaaatgagaaatatttgaaacaacgaggcatcaggaggaggtgatcgagcatgaataagaaagagaagggaagggaagggagaactaaactgtcattaaaggaagcctaagtgttatgtttaaagataagatctatagtctataaatcaaacctaaatataagaagtcaaacatcaaaagtgtatcttttttttttcttatatatatgagaaaaaaaattctaatctttccattgactaaattaaataaacaataaataaataaaacacaataatgattattaaataaatatgtttgaccaatgattgaatgacaacacaataacttatgaattttccaggtataccacgaggtgcaaaatacggcttgatcatc

SEQ ID NO: 7316 - DNA, 2417 bp, Cucumis sativus
  Intron number 2 from transcript Cucsa.107670.4 (locus Cucs a.107670) derived from phytozome v7.0 (chr-ID scaffold0093 1; pos 39019 to 41435 reverse strand)
ttcttggagatcccatatcaaagccaacagagaaggtgtaaattatttattgtagctaaaatataacgttgtgtcaaggaagaaatgagaaaacagctttatgcacattcttccttcttttttgtctgttctgtttaacttaatgggcaattgtacgttttgattgtgcctgcctagttttagattgagtaggaagccttgcttttactgcctgcttggactttgttgcttgctgtattgatcatgtaggttgtatgcctcttgattgtgtgatagggtagttgaagtttctgttaggatagatgtcagattataagatgaaaaagataatataaatatctgatggctacagcttgaactatcctttgaacataaaatttcttcaactttgacatgtacaacccgcttttgtatcatcatctagacaacaacccaattatgctcatcaatgccagcagtgttcttcaaccatcggggtagaaggatgccgattgtgcaaatatggttcttggacatcttcacttggatttttatttgattcgtttatatttggcccaactttttcaggtgttttgtttaattgttatcttggccttggaatagcattatggggtacatgtagatggaggaaggcagtggatattttctaggaaaatgttgggtgtgtggtttgatagccctaatcagagattgcttcgatgctatttcgaggaggatttttccaaggagaggagagatccaggagccggggtaggaatagttctaggctttcctccaacttggtcagtgcacatgcacctgtttggttttggatggtatgcctttcaagagatggactcaaacagaataggcctggaaatcgtgctctcatgcttggtgctatgttttaaattgcactttcttctatcaactgcaacttttagtcatccatactacaacaccgtgtagttgctaaaaccttacttgttcctatagctatttaaaaaaatttacataatcaaattgatggtctcattataaagcatgctttcctatgacttgtgtatttccccctctttcttggttgttggtttctgttcctttatagctgtaacttaccattattttctgatggggattgtttgtgactagttattgctaggttatgctggacctgctttgaatgtccgtgtggagcgtgtatcgggagatttctttaaagatggcagtgcacttgctgaagtgatgtctttgtatgaaaacattgaccaaaataacttcactgaagataacagccctgaaaaagtgttggttggacaaaaaagtaaccgctcagcaattaaggtacagcttgttagggattttctgcttttaactttttgtaggtctgtttcaggaccttgttatagacatatagtttcctagatatggtcatgaccgcccttttttgttatttatttatgcattatttcttcttttatgtttctcattttactaaaatgtattttcttcttctgagactattttatgctgaatttgaaggaaatagtgaacatgccaaatttagctcttcaagcattggccttaaccattcgtcacttgaagcaatttggtttagaaaggattgtgtctttggcatcttcttttagaccattctcatgcaaaatggagatgaccctctcaggcaatacgcttacacaactcgaggtaatttcatatgtaaatatactaaaaaaacaaactcatggacatttgtttaagccaatattttaatcttttgaactgttttttcctttattttttccttttttggagatttaaacttcatttctaaggtccttagttttcaaaacatacactttttatctttgaactttcgatttggttctggaggttcaaatttcacttggttaatcctaaaatgtaaatttggtttcttattagttttttcagtttgacagtgattgctaattgttccatgagtataaaaaagttattaagaactccaactcatttaaagaatacatatgtgccaagtttaatctgtatagtttaactgacacgtcattattgttgtatcaactagcagtcaaccctgcttggggactatttagaaactaattttaaacttcagggatcaattaagactcaaattcaaacctcaaggatcaaacatttaacttttgaaaccttaaaatgaaatagaaactgaatttaaatatcaaggattcaaaatgtcagttttgaacaagctagagtctaaatagaaattaaaacctagaggctcaatggaaaatatttgaccctttcttcaaaaatattttaacctttcttctatctttagttaatttctttgtatgccatatctttacatgttcgagtgcttcacttgtttttcttactgtctttatgtcctatgatttaggttttgaagaata

SEQ ID NO: 7317 - DNA, 1195 bp, Cucumis sativus
  Intron number 6 from transcript Cucsa.161870.2 (locus Cucs a.161870) derived from phytozome v7.0 (chr-ID scaffold0114 4; pos 1655649 to 1656843 reverse strand)
aaattgaaaagaaagatttccgtaaaggttctcaggtagatgcagtcataattgggctactacttactgctactatgcgaacactttcatcacagctgtcaattctgatgaaatttttattttctcaagatggcgtttagtaggagtactcactccatatatttttaaccttgtaaatttcagtggttttctatgaagcgtcgacatgctattattgtaatggctgacagtctttactataaaaagttcaagcattactgcaaggtaatctgttggtcgtagtgacctttatcttttgtgttgattataaaccgtagacctgtaagaatcgaataacccgacaacccaaactacccaacccatattataagagttgggttgggttagtttaaaatgtgggttgggttgggtacaaaagtttggttttttttgggttgggggttgaaaaattcagttaaacccaacctaatccgaattttatacatataaaatatatattttattattaactaaagaaaatagggtaaaagaaaagattagttgatacatagggatggtaacccgacaaccaaacccaactcaaccgaacctgtttacacctctgatagatcgattatcagattgcttctgttttatgctcatgcttatgcttgcaaatgacttattcttgctttcttgtcagtcaactcaggcagagatttagaatctttaagtctatatcaaatcaatattttgaactcgaatacatggtgcttctggctttattcatgttatttaggactctagctaatcaatactgaagcgatctaattaattcttgttgcactcatctaccttgtatgctgatgtttttgtctattccatttccatcttttgctttatgaaggcaggtcggctgaatattttgcttacgaatggataattgagtgtcgaagtgcgtgcttgactgtcatatattaacattgcagcttcgtttcgaaggattatattatcttggttgtcttatgcctacactatttaatgagttctttcttgtttttgtttactagtttatttgatttgattgctttagatttaatacacaagtattctgtgcttttctttctcaagtcatcactcataaaaaaattctattcattgacctatttttctcttgctcgactttcttagcgaactaaggaaggccccaactgct

SEQ ID NO: 7318 - DNA, 3333 bp, Cucumis sativus
  Intron number 5 from transcript Cucsa.159140.1 (locus Cucs a.159140) derived from phytozome v7.0 (chr-ID scaffold0114 2; pos 1176147 to 1179479)
ttatacttcgtcaggtaatttgttattactttttccttaatcaacatgaaagaactttttgggttgtgtttatatttaattaactaatatatacttttaatcactgagaataagaaaaactcaattgatcatggaaatgtttagacatttagcattatacttagatgcaagattctatttagatgcagtctacttagatgcaagattctatttagatgcattctacttagatgcaagattcttagacatttagcattctacttagatgcaagattcttaatttttccttttgttagtttctttcttttcaaaggagacaaaaggaacgctatcactatgttagactagaccacaagatcctaactttgtttctaaatcaccaacaaccattctacgaggctgtcttccaccatgtcaagacttatcaagagggcaccaatatcctctggcacactcctacacaagataaaacagatgcagaccatcaaattacctccccaccctatcctaggtgctaattttttttttgacaagagacaacttttcgttgatgaattgaaaagactttctgtatgcttgtatttagagctttagaatcttttcatttcatcaattgaaacctctatgtcctttaaaaaaatatagaaccaggtttagcttttggaagaacttcaaggagagcttcgaaatctgcaatttcatcttaaccaatcttcaaaatacaatattccaagcagagcaatttgaatacctaaaattaaaacccatctcatttggtctggaagaagtgcagaaaagtcaatgaaaaccagcctctaatgtgatggaccgattcagtgatgataatgccaagaatggattatggatccacaacccaaagaaaaagaagcatacaattccactgatttcctagctctagaaatattgagccatagattgtaaagacaataaaattgtttcccaagtatgtgccagttaaaatcttccaaaccatgaatgctagaaaccactctcttccaaagagagtctggctcactaaaaaatatccagccccactttgcaagcaaaaccaaaattttcttagataagccaccaatgcccaaacctcatcaagttggaactttaatcaatgtaactggttgttgttgtgggacttagtggttttgcatttgcatagtgcaatcgcaatatatcatgaagcaggttcattgcatgtaagatgctcaccatatctttctgtattgcgtgcttaattttatatgataagtcatgggtcatgatcatatcatgcgagatgctcactatgatggatctctctaccttggaccaacgatacaaggaaagagtgagatgcacgtttgttgcatacccgatacgtgaaaacaaatgtcacaactcaggagttcttgcctcatcaaaagggtgatctaacgatcatatatgatgtaacaaggacatatgattcaagctgctgggcacaatttacaatttctaaccataatcctcttggtcgtcttgactattgaaaattgtgttggaatttgatgaaggatgagtttatctattcaatgagcttatgagccccctctctgatgcatatttgatattattccagctttcttgtagatttcatggaaggagagaaacaaccacctcttgaacggaaagaggaagctctttgactatgattttgaacttacaatacttgttgctatgttctggttcaagtgtacatatttctatagttcttataactttacatttgtttttgacaatttggagaagcctctttgatatgaatcaagaaatcataattgaatcaaatgaagttgaagagatgcaatgcttgaaagttgaagagttatttggacaactcaaaagtcatatttattaagaaattatgtatttatttactgttatgtggtttcatttattatagtaattgaaagggcataaaattaaaaatgatatgaaatccctgggcattggatataagaaccatgttaaacaagacttaaaagaacacaaccccaacagtcacaaaattaatttgatttcaacccctaagataggcttgattcaagttacttaggtgatctaagaaaccaagggtcgaacaaagttagaaactcccatcagtcctcgatcttcaaaccacttcacagtccacaagcaagatagatcaattctcatttgaataatccaaatattcgtgcattctatcacaagaacacacaattacaaaattctacattctagaatttttagatttcattcatccaaattctcctttttaaagtggaaattaaaccctatttatactagttaaaatatgaaatgaaaggtcacaacatttttcaactaccgtaataaatgaaaacacataaatacataattctttaaacatttaattttatgacttttgggttgtccaaataactgttcaacttccaagcattgcatctcttcaacttcttcatttgattcaattctgatttcttgattcatatatcactcttgtaactcatttggcttgatcttttgcccttttataaattccagaatgaaatttgtggatgcaaggctcgatgtcacctgtaataaacaaaagaacaacacaagaacagggcaacacccaaggaatttgcagtactatattaataataaccaagtagcacacagccaaataagagggctgctctctccaaagtgaactattgttcaactcaaaacacataaaccaagataactaaccctaacacaaaactacaatacaataccaacattcccttgccacctcagccctcgtgtccacagccaactacccctttttcagggggttaatttcctttttgccccttctcttatatacttgcttaatgggaggtctaacagtggataacctgctagacaaaatactaacttcttggtaatttccaccttccatgaggaagcaaattgggaatcactcaagggaggaaaaacatgttatcgagtgtaaggttattttagccagatgattattctggtcaagttgggctaatgcatcattatccatttttttcactttcttctggaaagatgctgaaagctaaggttaaaagtagtcaaataagatattagctactaaaaattgttaaaatcttttaatttgtggaagaataataaaaaataacgtgtgaaacataacaattatagtctaatttatttgtattttatttgaattttgaagaatgtttttttagaactatttttatatttgcatgataatgaataggttcaatgtagtaatggtagttacaacttattatgctttatttctcattcaggtag

SEQ ID NO: 7319 - DNA, 563 bp, Cucumis sativus
  Intron number 1 from transcript Cucsa.128250.1 (locus Cucs a.128250) derived from phytozome v7.0 (chr-ID scaffold0102 4; pos 302245 to 302807 reverse strand)
cgatttctctctgcttagtagaggtaggagaacacaggtagtactttgaattcttaaatttcgtagatttgggtttgtttttcttctgatggggtttgttttagatgtgattagttgttgattattctgtaaaattagatgtagtttcattcagaagcttctggggttgccgatttttggccgacactgtaaggagtttaatccttaacacgaatttctgagaagcttttggtttttttatctctattttggttgcccatgttattcctgtgatcgagcttgtgggattctatttctgccttaggttttttataatttttcgtgctgttcaaactagttttgttttcatttttttcacaaaatagttatgacgaatcatgattcagtggttcatgattttcaaaggaagaagaagcttaaacaacagttacccaattggaaaaaaaaactctcaaacaaccgctttttgtaactgaagtgattacttcatttaacaatatgttggttaaatttgttgcttaatcagttgtcttttctttggattgcagaactgtctcctaggc

SEQ ID NO: 7320 - DNA, 2139 bp, Cucumis sativus
  Intron number 2 from transcript Cucsa.184670.5 (locus Cucs a.184670) derived from phytozome v7.0 (chr-ID scaffold0127 4; pos 316049 to 318187)
caaggctattgagagaagaggtacctctgaatgaaatttgtgttattcgctctttcagtggatattttgtagttgttttcacatttaatcaacttagtattactacatttgtcacccctttccttggtgctctgccaccttagtacctgatggtcggataatcagtttgaccgtatgttctaatgccagtttgtgccactcaatgagacgactctcaagtgatactttcaaattttcttttcttaaatcagtaaaatattcagttggttctgttgtgttttctctctgaagctgatgcttgaaagacaagagggaaggaaaaaccacaccgaccctgtttgactctaaaggtaaaggtataaaggatcttgatcttgaccatccttttcctgaaggtttttggaagtctcagaatataaacagttggagggagatcctatccagggtatgctattaaaataggtttttatcaatgaatcattatcaggggcaacttgaagtatgtaatacctgtagacgtatagatgcctgaattgaataaaacatagaagcataaagaaaatttctccaattattgtggatataagaagttgcattgaagcatcatgagctggacttgaacaacaatcagggggtgataaaacaatgtcattgaagaaagaaataaaggaccaaaaactccaagtatgtaatacctgtagacggattacaaaagaaaaactcttaaataataaaagctgtaaaataaagagcaaatggttgcttgttcttgcacccctgtgtgcacacacaaaaaatggtgcagacaagagtataaggtccagaaaaggatcaaaggagtaggaaacctcccataagagactcactattcctagcactgtaaagagtccaaaagaaagcatggcttaaagcaagcccaagatgcttagtaataccattgaaaagagtggccaaccaaagcattatccaggaggtttaaaatgcttttaggaaaaggtaaagaccaaacaaaagcctccaaaataagtggatagagagacggcatggagtcttggctttggattcacacataatgtagaaggagataaagcaatataaagcatgtgcctttgtaaatgatcaaccgtattaatagtctaagctttcaaagaaaaatctttattttcttagaataagtgccctgatcactgtataaaggttgtgatggtaattggcattacccacctaattctctgtaagaggtttaatagaaaatcacatggaagattcaagaggccaagtccatgtgttaggagaactgtgaagtctaaaagtagacaaaaggtgggatatattgagcacagaagatttaagaggtcaagtccgtgtgtcaggagaaatgtgggtctaaaactaagcaaaaggttggatagattgaacacatagaagattcaagaggccaagtccatgtgtcaagcgagctgcaaaatctaaaagtagaaaaaaagtgtgattggttggcccgtttagttgtttccacatcaacgatgttttgacgaaggctcaaatcttatgcttcagttgcccaactcactcgtccgccatcatagcatatgcattagatgtaagcctaaacaagtagcggcatacagtctcataaacaccccaagttaaccaagaatccttccagaataaagtagaaggaccatctccaagcttacattgagcatgaccagcaatcaagtccaccatgtgaaaaatatcttcaagggtgttgatggtatcaccagttttattctacatgagattgtaacaggcagtgcttcttcttctcaaaagaaatatgagaaagttcccagcaactgtgatctatgataataatttagggacattatggtcaactgttaattcagtaaagcttaccacaattcacaaattattgctttcctttattctgctaaatttttcaatctatacttttttgtatctggtaacattatatgcactattaatgccaaataaaaaatgtcattccatggtcgtaacttttggaactaggttacgatatgccaatgagttcttgctcattttacttgattgttcttgacttgtttgatgattttggtccgctgcatgctggattcatcttaggatttctgt

SEQ ID NO: 7321 - DNA, 2970 bp, Cucumis sativus
  Intron number 1 from transcript Cucsa.213110.3 (locus Cucs a.213110) derived from phytozome v7.0 (chr-ID scaffold0154 3; pos 857992 to 860961)
gaggattaagcgagggaagaaatcaactcccagtggtaaggctaagcgaactttctcctctcttttcccattgaaatcgctttttcgtttcgcatgaagtggaagttcgatctcttgcagcttcaatcatcttttttttcgagcgtcttctgtgctgattgttgcagtagagttatttggtctgattgtttgctagatatcgtggtttttgagatccatggagcagaaagatttcccaagatttttcagaactttgaaataaactactaattttactttgtatggtcatatttcaatcttatattagaaatattagtgaactttttatgttctttttctttctagggaatcctccagataaagttttacattctaaacactataaattattaaaaaccagttccgtaactttgtaactttcttgattccgagatgagggttacttagatatataacaatttataagttactaaaacgaaaaggaatcttctatttcaaaaaaaaataaaactaaaaggaatcttggtcgttctttgtggttgtgtgggggggtgggtgggtacttgcggtttctaaggttggatacaatttggctgtattatgtaatcaatgccttatgtgttgcttgtttagagacttgaaaatggacctacgaaatgattctttatttttactggtgctggtgctatgtaaatacaatatagaaaggttatatttgaatatgggttgtaacgaagtggtatagccttggttataatgcattgctacgtgaccaactcataatgatttagagaaatatgtgaagactctagagattttgacaatgtcttataacccatttttggtttttgaaaattaagcttatataacactactcacctttgagttcctttgttttttgtttcattgtctatcacggttttggaaaaccatgcaaagaaaaggtagtttttttcccctttttttcttttcttttttcttttttcttttttcttttttcttttttcttttttcttttgacataaaggttcaactatttctttaagagaagggaaaaaccctgaggtgggcacaaatttttttcttgttttgtttgagcgaacaactatttgtacattacattactcgtatagccccctggggtgagggtctgacacacacgtagacatagggggctgtgagaattaccattaccgttttatgcggatgatgagtggagagggtggggtatcttttggcaattatcttgtaattgatctcttttgagaatttgggagagattggtattctcttgtatacgtccctgattttgaaaaataaagttgaagttgtggctaaggactctgaatttcatttatagtctaccaattagtgattactttatctcaatcacttttcttggagagaattaggtccctgacatgcaaggttgttctgcatattaaagccaaaaagtaatgcaattcttcaggtttgagttgaacacgttttggtatatgtatcatctgaaaatctgaattgcagaaagaatcatagcgtagagatggtagagtaattgtgttaggttgaggataattgttgtacagttgagtagcttgaagaagatacattcataggttcatatgttggttacagaggaaacaaccaccaatctaaagagttgtacataactggaaattaaaacaaaaatccaattgcgtgtgaaccactgagcccccaactgtttctcgtttcagtgataagaaaaaacaatgatcttaaaaattagaactatacatttctgtatacatcatagccagaatatggtgttggggaggtatttgaaaggaagagttatagcctgataaaacttctccgggtggagaactttcgacagtttaatatatagatttttcaataattctgaacaaaatccctcagacattttttccgcgttccaaacagagaatatgtgccttggaacagtgttttttatttatttttgtgcttttaagaacattggatatagaactgatgctaggtatcaagaaactggtcgagtaaagccaaattctgctttaattttatctgggtaaactgctattagtcatttgatagttagcaccagcagttaagtctctacatcatcacttctttttgcaaaatgttaggttgaacttaggcttcactttccctagctgtggtgtctcccatgaccaatgggaaggcgtgaagattttagatttggaaattacaatgactttttgagcttagattactggactatctccttcggctaatttagttatttgattcattttttttaattggctattttctcccaggattagaaaatttgttctcacgtttcaatgttgcttctagcatgactatgtttggcctcggaatgtttggggaggatgtctccaaggtctttgacgcaagcctctaggcggaaagctggaggaataatttgaagtgcatgatgtcttcttgttgattattggctgtggggggtggctctaactgttatcattggtatcaaaaggaaaaaggggaaaagggtacttggtggataattccttgctcaagattataccattggatcgtgtagttttatatcagtttgtttcctctgaagattatgaaaccagctctctgcctcattaatgatgtcacgtgacatacttccgctctagtcttgttttgtagtgtactttggtgtaactaatttaattcaagttcttcaagaatataagattttatattttcgagaattgctaatgtatattgtttcttgaaaacctcttctactgtcaaatttgctagtcatatctcggaaaactgcctttctaatctatcttgcttttccaaatattcttgagaactgaacattcgaagatggcaaaacatgaccattcataatcagtcgtgcgtttcaaatcaaatgtttgtgaatcttagaaagacatttctttttctgatgcagat

SEQ ID NO: 7322 - DNA, 1058 bp, Cucumis sativus
  Intron number 2 from transcript Cucsa.067100.1 (locus Cucs a.067100) derived from phytozome v7.0 (chr-ID scaffold0069 6; pos 1514441 to 1515498)
ctcactgagggtgatctcctcgccgtcttcgcccagtaagttcacagtcctatctattttctccctcttctttgttttgattctgctctcttgcagctgtctgttcgtatttacttgagagactgtgtagttggataagtttagattgagatgttgtgctagatttgtgtgttcgacattgaagtgaattatctctcccttggtcgtgtcttgttgttccagtagcttctaaattgaactttgctggtagcgacgaaaatttatagggtcctgtgaaagtagaaaattttgtttgtaggtcgttgtaaattgtttttagtcgacaatcctaggtatttagacattggtaacttaagaggtggagttgatgtttcaagttgtgaaaatagactaattgagctcatagttgttacaacaatagattttgttgtttcttgtagtgccagcttttcctatttagaattcatcttcattgtgacctcggaggggcaatcgtatgagaagggttgggatgtttggagatacctgtttaggtcctaggtttaactctcaggtggaaaacttggcttcgattggtaatatttggttttttgtttttagtttttgaaattgagcctatagacatccctcgcaattgtatatttctctccttgttcttttgatgtggttaagaattcaattctttagcttataaaatatgcaaatcatggtaagaaattgagagtatatagacttggtttttgaaaactaaaaaccaaatggttaccgaaaagggtctaaggtactcaaaacctttgttttctctctagagctagccttggtgtggggaaggcctcttggcaactagcagggttggttctatacattatgcatgctagaagagatctttgatatcttggtttatgtgtgtgtaatcacaattgtttcaattaataaaagaatcttttttttcttccctgcccttcatcgtttgtctgtaaatgcatttttaaggttacatgctcacttgtgggtcatttgtgttttttgaattttgaaatatatttgaacgtacaggt

SEQ ID NO: 7323 - DNA, 554 bp, Cucumis sativus
  Intron number 1 from transcript Cucsa.133390.1 (locus Cucs a.133390) derived from phytozome v7.0 (chr-ID scaffold0103 7; pos 1082841 to 1083394)
ctaccacgatccaatccgcctatcggtctcatttggtaacaaatgtttcttttccctacttccttccgagttatcaatttagtctctatattttattatgtgttttgattgttttttagtagtgttaaattaaactctttagaatacaataacattagaaattagactctcaaatgataaaagatgaaccatcaagtttcaactttacaattatataagtttgatgatccaatttttaattttacggttgaaaatttgaaagtacaattgcaactaccacagttcgttaggaatgatcttttcaaattaacgatatataaagttgttgattttgcctttaccttaactgcctttctttgttataattgcttgaaagttagctggtatagaaagttggagataaactatgccactcatgatgatgctgtatgagctttttatttgtcaattcaattgaatagcatttttgtgaagttgtttggtagtaaaatgaaaaaatgttggcttcgtttgttgtgatttgcttggtttgttttaggcaaggaaagcattgc

SEQ ID NO: 7324 - DNA, 675 bp, Cucumis sativus
  Intron number 1 from transcript Cucsa.114750.4 (locus Cucs a.114750) derived from phytozome v7.0 (chr-ID scaffold0096 8; pos 109752 to 110426 reverse strand)
cttgctctgttcttggtcagttcttcatttcatttttgttttctttttaatctctttttgtcttgttttccccttctgttctcgattttgatttagttttagtttaatggtgttagttcagttgagctgattgatgcttgtgaggggagcgaatttcaactggggatttggggattttctgctttagggagaacgagctggaatttagttcaatggttttcagattcaatagtggtttgatttgaatatataaactatcggctttctgatgggtgggattccattttcttgcttctttgactatttgagtggtttttggacttctcatttttttaaaaaacttttttaatgaatcaatgaggctttgaataaatttgtgtttgtagttttgatgtctactaatgccattgttagtacgtcaaagattgggtataaacaaattgaagaataggaacaaagattactgtgagattgaaaatactttaagtctttacttttgaaatatatctgcttattcagatatgtgattctttatggggttgtttcaatcttatcttgtcattttgagctgttgttgatattgtcttcttggatttagttaggcggattcttttccatttaaaatggcttaactttacagctgagagcaggtacttccaattcacattctgtacc

SEQ ID NO: 7325 - DNA, 6345 bp, Cucumis sativus
  Intron number 5 from transcript Cucsa.364930.1 (locus Cucs a.364930) derived from phytozome v7.0 (chr-ID scaffold0361 1; pos 2400726 to 2407070 reverse strand)
gagtaccaattgttagatagtaagttggttattctgttatgtggtttgaagtcttttgtgtacaattaagtgtgacctcaaatttagtcaagccaaaagttaaatgaggtcttcttctttcctgtcctttttctttcttccactccttccattttttccttcttccatgcagagcaaccaccgtcagccattgccgcgattgatgatgacagttgcttttaatagaagaagggaagaagatggaaggaagagaggaagaaagaagaggagagaaaaaaggggaaaaaaaagagaaaaatgattttgtttaaaaattcattaattaaaaagtcaggaaaagtactcttgttatagaaagtaaatgctagttagtttttccttggtaattaatagataaactgacaaaaggacgcaaaagtgctaccaaatgccattcttagggtaaaattattgagtttgaaaactcaagacccaaatacagcctaaatcaattcttagagtccaaaagcataaattttcctcataaaaaaataataaataaaggaagaaatattattttgtagttttctttcacttccttttagggtttgtttctgttgaacatcattttagcttttcattataaatttgttgtttaatgaatagttaagcttttattaagaaagaaaggaaaaactactagggaatacaaaatataggtctagagaggcaaagtacaaagggggcctccaatgaaaagaacaaagatgtaatggataattacaaaagagatcattaacataagctcataaggatgcatagtatcctagggacgaccaaatctcacttggatatatctcgagtggtcactaaattatattgtttcgtgccaccccaatgactctacaaaatggtacatatttcaacttgccataaaaggtttctcttccataagggaggatgaagaaggaattcctcaatcatctatttccatgggaatgtcaagagaggaataattgggtaatattcttggttacttcccttgttacccattggtaattaaattctatagataggaatatttgccacttgtatgaaacaattattatcattctaataaaagattaaaaatcttgattctttgaggaatattcgttgagaatacttaggctacatcaattttgtatcagggctagtgttgactgctataagttgaaaactaggaaactattggtgatgccgaccaaaagagtgagcttcgtgggttgtgctcattggtgaacaacctacatctaactaggaggaaaggaaccttgaaattccaagaaagaatgaagaaaccaaagatgttttaaaattttgcaataatggactactattgattaaagacgccgaaagaaggaaccaaagtttttttaaaattttgcaaggatggactactattgatcaaagatgttgaagaaaaaataaaatacagtagtttgtatagacaagaaaatcaattgtacttccaaaaacagttttggaattctgactcaagtgattcagaagaagaattccaacatgctaattttactcatgcctgattatctaagaaaatctatcattatccacattagaaatttgattctagtaattcaagtgattctgatgatgtttctaaggcggtttgggacgaaataaaaaggcgacgaattaaagaatcattaagaatcatcaagaatgaatttttactacccatgaagaatgttcaagacgtgaaattactcttttagttatgaaacacgatcaagaaaggttgagtcgagaattagtggatgactccctcacccactatgagattgaaacatattcacgaatccaacaaaatgacttctttgatctcatagcattggagaaaataaagaaacaacaaaagaaatccaatgttcattaggaaaaatgactcaacatattgatcaattatcaagccatttgcaaaagttcaagaacggactggtttcatatactgaagaaaaaaaaaggaataatggttgggaaatcttcaagatgagattaaaaaaattgaatttgaagatgttcatttggaaatagtctccggtgaagaaaaaaatccaacaaataagatggaaagaagtactggacactgagcaagaacaatgacacagtgattgcggtggaaatggaccaccaatcgacgaagaactttaagcgaatgataaagaagacaattattcttgatggattctctttggaagatggtttttcagtgattggttctttaaatactgttttgaatgagctcgaagaaaacttcctttctgggtttatggttgaagtgttttaggttgtttttgttatgatatatatatttataataaatatcatttatcgtaattgtacatacaatctatggtttattttttctctatatatatatgtaacttcactctgactctacatgaataaggaatttacttttctctgaattattgagtacatggtatcaaagcctttagggtttggaatatcgtagtttgtggcttccttatccattagggtgtaagtttaggtcatcttcgagtggccgtttgtcgaccccgcccaactcataagaagcgccattgccttccgtcgcattctgttgtcactgatcgccaagaaacattgcgcgggagcttcacgcgctgtcaaattttttttgcatagcctccacgcgtcggcaagtgggagcgtgtgaagcctcctatttgaccttcgtcttctgggcttgtctcgaatcctattttctaatcagtctgtgcagctgggtccatcaaagatcattcgggtttgacggaaattgaagactatgacctcgttctagggtatattctgaaaacttttttgggcggatgccgtttccacaacctgttttttgattaatagaatgccttcctctgttcttaacggtgagattccttatcatgttcttttcctaccaagtctttgtttcctattgctcctaagatatttggttctgtctgttttgtttgcaacgtttgtcctcatcatactaagttagaacccaaatccttgaaatgtatcttctggggttattcgcgtgtttaaaaggggtatcgttgttattgccttacccttaaaaggtatcttgtttcacttgatgttgcgttttttgaggatgcaccctttacttcatcaccatcgagctcgtgtcaaggggaggatgacattctttttatatatgaggttacctctcccacatctattcctaactctattcatgaagctttacctcatcctggctggcgaaatgcaatgattaaggagatgactactttagatgataatggtacttgggattatcttgtgctgtaggaaagaaggccattggttgtaaatgggtgtttgttgtcaaggtgaatcctgatggaatattggctcgattggaagcttgccttgttgccaaatgttatactcaaatctacagaattgattattcaaatacattttctccagttgccaaattaacttccatccgcctatttctttccatggctgctacccataaatggaatggccttcgcattaacttgacattaagaatgcttttctgcatggtgatcttcaagaggaagtttatatggagcaacctctgggtttgttgctcaaggggagagtgataaagtatgtcgcctttgaaaatctttgtatggtttgaaacagagtccacgtgcatggtttggtaagtttagtcaagctcttgtaggttatggtatgcagaagagtacatctgatcattctcttttcgatcgccaatctgataatggtacaattttactagttgtatatgttgatgatattgttactcctggaaataatgcatcgagtatttcatctttcaaaattttccttcagggtcagtttcatacgaaagatttgggccaattgaaatattttttgcgtattgaagtgatgagaagcaagatggtatttatttgtctcaacaaaaatatgtacttgattagttgtttgagacagtaaaattaggagccaaaccaactggtacttcgatgatgccgcattagaaacttattaaagaaagagaattatgtaaagattaagaggtacaggaggttagttaggaagttgaattacttaacagtgactcgaccaaagattgcttattctgttagcgttgtaagtcaattcatgttttcccctaccgtggatcattgggatgtagtagagcagattttgtgttatttgagagctgctcttggatgtgggatcttatacaaagatcatggacatacaagagtttaatgtttttctgatgctaattggggcaggatctcgagaggattggagatctacttatggatattgtgtgtttgtaggcggaaacttagtatcatggaagagtaagaaacaaaatgttgtttctcgttcgagttctgagtctggatatagtgcaatgacataatatgtgtgcgaaatagtatggatataccaactattatctgagataggcttcagtattacagtgccaactaaattatggtgtgataatcaagctgcacttcacattgcatctaatccagtatttcatgagcaagctaaaatatttaggtggattgtcacttcatttgtgagaaaatccaagatgggatggtgtccgcaggatatgtgaagactgaagaacaattgggagacattctgacgaaaactttaaatggagtaaggataagctatctgtgcaacaagttggacatgatcgacatatttgctccagcttgagggggagtgttatgattatgtttataatatatgttatttattgtaattgtacatacaatctagggtttatttgttctctatatatatgtaactttactctgattctacatgaataagaaatatacttttctctgattaattaagtacagtcttcatatttgttttgctcaggtataaccattgttttagttgtaaactgtgtttctcctatgttcctttgctattagtataatactcttgtacttgatcaatttttcccatctatctaaccatcggacatcaatgttaatcctattttttccattcagctttatagttttctaactttgtgtaaattctttctacctctttctttaaaaaagacatctaacctcgtgatatgatggagtcttcaatctaggatcaaatgaagtaactaaatccaacagaattttgaaatagggatctttgactaaattaatgagtgcatttccatacaaaaatctataaatatctccacgatcactttttttttcttttgaaaaggagaaacctttttgttaatgtattaatgatgtgacaaaagctcctagtacaagagaattatacattgagtatgtaaaccatggatcaggaggtgcacctggacatctcaactaggttgacacctctatagcaccctcatcatatccaactaagctaaaaaccaaaacaaaggagtaatgtccaaaagcaaaataaaactaaaagtacaaagaaatacaaatacaaggactaaaaagactaaatagattaaacagtcatttaaagaagagggggtgtcaacctagttgagatgtttgagtgtgcctgctgatcctaaatggtttctttttgtttagctctttgtataaaccttttgtactttgagctagagactggtttgcttttcaaaaaaaaaaaaaaaagaacatgtcgttttggtattttcattctaaagtttatgctaattattccatccaaagtatttgtttgaattggaatgttcttatttcttcgatttaaatcacatatcgatgaaaagctttgtttccatttcaaaaagaaaaagaagaaagatcttgtatttatattactagttttctctctgttttattgcatcgttcttggtattttgtatttgagcgttaaactcatttcattacaacaatgaaaagctgtatttatatttttctaaaaaagaaatattgtttgaaaggagccattgcatttttcatgacaagccacttcctttgtttgactgttataaaattgtccgtggcgaagcttcatggtgctctctcaccaagttatttacagattactctattcaagatcttattttaagttagaatgcatttatatcttcattttctagtttgtagtttctggtttaggcccacactcaagtcatgtgattgtattcgttagtgatgtaagaagaataggggttaattggataattggtaatactacatatatatatgaaaagaaagtatattctatttgaatattaattggcaagcttgactgagcagtttttcttcgtgtctagacattctacggaca

SEQ ID NO: 7326 - DNA, 5403 bp, Cucumis sativus
  Intron number 1 from transcript Cucsa.323350.1 (locus Cucs a.323350) derived from phytozome v7.0 (chr-ID scaffold0308 0; pos 2812811 to 2818213 reverse strand)
cttactatacaaggtaaatattttagaatgttcacaccttaacaactacgaaactgaatatacatttgtcctagattaactgatgtagcctaaagaataaaatgagagaaatctcctagaataaagtcaaaatcagccgcctggtgtactttgacaaaggagtttagcgcctatactattcaagacttgtgtttgaactggccagccttcaccacttgagttttttggcttttctttgttccatttctctgttttttgtttcctaatgtatttctgttttacgtaggaatgtatttatgaatttctttggatactagtttcttgattggaaatgataaggtagctaacgaccttacttttttgaaatggagacaaacctatttattaataataaatgagactaatgctcaaagtacaagagtactaagagcaaaataagaaaaagacagtcatcaaagatgaacccaaacaaaacatatgggaaaaagaccaacaaacaatcacaaagtagaaacaacaaaagaaccaaagcaacaaagagttgagacactagttaagatcttaatacaaagcaaatatatatactttcatgaaaagcacccacttcagattgaaattttgaataccacatgcttcaattcgaaaggagaagggatccatcggttgcttcaattagaaatttttgctctttcttgaatatgagagaattagttctgagtaagtggtcaagagactagaatcaacactttatctgcaaccttcaaaccttacgaagtacctgattattggaccaaaagatggctgaaatcagatctcgaaagaaaactaatttgcatttttctactattgagaaattatcttcattgacctagatgagaaggaggaaggttatcaaattttcattaaaccaaaatgatttcacaatcattgactaagggcagcagatccttaggcaattccaagggaactttgatgggaacaacactggcttcatcaaatagaaaagagagatcagccccttcaattttttcattattcttgatatcaaaaccatttgtaaaccctagggcctcctcactactgacactaaatgggaactccaaggtcttggaggtcggtttgtcaatgtcggcacgacaaggggagtcttgcaacaaattaactttagagttaaaaatggggagttttgaatatttgaaatgcttgacaggagagcctgagtttatggacctggaaagacgattagaagtttggattttggagctgcaaacctccaaaaggtcaggattgtttgctgagatagaatgctttgaattatgccgccgagagggggctgaagcaaaaactgaaggagaaggatccttgaattatgcttccaaactaattagtcttgttgcagaaaccagaaactgaagctgcggaggccataataggaagttgccgttggttggaggaaaaaatgtaatctttaattacttttgaggaaatctcataattctgcatgatagtacttaaaggagatttacccttttttctttcacttctgcatgatagtacttaaaggagatttacccttttttctttcactacttagatttacatctgccgaattaatgggaagttggttaaaatccatgtgccctagtttctttttaattcaattgtgaccaataaggttttcattaattagaagtggagactattcagattctcgcccatggctgccacctgtgtaattgaacctttcatcttctccagcgtcatacggctggccggaaaatgttgcagagattgacaagggtttctacattttggtaaggttgcaaaaactgatcttggtacattaagtacaagtgggaaggaggagagatcacatccctcatcgagcaaagtttctcttacccttagttggtcaatggagttgctgtaaacgtcttgtacactgggagattttctggaaaacggagggtttggaaactcaaaatctccaaatgtagaaatatgttttccctcttttggttagaaatttcgatcgttaaaggaacgaatccacactggtttttcttgaccttaatacgagcttcactacaattggtaaaattaagggttggctttttctgaattttctgttcattgttttacagttttttctggtcccttgtaataggctgattgttattaggttgctcctctgttggtttttgtgttgatgttttctttctcgggatatgatgattggcgttatggaggtgtcaacctagtttagatgtctgggtgcgccttctggtcctataggttccccctttcttctttattgctctctttgtattaatctcttatacttagagttcttattaataaagaagtttttgtctccgtttcaaaaaaagggtttcagaggctatttctatgaatcctccaaaatggtctttgattgtttcgaaaatacttctacaccagaaatcaagaggaaggttcttcactttaatccaacctccataacctttcaacaccaatggcctactatgttttgcactggcccatttttcaaattttaggtggaaattgtcccattcttgccatcctagttgagatgttcgagtgcatcccctgacccctaaacctcttgtactttgagttctgaatatcaataaagaggttgtctccttctaaaaaaatactcatgtactttgagctttagtctcattatcattaataaagaagcttgtttatgttttaaaaaaatatcgaggacaacaaggttttatcaagtgcttccaaactgaattgcaaagtggacagcattccgataatgtacctttgtcttcctttgtgtggctatctagttgagatgtttgggtgcacatgctgatctcataggcttagatcttgtctcttcattttactcaacactactttgtctattcattttcttaatgaagaggttcattttcctttttttttctaaaaaaatcataacattttggtgactttcctctctgcaaacttcagaaagatatcattttttttaaaaaggatacgagtctcactattattaatataaataaagagacaaagctcaatgtacatgagggttatacaaagagcaataggggggagggaggatcaacgggcgcacccgggcatctcaactaggttgacactcccatagcgccctcatcacattcaaaaaacgacaatacaagaatcaaacaaaaagccacaaatacaagggcaaacaaaatgataaaaataatctgtccaaagcaaaatcataaatcataggcagcaggccgagaacaaaggcatcattaatagtggttatagtgttttgctatcctgcctctaacctcataaaactcgacactgagacctgcaagaaatttgtaagtacagccagtttccacagttttttttaatgcttttgatcctctttgacttccactcatacgtaccaaagaggtcaagttcttgccaaattcttaagagtgaaaattctgggtaacttaattacttccctattgtatatcacccaattcaaggtttggcatcccacttggcaaacaaaggatttttttatctctggtgcaattttttctttcataatgtaaccaatctctccatgtccacgaatatacatctgaacactttgggaccaacaaagaaaattattcccattaagctggatggaggttatttggatggtagaaccgttggaatggattcaattgtttaaaactttagcaatagatgacttgttatcggacattattgctggaagtagaggaaaaacgaactaaaacccaataaccagagaaccaaaagaaggaaagaagggaaaagctagccgcgatagccttgtttgatctctacctccgtcaaaaggaaaggtatcatcttaggcaaacccatcactgattacacaagttttttctgccatatctttgttcgttacatcaacctctcatctgttcgtgtagctttcagatcgaccgccgacctttggtgggtctctactaggagttgtttccaaatccatcgtctgttgtttgtcttagctctgttgcctcaaattcttgtgcaccctcaaacccgcatagtcctcatatgcgccgcttcatcctacaaatccatctgctgtgtttagatttgtttaaatctagattcgtcgttgatccatctgcttcatccttcatcgtttcagtctagattcaatgaagcctcgacctctgatccgttggtggcttcacttgcaccgatcaccatgggtttcatttgtcagcaccaccaaactcgttgtttggtgtgtgcttttttgttcgtgcattaaatttttcccagtttgtaaaagattatcatgtaccctctcaattattctgaatattcaatatattatataaaatgatcaaatctgaattgagaaccctataaaatccatggaaaaagaaattctggaagaagacttgagacaattcaaaacaaccgaggcaagataactttattgggcatgctaatcggctggaatcccaaattttctttttgaattaatgtcttcttgaaaaaacatgttttctgtcatgcactaaaagatgagattattttcaaagaagctgcaaataagttaacgccacaatcaacttacttgccatgtttctacaaagaagagatcttcgaaccatatacagaaaaataaattatttgactttacaacttccaatctccatatccttaacactagagaaatgaaaacgcagaggaaggaggctaagcaacaacttactaaccagagaaagtagtaatgttaactggagaattcggcaaaagcaattggagatactgactaaagagagagcgagaagagagaagggtgaggagagaacaaacatacctctagaattcttttgatttaaaatgcaaatgatattttatgtgctcatatgagtattataacaatgttgtaaatatcttttcaagttgttttttattttattttatcttaatattttaaacatttttgttatattgttctttatggtcatttaccttttcctacttaggttactcttatacacatgtatatatatgtatgtgtcttctgtgaacggaatagattattttgattctctcaaaccttagagttttaccatcactttcttatcatccctcgagagtgagaattagctactagttgttggtaagagtcgattgacaaatcaataacttagcaaaaaatcaagagaatgaatttaggtggctcctcaattaacttgatatcgaatgttttatacaatttagttttggccggactatgattcacaggctctacttttgtttgttttcggaactcaaatttgctcatagaaatttttcttgcagaggaattggtgaagcttgggatagctg

SEQ ID NO: 7327 - DNA, 1110 bp, Cucumis sativus
  Intron number 3 from transcript Cucsa.178690.6 (locus Cucs a.178690) derived from phytozome v7.0 (chr-ID scaffold0122 7; pos 1019693 to 1020802 reverse strand)
tgttgaggtagagagtcaaaacattctgggccctggtaagtattttgcttcattgacatatataatccctatgtaaatttgcagaaacaaactgaattgataaaaatactgtgtggatgggatgaggaaggcatctcccaccctgccctgttctcagctccattgacaacaatgcatactcgtgtactagctcataggtctttagatctcccaaagagcttgaataaccttgttctttctccatttcctgttatttatgagtaatgaatattttagttttggtaactattggaaagtagaagacaacacaaggtatacgtggaaaaccctagcacaaggagaaaaaaccacagtagaagtcgttcttattattttctaataatccaaaagatacaagggggaagaatataggctacaaaaagccctagcaaacatggaaataaaactagggtacaataaattacacaaatacccttgaggatataaacattcagctagtcccttatttccaattgtaacatatccatatcttacagaaggcgctttttggccatggatacaattatacaattgagatacaaatctgtctccaaagtttgttagacacacgttgaacatttttaagcataataaacaaaaaatgatcaaccggtataggacaaaataacaaattttgagagtgaaatacattaaccttatttctaaagtagataaaggcatgaactatcactatagatttccttcttgtattaaaaatgatatataattagaaaaaggtatattatggtaaatttgtagttctttgggttgtcctagattttcagaaaataatgagtcattatctgtatggtttaatctttctgttatacatgtgtccgtgcttctttgcctttggaaatgactcttttatgaatgaatatgtgtagattctcctctatttaatgttaatgattagcttctgtaaaagacaaaccaagttatacattttgatttaacagatcttatcttgtaactaatatttataatggtatttgactggcattgtgatcggttgtactatttctatgttatgcagttagcttccttgcagatcttggtggcctatattgc

SEQ ID NO: 7328 - DNA, 4443 bp, Cucumis sativus
  Intron number 5 from transcript Cucsa.273110.1 (locus Cucs a.273110) derived from phytozome v7.0 (chr-ID scaffold0251 1; pos 105902 to 110344 reverse strand)
acaaggtttgattttgtttctttggctgttacgtatcctttttcacgttgatatataaatgctgtggatgcatttctcaatgttaatggagttctcgtggagacattctaggttgagttatgcagtattttgaaaaggactctacctcattttcgtctccctctttctatcttttctcctctatgagtgcatgatgccttttcctgccatgttagcttgatggtttgtaaaaccatggcgtttctgttggaattacttgaattcgttatgtgtcgctacgaacaacccagtaagggaatctagctgggtttagagaagtgcatataaaaactttttaacctagtggcaccatattgtgttttgaaaacattctctctaataatatttgttctccctttacccatagacgtaactaacaccttgttagtgaaccacgtatatctgtatgtcaatctttacgttcttctattgcttaattgttgatttcgtagcagtttcactgtggaatgtttggagggagaggaatgatcaggtcttttgtggtagagagagggaccacagtgaggtttggactttgattagatttcatgtgcctcttttgtaactattctttgtacctaggctgattctttgaaacctctacttttggtccttcaaagagggatacttggttgtcctttccacttggataaaatgtctcaaccctacgtttcttcaccttttagcccaaaacagagcttgggcttctgttgattctgttattgtgaaaattagcaatggaatgaaagctgacatgaaaggacggatgtacttttatatgaaggttggttaaagtttaggagcattcaaacttttaaggtattagtgatttctgtggtgggattatgaggccatggcaaaagtagtcttctttggttgcttatatggaaacaattattagagttaaaagatttttattgttgttttggctttgttgagagtgctccaacaggacgactcttccttctaatgatgtagcaacttttgaggttattttttttataaacaaattaactcttaacttggaagctagaaggaagttagatctttggtatgagttcttttttacttcttcttttttttaaaaaagaactaggtatatagattctttaaataccggttgatgtttgcttatgatggtataggcttatggctttatcttagttatgtggaaacacaaactagaaaggtaaaagcataaaaggttcaaaaagagatgaatgaggactattaagtaattcccgataattggatttagcaaccttgttgaggaacaagacctttagatatttttagaaaaggaaacataaagtttgattgataaaatgaaaagagactaatgctcaataacctgaaaataataagtaatcagttagaggaaaaagcttttggaatggaataccttgacaatcaagagcaagagtaaagaaactcgtttctaaactagtgatttgaatcactccacaagaggtttgataacatcatttgaatgtctgtagtttgcaagttccgaaacacaagaaagtgcaatatgaaaacttatctcacaacaaagctaaaagaaatcttaattcattaacctttctcattatgtttataatggaggaaaagagggctttatataacctttcaagactctaaaccaaagtggccaaaaaaagaccaagagataaaatcttcaatggcttacttatggaggaaaaaggtaacccgaacgagtcacaattctccacaactcccctataaaaacaaggcttaaatgataaacagaaactttagaactctaggacatagttgtacaacctatagaccagatcttattcaagtaaggttgtgagaaacagaaactgaaatttaaactaaaacagtgtaataaaaagacgtgttatcctcgtaaccattcatggagtagcttgaattaaagttttgtaaagttaagtatgagtttattacatgcaatttagaatgcattcaatacatcttcatcttgaagctgaagtttgcaaatcatgtgaaggactttacatcttctagaatctcctttgtcgagttcactagagttcggttataaatgattaaagcttgtcgtagcttattggctctcgagcttgtaattggcccttggtgcatgacaattgatgttccttagttcacaccttatcctcccccttttgagaacaacatcctttgaatcattttatcattaataaagaagtttgtctccttttttaaaaaagaatcatagtcatcacctacatcgagcgtgctcaaatcagcaacattaaaggttacattaacaccatactcaccaggtaaatcaattttataagcattgtcattgatgcactttagaacttggaatgttccatctccacatgacaaaagcttggatttcttttagttggaaatcgttcctttcaccccaaacccaatctcgcgggttgaagtctaaaatcttgcgtaccttatttatttttgaagcagccatgaaattttccttctcaatttgctctttacttgtgcaatttatgaccaaacacaaccttagcatttgcatcataactcacagatttgttggggggcatagataatcaaggcatgggcattaaaggggactacctccatcttttgtctttgcttgaggacttggtttcagagaggggagaagggatgtcaatgtttggagtcctaaccctagtcttggtttctcgtgcaagtccttgttcaccttgttgttggatccctctcccactggagagcctgttttttatgttgattggaggatcaaggtccttggaaagctgaggttccttatttggcaagtcttgcttggtcgtgtgagcacaaataggcttgttaggaggaagatctcacttgttgggcttttttgttgtattctttgttggaaggtggaggaagactgcgataatctcttttgggagtattagtatgcatggattatgtggaactctttcttgcacgagtttaatgttagtttagttggctaaagaagttttgcacgatgatcaaggagttcctcctccattcacttttcaaggaggaaggtcgcttttttggtttgttggggtatgtgctgtgatttgggatatttggggtgagaggaatgattgggtgtttaccggtagggatatagggacccaaatgaggtatggtctttagtgagatttcatgtgcccctttgagctttgttttcaaaggccttttgtaattattcccttagtaacccctttttttaggtgaggtgtttttgcggacttgtgtttttggatgtccttgtattctttcattttttctaaatgaaagtcgttacttttataaaaaatcaagccatgggtcataaacagtttctaaaagagtgcatttggtagtaatatggacaaccttactacatgctaattttatgaatggtaaacatttaattttatttactacatcttttttttaaatagtttttttctctgtacaattttttaaatggtatgcttagaagctagttaatatttagctatttatttctctatttttgaatttgctatttatgtaaatatatttatatttcaatgttatttataaatttgaaacttatgatacacaatattttttgatgcacaatatactaaaatttcatttcaatgcgttatgtttcacgagttaataactttggttctattaacttcctcggtttgaccatctgttcaaggatggtttgaccatctgttcaaggatgataagtagttgaggacacaagcttagttctcatttaatttcacaacaccccaatagtggtttaaaaatttaacatcgctaatcattgtttttggaatgccatgtaatctcacaacctcctgaaagaataagccaacaatgtgtttttcatggacggataggttgggttttgctcatcttgtagccttttcttggtgtctttcatcgaactattatactaataattctatttaaaacattttcttttagtgaaacctcaaattgatagttgtgttttcattaatacaagtcttttctcatgttctgatctttctctttttttctcaaagtaggaaaaattatgttataatttttttttgctactttgttaagattttgagagaacaattttatttatatcatttgaactaaatttaaattgaattagaacaatgtagttacacaaattacaaatctaaattaattatccttcaattgtcacgtcttttctcaatggattttaggttgttttatgtggtgtattttaatatatgtttctcttgttttctaccaaagaaatatgcatgtgcgacagggttttagattcgaggtttggttccgatgcctgtatgtgctttcatttacaaagatcatatccgttttcaacaggagtctgtc

SEQ ID NO: 7329 - DNA, 1510 bp, Cucumis sativus
  Intron number 1 from transcript Cucsa.307890.1 (locus Cucs a.307890) derived from phytozome v7.0 (chr-ID scaffold0297 8; pos 174926 to 176435 reverse strand)
caaccaggtactcatcttatttttattttcctaccccttcctctactcacaaatcatttaaggcatttaaaatattttaagatacctaatcttttctttttttttctcttcttaattgagagttatagttggtttggaatctcaattagcttcctatatatatacattgaacaaaaaacaacctgattcatatgcaaaagaagaaaaaggaattttaagtgttgaaaagttgcaagagcaagtagagggaagtagtgtttaattttaagatttttgtaggagcggtgtgatattaattaactatacaagtgtgcgccgctagcattagattagtggagaggccacatatccacatatcccttggaatattcaatcaccatagcaacatacaataaatcaataatacttcacttacataacattctccttttgcttccatccccactttatgcttttctttccttttttttcttcttcttctttaatattaaaaatgtaatgcctcacacttttataactaattattttagcaaacattttacaataattacgaatataaccaaatttattcattatgggcatttctttaataatatactctaaaaattgtagtgttccttagtcttttgtttcaatatattatatttgattcttgtatttgcaattgctctgtatttgcatctgatctatttgatctatttttaccaccctgtaaaattaaacaatttgtcattgggtatcaacttttttcttttttaatttggtttttaaatttagagtgtattactaaattttgtattttgtgttatgtgagtttcaaggttctgtattttgttttcaatagatcagtaacttattcaacaaattgtaaaaaaatgtacatatgttttaacatacaaaattgaaagtttgaagttttgcattaagcagcttatctatatatatataatttgtatggtttgaaaactttaattacgacataaacttggtaggtatgaaattttttgaagtcttaaaagttatgagacataaaacaaaacttataaaattgagcagtagatgagatgtaattgtcaggtttagatagtattttattttaaatatagaatgtggtgaccaacttaaaattaaaaaggagtgattctttctaattaaattgtaaccaatttagatttgcatagaaagttttagatgcttttgaagaatccaatccaagttcccacgtgccaagcaatcgtttccttcgaggcaacacgtgtgacaggaaaaagcctgatttaaattatttccgtacgagttatttccttttaattttaataatattttgggtgtctctagaatccacgagtgtcagtgagtcaccgacgggggagggttgagtcacgggcctaaagaaaaacttttcccaaaaaaatgaaaaagtccttgtcgtattggagaatggaggtatcacggtgacactttttatttgtcaggtaccgaacccgagttgcagcggcagcgcttgtgg

SEQ ID NO: 7330 - DNA, 759 bp, Cucumis sativus
  Intron number 3 from transcript Cucsa.283340.2 (locus Cucs a.283340) derived from phytozome v7.0 (chr-ID scaffold0265 3; pos 505191 to 505949 reverse strand)
gaatcgtctacaaagacaaggtatttgatatcaatatgctggaattgatattgtcttctacctcttttaatatatttatatttatataagcatgatatgccattctgtttcgcccattcactggtgcatctttggcacggagctttatagcttcagtttgttttcgttttttttttttattttgattctgttttttcataactttatgaagggcatttttattttcagctcaagtgatttgatgttttacttcttttttgtccctatatttcgttcctttatcttatggaccattatgcttatggttctcacagaatgtttttcttctaccgaggagttattttagctttacccagatggtcctcgtatctagacaaatgttccttccttctccttttcacaacttttttaagttctaaacaaattttgattacgtagttaatatgtcctcttgattaatggtaggatcgagagcgttttagagactgaaattttgaacgttatcttgtgtttactaatatggtgtgagaggaaaatagaggtcaaggaaaacacactcgtttcaatatctttttgctggggtcatttcacctttttggttcattatgttttgattgttgctcaacatcattaagagaatttatgtgcttttttggggaattatattgttccattcttttatgaatttgattgttgttttgttttcatacatcctctttttgtgttattgatgtatatactttggttgtttgaaaggcg

SEQ ID NO: 7331 - DNA, 549 bp, Cucumis sativus
  Intron number 13 from transcript Cucsa.363940.1 (locus Cuc sa.363940) derived from phytozome v7.0 (chr-ID scaffold036 11; pos 1527412 to 1527960 reverse strand)
ctgcaaccattacactcaaaggaatagattattcggtacgttctaatctttgagttccctctctttgtttcattatgttattagttatttggggatctcttttcattcattttgtattttgtagtttagcttgtaatacctgcactctccaaaaatatgcattgtatgcgtattgcttttaatcacgaattacaaacgaaaaaagaaaaaacgtgattgcctttgaatctcacatcacatgaatcggattttggaatcattataactcaattagatttagaccaaataaggattagaaacaatggagaagaggatcatggagagagagagaacggtttgtttgtttgtttgtttgttttgtgctattcgacattgcaattgtaatttttaaatctcgttttctaagatcatgcagtagaattagaaacagagagaggaaaaacaatggagagagtcgtgagtccttgttgaacaattatgtacctgataaatattctttaaatttaatggacaggttaaagctagtcaaaagtttgccaactaccaccg

SEQ ID NO: 7332 - DNA, 1216 bp, Cucumis sativus
  Intron number 1 from transcript Cucsa.027750.1 (locus Cucs a.027750) derived from phytozome v7.0 (chr-ID scaffold0037 8; pos 597665 to 598880 reverse strand)
gctattacaggtattccgaggcttagttatcaccttcgtcctactaaactatctccaaatgtcactgacttttgaaatgtcttaaattgctagtttagtcattgaattaaagatgtttattgatctgactaacacatatcttaacttttacttttgtgtctaatttgtcctcaacatattcaaaatatttaaaaattataataggggtgatgaaaccttaaaattttaactgtgtctagtaggtacctgaatcaagggcggttgagatacttttttaaattgagggatctattggacagaaaattgtaagtttaaatgcctaaggaatgatattttggtccttcagtttattttgattttacatagtttcaaagtactagaactaaaccgcataggttagagatgagctttgggtaagtgaatattagatgaacatatttcaacaaaactaatctaggtattctaaaccttacactaaaagattcttaaaatattcaggagtaaactagatattctaaacctttgatgcttcccaggtctggcccgtagggcaagcataggtcccccgggagcaaaggtttgacttcccattattaaaaaatgacaatctaattattcatgtttgaaatggaataaccttgaaagttcaggaaaaatgagaattaaactaatataaaatttactagaactactatccattatctgaagtttttgtattgagtagtaatttgacatgttatgtgagtaagaaatcatgtgctggaatttcttaaatttccttttcttcctattttgtaatgataactacttataggactttgtgcaaaagttcaagcccacacggcgaacgatgtgttgtagtaaaaagaatgaagggagtttttaagtgtggatataatattaaagtttctaatatccaatcacttaatctgtttgaatgagcgatgatttaagttctcgtcactttttagacctccctctttatttgtgctagagacgatgctattggatcccggttgttttaattcttttgaagctctacttgttcctctgtagttgcgttcttataagttataagcaatgtgctttagccgatgcatgcctgtaattatgaatagataccattatatggacttctctaccattttattcatctgatatttatattcaggtcattgttgattgttattaactgttgtaatttcctgtaggagtg

SEQ ID NO: 7333 - DNA, 1278 bp, Cucumis sativus
  Intron number 11 from transcript Cucsa.356630.2 (locus Cuc sa.356630) derived from phytozome v7.0 (chr-ID scaffold035 77; pos 1483421 to 1484698)
cttacttctcaaggttatagagcccttattttcaggtctactctactttcttcaccctctccttttttttaccatttatcatccttcataattaaccattacatatttacctaattaaaaagaaagaaaagaacattcaaaatctcagccaaattttaaaaataaaacaactcattcttagaaaattactcttttttactttcatttcataaccctttcattttcttttctttttaatatttaaaattaagtttataaacatggttctacctctaaatttctttttattataatctcttttgaaaactaggaatttattatttagttaaaaatgtttaaagatacgaataattgtaaaccgttaaatgaaaaaatagacttaatttttttaaaaaaaaaaaaaaccgtcaagttgagccattgtttggagtttcgagtgacttattaatagtcttaggttattataatttgattacaatagtttgtgctcaatatgtagattattttagtttgtgttttaataatatgagtttgatacgtagattattttagtttgataaaaaaaatagtaaaccatgtaagtaaagaacaaaaaattatgaatgcataatgataaagctagttttgggtcaaaaattatgtaagactataataaacatttctagctagagtaaatactatttcaaaattttcaattatatagctcaatttttttaccatttgacattcatcatttttttattctttgctacaatgtttactatatcttctcaagctaaaatataatttatctcacaaatacaaactattataactcaaactaaaataatctacactccaaacacaaaatatcgtaactcaactataataaccaagaattataataactcaccatttacttcaaacatctctttaaaatgaatgaatttagactctcaaatcatatttattaactaatgtttataaactcaatcttcaaaatcaaaaatgtaaaaggttagtattaaactgcctaaatttttagttttgtgtccttggagaactaatattttcttcttttctttctcaaattttttcaataaaatttcaataactaataaagggtttagatttgaaattatcctaccaaggtgagttggctcaattaattaattaataaataaatgttgtacgtactaaaataaaatttcatcaatatattttgaatagttaatagggaaatactatcatgaattaataaatttactaaaatcatggtaattgaaaacagtggagacc

SEQ ID NO: 7334 - DNA, 3756 bp, Cucumis sativus
  Intron number 2 from transcript Cucsa.137330.3 (locus Cucs a.137330) derived from phytozome v7.0 (chr-ID scaffold0105 3; pos 30553 to 34308)
gcaggttggtcttgtaatctttcacctataagggggaagaatatagttttgtgacttggtaaactcagtgctcagttagcttctaagctattcacattgttatatttgtgtgggcatttttggggtttatccctatgtagtttggttctactggtatgtttctttgatcttcagctgttaatatcttataagaaaaaccttctgctgttaacatgatcttcatatttccttttttgtcaatttaactggggaggagaactttgtgagggtaagaggatcagaagtatgaattcttgtttctcttaggtggttttcttatttgatgaaaagggagtttgaggcagagttattccatgggagtaaaatagatttagtgcataaaattagttttcgattagataaattagggctcatctggatccctgttctaatttcccaagcttggcaaaataaaataagtttaagaaataggaaattggtgggcactgaatcccatttttttttaggataagaaacggatatattcaagagaacaaaagagaacagctcaagtgcaaggaataagggcctttcaattattgaaaatcatagaaaggctataattacaaaagtgtttggtgtagttggtactccaccaagaagctttgcgttgaacaaccatccaaaaaaaatcaaaagaattatatttgtcctaaaaaaatttactacctctcattccaaatgcatcacaaaagagatcgagtagcacatctccacagaactttccccttcggacgaaaaactttgctattgagtccttcaagcatccaactatcaattttgctagagagacagaagtctagattgaaagttctgaacaacagacaccaacctttcataacaaagtaacaatgaagaacaagtggtccaaggtctccttactattaaaacaaatgcagcgcatagaagggctgagagcagaatgttgaaagtttgagactatctttggagtttatcatggatgttaaggattttaatctttcatatgatgcggatcacgggtaaggcgatattggtagatcttttggttaagttaagaaaggtcaattccgtagtgaaatttccggaaccattatgcttccaactaacactattgcaatcaccagttggagcccacgagtgaagaatttccagaatagcagctgcattgccaaatcgctattcgacacatttcttctaagacccaaattccacgaagactgtgcaccaacgatcgacaacaaaagcatccttttcaagagataaggagaaaacagcaaggaatttctgcgagagaggttgagcctctcaccaactgtccttctagaatcttatattttcccatctcctagcaaaaaagccacaatgttaaagaacgtctccttataatataccagcccacaatctataagacctttccctattcagcaatttagtaggccaaacattcttctccaagccgtaaatggccacaattatacgccttgacaaaacgttatcttccttacataatgtccataaccattttgtgagaacattattcttttgtcgaagggacccaattccacgatcaccgtagcagattaggagggaagtagtatcccacttaacaaggtgggcagccgacttagttggcccctcagtccagacaaaatccctgactgtcttttccattttgataactccaactagggcgtgtaaaagagagatagctccctttctctttacaattgtgggagacactctaagttgccttattcattactataacgagaagaggactatcaaatggttcctctttggaaacttgccatttgaattaacacacttacggtatgtcgatgatactcttctcttttcttcttgggatcctggaaattggctttatggacggtggtaaacttatttctgatgggatctggtttgtcccttaatgtggtcaaaaatgaatcccgtctaactttggctagattgcaggagagaggaagattcttctccgtgaatcatcagggaatgggttttcttcttgacatagcttctctttagattggttgattgagggaagactattgtgaatggcacagtgctacgatgctaaccgttgttgtggtgccttgcttcgtccagcgtttctattctagaatcacaacctctttctattcaaatttatgaagtcacagagatgcctagattaggatctcactagaccttcccagagttaacatccttcccgacacaaatggtgaccagtccagtttagatttctttgcccttcctggcactacttctcgacgcaacagattgcttttaattctcttggtgacagtttcccaaaaaacgatacgatggccattgtcattgatcttttgtgaacttttgagcttgctaaatcagcatttctgaggacttcaacatttctttttttggatttctcgaagtacaacccttgtctgggagttccttttaagtatcaaatgatcccataaacaactttcataaatagactcacaaaacttacttcaaaacaaatatcaagtctagtgtgagtaaatcaactttccaaagtgtctttgacattgttccttattacaaccactttcttcagttgggagctttacctttttccatttgcgaagtgaccccctttttctctttcacaagaaggttaaattctttgttcaacaagaccttcacgaaggaattaaaaccttggactgtgttttgaggaaattgtcttgcttgataaggttccattgtaggactgtggcgagagatgatcttgacatcctttttcggagttgtgtactatgcttttttgggtttggagttgttaatgcttagtgttcgattttcattgagcttggcctagagatactcattccttggttaaggaagggattagcctcttaggtcccattttacttgattggatcctccttttgttttggtttgggctttatttttatatacagttctttattctttttccctgtgaaagtttggtttttaatttattttagaaaaagctaggggaagttagaagcacttggagttggagaagattgtttaactattgaacgcttatgaatttcaggaaacctttaaattaatgaatctgatctgtccacttgaactcttgtctaaaggaaaacttcaaatggttgattcaggttagtgtgttgaagaaattgaagaaattgaagaaagagatcatttagaaagaggagtgtgttagggagattcttttaggatggaaaatgtggttgaggacattttttttacaaaagggattgggtttgagagagacctttttctcgcattacactttttagtggaaccttgctgtatattattgacttatctttgggcttcaggaatgaccgtggaaatgcaatcaaacgtttggtatggggaacatgagatgagtataggcaaaatctgaacaagactatctcgtaggcactattaatccaattctcaattccttgctgtggtgggttggggggactttccatgtattattaggaaactggtaggcattgaactgatcgtggcttgaatcactcgatggtgcatcagttttgttcaactattgccttgtagatgaagactcccttttggctagttcaacttgtgatctttaggcgcttgtagctgaataatttctgtagcttttggctctattaaatctcaatcttgtttttgttctaattatggtattgtatctacaggaactca

SEQ ID NO: 7335 - DNA, 4657 bp, Cucumis sativus
  Intron number 7 from transcript Cucsa.165310.1 (locus Cucs a.165310) derived from phytozome v7.0 (chr-ID scaffold0115 3; pos 660473 to 665129 reverse strand)
gccgtaagcgttctcgtaaagctcattattgacatgtatgttctttttttttctcttcagatgcttaaattaaattaggtcatatgtttgcatattttcatatactactatatttttgttaaaaacgataaagaaaatagacaccgagtaacgtggaaactcaagtaccggtagaaaaactacgatatgattttcttattaatttctcatataaataaaagatacaaagaggaaaataaatagacaacaagcttatggtaaaaaaggaaaggaaattagggtaaatccttccttgggccaagccactaattccgctcaacatctccattttgttgaggggtgtaagcatacgagctctggtgaacaatccttttagagaacaagaactcactaaggatatggttttgaaacttcccacctcacatgaaaaattgcaatttttgcattgaactgcgtttctatagtgtgatagaactgaaaaattgaggaaacctcgaatttattagtgagtataagaaacaaaattcttagaagaacctttcaagtgatctgtaacacccgagtctaggatccatggattcttcctatcgacactgataagactaaggaactgaggcatacctgactgagtaatgactcctagagtggagggtggattgggaccattctggtttacgatagggccagatgattgagaggttctagcagacacactcgtacaagcacgccctgagttatgtttatcatttaaggaatgtttttacctcctggaggacgaccatgaagtttccaacactgatccttagtgtgccattgtttcttgcaatgctcacagatagggattggttttccgtcgttcttctcactatcatgggttgaggatctagcactgaaggtagtggagtcagtagcaggagtacttagaacacttgtagcattcgtatgttcttcttcaagacagacttcataacacacttccattaaggaggaaaggggtctttgactaagtatacggccacaatgtcaaacttgggattgagaccaacaaggaagtcataaatccgatcaacttcttcaagtctagcatactatatgccatcatttggagtatcccatattgtctttctgcacaagtttatctcttgttagagcaaggagagtattaaagtaggaggctacatctagagttcctagcttgcaattatagacgagagacgttctgactctttgaatagagtttctgagtagtgtcccatagatccttcggtagaggctttccaatttgtggttccatactattaatcaacatggacagaaatgtgagtcctccctctccagagacgttcttgggcatcaatgggtgggggccgaagagtctcctatgtcaaaaaactgatttggtgacggccctcaagaagcatttttaccgattgagaccaagaaaagtagttctggccattaaacttccctttggaaaaacacttgtagatggtgcaagagaactagttatataatttgaggacaaagtagggaatgaagttactaagtccttggaatacatcggtaagtcggttggtttgtattgtgccgaagattcaccacggatttgtggtttattatggagttgattgatcctggtaccacggatttgtggttgcagtaaagaatcagagtttagcggctcataaaacgatggcagtgtctggaaaccgagggaagcggcggcacgtggatgtgtggctgaccaaaaaggtactgctgctggacttgggaaaacaggtgggagtaagctggctggagtcaggcgacggcatgtggggatatgtgcttggcaatgacgacgcgtgggtggatagctgaggcgtgtacaattggtttcctccactaagctgttgacttcgagggtgggcccattgtgatcattggcgtcttctgaagctggtggagcagcaacagcggtgttgatcttgatggatgtctcgtctttctctgtttgggtttcatctataatcgtgtttagggttttatctgataacatgttaagagtggtaaagaaaataaacactgatttacgtggaaacccgagtatcgagagaaaaaccacgatttaactttttttttatcaatttctcatataaacaaaagatacaaagggaaaaataaatagacaacaaacttatgattaaaaggaaaggaagtctgggtaaatccttcctcaggcctagcccaccaattttaagaattttcaatccatggtggccacccacataggaattaatttcctacgagtttccttgacacccaaatgttttagggttagacgagttgtccaaaaaatatgctattcattactcattcatttcattttgtgtgctgatatgtttttagtactcatttaattccctcatgtgcacatatttgcactcgcatcaacaatcttttgtgctcaagctgttaaatataaccgttgtagagttatgccacaaaatgatttgatttctaggaggaagagaggagaacaataagatatggaactttgccccccctcccccccctcggtttgtttcattggacttgtgcttaggttttaacatggataaaaattttcaaggaaaaagacggaactttttccatagatattttataaggagggagagttaaaagtgggcatggagagttaaaataaacttgatttgatgactttgatctgatatgtttagcgtgtataattttgttaggagagagttgaaaaatgggcatagaaaatttgatacttttgatgtgtttgctcttctaatttcatttctcttccaacaaatgagtttttcaatctggatccctgcttgaacaaatgggtccatggtttagagacaacgggctttgtataccactaataagagcagcaagtgtacgacaaaacaaaggaaatgcattgagacctttatcaattattctttaggtttgattctgcatagttggggtcccttattgcctccttttctgtgggcttgtttttttgtatgtgtattctttcattttttttctcaatgaaagtggttattttcaataaaaaagggacatgccatagagatgttccgaaactagaatgctctatctcttatgagaaaaaaagctaaatctatgcttaggtaggggtctctttcggcttgatcgtgcttgtgattttttgggcctcaccttgcgtttgtggatgtttgctttatacaaaaacgtcaatttccctccatcttaaaaactgttgtctacgtacttggtctcaatcaatatggttatgatcttgattgtttttttaccaatatgtggagcttttggatcaactttttgcttctttttctatggggtgcttctgtttgatgatctttggattgtagttttgtgtagatcgtcaccgttgttttggtgttaggttggcttcttgcttcatcaacccaactttcatcttcttttatttaatcacctttttgttgttcccctcccccttggtttattttgtttcctttctttttatatgggtttcccctttgtatctcactggatatttcatttatcaataaaattgtttcttataaagcaaatatgtattcccaaacacatacattgattatcttatacatttcttgtgggcctttggtcttgccaaaagaaatatctagtatcctggcactagttgcatatctaaatgtacgtgttttgttgcatagttggagccccttcttgtaagtagatatctctccctttttttgggcttgtgttgtatatgcccccatattctttcataaaagatgttctagtatcttggcattagtttttgtgggtcatcccttccaaggtaagaaaaaaactttttgggtggtcttaaattgagatttcttttgatatcttttgtgcaagaggaatgcacaaattcttaggcataccttcacaaccctgactgtctttttgaattttgattttatttcatgtttctgttggtgttaaaattaatatcatttttagtgattatagtctttctcctataatttcccattgacgcagttattagtactttatatttaggtattgcgatccttttatgctcccttatattattcactaatggaatttgtttatcttctaaagaaaacatatattttgatctctcactttctctctttatgtttttttatttattattatttaaatactaatgattttttttataattgttccttgtgactagaaggctattttctgttaattttacttgtaggggttgtctcttccccttcctctttaggcacttcttaaattttatgttctttatatctttaggtttattattcaaaaaatgtgtgctgatcttgaaggacatctgaatttatttttcctttctttattcttgaattatttcatttgtactcatctaaattcttaggtataacaacgtaaactgtttctcttattttgagatgactttatccaagaaacaatttgatagatcggaatattactctctcaggaatgtaatgataaccttaagtcaaggttttgtgaataattttcattgagccaattgatgttccgatgtattttccttttgtatacttttttgtttgtcaagcatgactgaaattattcaataatttctcatacaggt

SEQ ID NO: 7336 - DNA, 7483 bp, Cucumis sativus
  Intron number 1 from transcript Cucsa.308920.1 (locus Cucs a.308920) derived from phytozome v7.0 (chr-ID scaffold0297 8; pos 880825 to 888307 reverse strand)
cgacgctggagctctctttgtgcttaaatcccgaggttagtgttttgtttctttcttctttactgcaacgaagaaaagttgatctgtcttagttggtttagttacatttaagtattcgaaataaatccaatatttaatttgacaattttgaaacaaaacttttcattctattgaatttaacgttgaaggattaaaaatatttttctaaatgatttcgaagataacaaacagtttagaatcactctcactgttttgggatttttttattttcctgttttgtgatgataggataattggttggaattttggactaaaaaaatttgtggccgactttatgatttttcttttttgttatctatttacaattagaacttatttgaaaatgtcttcgttgttttatctaatactcatttgagtttaacgaattatataccatcgactcagattaaatagttgatggtaaggttaaataatataagttctcattcaaaaaggaaaaataagacatagagattcatattcttacgagattttgtcaaaaaaacgttagaaaattaaaattaagtgatatgttattatatatatggtaaagaaaattagaaacacagtgttcaagtttgagttaagaaatatggtacaaatgtttggatttttttaaaagaaaattatttatatagttatagtttaaaagttttataaaaacatagccttttgaactttctataaaaatgttgttatttttgtaaattcttcacttttttaaaagacagagtttaactttttatgcacaactttcacccaatgaaaagatggtgattaaagagaagactatactaaaaaataaaaaaagtgaagtattaagatttttttctgaaacataaagaagctcgagttatatcttggtgcatcgttttatgcaccatttatatttgtgcatcatttcttatcactaacgttaacaaacattaaaaaaataaaatttgtcacttgataaattatgactgaacaaattgatggtatgtaaaaaatggttgatactcgaattgtctttttacttctaagaactaaattgttatattaattacctggacaatatcgttataaaccaagattcaatattttttaagtgattggtgatgttaaatgatagggtcatggtggcattgtggatatcacttgacaacatcaatagttgctccagcactttttagccttccatttgcgtttaggctacttggttgggttggtggatctatatgtcttcttttgggtggtgtggtcacattctatgcctaccttctcttatctctcgttttagaacatcatgctatgcaaggttctcgtctacttaggtttcgagatatggctacatatattctcggtacgttggtcctttcgttttcattgataaaatacttttctgagtaaatttgtaaaagaaaattgttttaaaaagaagttagaaggatgatgattaagcaaataaaatataattagtatggtcaagattggtagctaacctctcaccaagtcatcaacacaattattgaacttgagaactcaattattattgtgagagtactggcaggacccaaatgggccatcttctatgttggccccatccaatttggagtttgctatggttcggttgttgctggcattcttattggtggtcaaaacctcaaggtctcacttcttccattttatattacaaaatttgaaaatgattttttttaatatatgatgtttgtgttcaagtgtgaatgaaactaaatcaagtttgtgtttttgacagtatatttatgtgctatgcaatccagaaggggaaatgcaactataccaattcataattatatttggaacactaatgttgattttagcacaaattccatctttccattctctaagacatataaacctcatctctctcactctatcccttggctatagtgctcttgcaactgctgcttctttaatactaggtagggtaaaaggaacaaggttatacatgtatactttcacactaatttcttttcttttatatttgtggtatattacgtataaacattttcgtaatggacaggttattccaaacatgcacctccaagagactactctcttcaaggatcatcaatcagtcagttatttaatgctttcaatggtatttcggtaattgcaactacctacgcttgtggaatgcttcccgaaatacaggtatagattattgtagagcaattatatgttgtttaacttgttcatcagctttaccaaattgaaattgattgtgaattttatgcaggcaactctagtggctccagtgagagggaagatgtttaaagggctatgtctttgttatacagtgattgcagtgacgtttttgagtgtaggaatttctgggtattggacttttggaaataaggctatgggaacggttctttctaatttcatggaacataatagtttgccctcttggcttctcatcctcactaataccttttgcttcttgcaagtttctgctgttgctggcgtaagatatcctataacactcacatactcttctcttttatttgtttcatgcatttttttttgtctaaactatgagttggttcagtccattaacttatctaatactcatttagggggtgtttgagggaaaataatcatggaatcataccaatagaaggttttttaagtacgataattgtagggtcgagagatcaaaccttcaatgcattaaactaccccttagctaagttaatacaaacataaaatatatgtttttttagttgtggagacttcaagatttcttgaaccaaaataaggagtatagttcgcaacttcacatatgagtcagatattcttttaatcttttgtatttagggaggtgattccatccatttcatatttatctcgtacgattgttaatagctatcgtatattattaatgatatttgattgttgatttgtgtagacttatttacaacccacaaatgaagtttttgagaagatatttgctgacccaaacaaaaatcaattttcaatgcgcaacattgtgccaaggttgatatcacgttcgttatcggtggttatagcaattataattggagccatgttgcctttcttcggggatttaatggcactaattggagcattgggtttcattcctttggacttcattatgcccatgattttctacaatgctactttcaagccttctaagcatagttttatttattggataaacactttgattgtcgcagtttcatcagtattggctttaatcggtggtgtggcttccattcgacaaatcgttttggatgccaaagagtatcgtttgttcgcgaatgtttgagccaaacattgttaatgcataaaagtttgatttttagttcctttaatgcaacgaaacgacaattctctgcatgacttgtcctaattagaattgaatttctagttcaattaagtactatatatattgttcgattttcttttatcgtctttgaaacatgtgtttactttcaaaaaaaaaaaaaaacaataagttcttaaattttaaatataggtagctattgtaacgttttagggaaaatgttatggacaacaaaaaataaaatgtttacaaagtatagcaaaaaaaacttaaatggattaataagagttagatggattttgctacattttgtaaatagtttcaatatttcgttatttttgaaatgttttaagttattttatgtagggtctcttttcttgtatagttttaaacaaagaaaaaaatttaaatcataacaacaaataaattaaaccacttttgttctttcgagtctcgtttaattttagatttacataattaataggaacatttttaaaaatagcaaaatgaattaaaatatttacgagttataacaaaattttggattctattactcatagtcttctatcattatagcatatcaatgactattagtgatagaatttgtataagtcgtaaatattttgtaaaatctattcttattaaaaaaatccctaattaataacaaaatacgtcgagtataaaatcgatggttcgaataattgtacaatttttttatttaattggatattgaaagttcaatttattgagaataaatccaaaactgatttcaattccttatcaactttgcagctccaccgcaaaagcttttccacaatctacacaattacgaccacttttttgtattttctttaaatcagtcgtggggtgcttctcttcttacttattttatttttccatttaattttctttattcactcacgtggctcttatttcattttgtacgtatatttcaaggaatcttcctaaagtctctctcacttattctaaaatataaataattaaacaatccatgttttaaaataggaaagtttataataaataaacaaatatatatatatatatattaataataataataacggagttcatctcatctatattttttaaattataaaaataacaaatttaaaagtaaattactacgatcaaatactaattatatttgtcaaatttgtaatagaaaaaaaaagagaagtgttatcagcttttttttttttgtcatctaatcgaaggttcctattaaaatataacatttctccaccatttctattttattttactctaattttataattataacatttctacaccatttctcttttattttacttttattttatagatttcatttaaattaagaataattataattggggtagttttataaaaagacatttttaaatgtagtgaaataaattaaaatgtttacaagctatagtaaaattttggatcatatcaataataatattctatcactataacatatcaataactatccgtaatagaatttgttataggttgtaaatattttgtaaattttgttattttttaaaattattcttttataaatgataattaagtatataacaacatttttaaaaaattgtaaatataacaaaatctattagtgatagactttgacatattttactatatttgtaaattttttaaaatgttgttatgaatttaattattttgaatctaattgttatatttggaactatcccgactcttaaattaataattaagttgttgtattttgcaaagacatgagtttagtttagtggtaatttatataaaatttctttttaaatgttcgatcttccaccttgcaattgtacgaaaaaaactaattaaactatgtatatattattgttatttaccgtgtgtgatttaatgattttaattagattaatggatgactttcgcatgtgtcatacttaatagacaaataatttttcttacctttttaatattttatagtagctgccctattgtttttaatacttagctatagatataattaatatattgttttattgaagaaatagtttttttctttttagaaaatggtcaaaataaaaaaaaattgataaaatatttaaatttggtagaaaaccccactccaatgaattctaatctttaaggaaaaaaatttaaaaccaaaaaacaaataaagtaaataaataaacaaccaaattgattttattttatttagattggtttattattagtttagttttcaatttttaacattttcttttttctttctctctcttcaaaatatcatttttatttccacttcgtttaaaaggatcatttttactaattttgaattaaaattgagtcattaattttatatatatatatacattaaaatttgacattttcttcctcacacgtttctaaataaaaaaacatgtgatattttatatgctctacaataatcaagatattaaaaggaactttaaggaatagtgtatttttaatgacctgtataaatattattagtttgatttgattctgattgggtttataataaaaagaactaatgtgaatcaatacaatctcattttttatcatatactaaccaatatatttaattttatattaaaaaccaaaccaaatgattgaattgatttaaattaatttggtttttcgagttttcgattcgatagttgctctcctaatttttataatttaaccaataaaataatactcgactatggttaggttgtaggttgaatggtataaactaaagcattaaaaaacaaaagaaaagagaaaaatacaatcaactttcccaaaaatttgtgccattgcctttatcatattctggcgttatttaagaagaaaatgagtgggggatttgttttcgttgggagtgggagtagctgctaattgctatcgcctactttatcattaattacaacaaatcctcttctttttaaactaattcaagaaacagagccaaagaaaagaaatgggaactttggcacctgtttccggcggtgcagcggcggcaggcaaagagaacggtggcgctcacgtccagtccgcgccggagcttgacgccggagctctctttgtgcttaaatcccgaggttagtggttgttacgttaccgatgagtattatgttaacttttgcttcttaattctgtggtttagttgtatttgatttctgattaggcagcctaattttgtcctttccttttcggaaatttgaaaatttggcactcggagttcttgggagatggaagaagattgtggcactcacttttcttccattctcgattatatctaattaattattcttgatgcacgattatttcgcattaaaaaatgacacgcgttaattatgtttagtaaaattagatttagaatatttttatatataacgaaatcaaagagtatggaattaaaaagcaacttgtagttaactacgtgaattttttaggtttaatgattgtgagaaattagttttagtcgtggaatccatgaattcttgggttaaaccggtggagtttacaattttattctttttaactccttggcacaaacaccgttttatgaactcgaatgttgataaataatttttattttaagcacttccattaaagttatatattttagggtagaataactagaatggaacaaaatctaccatcaaccaactatgtgaaattacaaatttagtttttatgtaaagaattgtcatgaatgacaaaactatcaaaaatatttacaaatacaacgaaattttatagtttattagtgatagacgctgatacacatctatcaatatctattaggatctataagtgatagttggtaatagtctatgtctattaatgttttttagtgatattttttatgttggtaaatatttccgttcattttgctatatttgaaaataacccaagaaaacgtgtgagctgcttgtccctctagtccatttttttttaaaaaaaattgtctgctctcttgaatacatctgtatgctggtacattttatgtatagtccaataaaatgatgctacatagttagataaattttctcactctccatttcttgtttaattcaaatgtattaaacttatgataggatc

SEQ ID NO: 7337 - DNA, 2404 bp, Cucumis sativus
  Intron number 1 from transcript Cucsa.126330.3 (locus Cucs a.126330) derived from phytozome v7.0 (chr-ID scaffold0101 7; pos 252876 to 255279 reverse strand)
gcacatagccgatagatttcctccggcactttcaggtaacagatcttgaactgcctctgctgcctctggaatcagtagctcctgaatgtggttggattataatctaaacttacccattagttgtcctcttcaatattcaattgtgtgtctcaaattttaaaatttttgtttctaaatttgtttaacatgtaaaatcctcctttttaagactcgcgctgctttcaacaaaaaaaaagtttgacatgatcgaattgagctacatcaatttacaatgtcaattgtctgataaatcttccaaaattcagcccaaaatttgtttttgttgttaatttctctttcaaaacacatcagtttcttgcctgatatatattttataactgaggtgaatacatttagatctgatatctcacctctcaacaactaattaaacaaaaatgtttaagatctcactgtatttacgttgtttaccattttaatcttaagatttgaagatcaaattggttgtatgaactccccatttatagaagcgtctttgttctgtaatctgaaatattctttctaatgagcataaatgtagctaatatgcttctatgtcgattctctcctcatttacgtttttatgcttgttttatttgttgatttcataacaaactcctcagatcccacccatataacaattttttttaagcttatataaaaactgattaaagaaaatagaaatttgcagataaaaatggagacagtttgtcaaatttaagagtaaaaatgaccctatgtgttgagttcaaatggtcaaggcagaatttgatccaaaacgtccaatttaattaaaagatcatcagacaagaaaaagtaaataaagttacctgtgcaatttcacatgttaggatatgaccttctttgctccatccttgagcacaaggcaggactagaaggaatgaaataaaaattaacaccaccaaaaataccaattttcccattttgttgagttgaaaagaaatgtttgcacaagtctatatgtatctatatatatatatatatagaaagagaggtgatggttgagtacaagttattagtattgaaatattggcacatatttaagataccataatctgaaacttgcttagagttgaacgccaagcaagttggggaattcttttaatgtgcatgaaatacatgactacaaagttttgttttttttttaatgatttgtaaactttcagatctgaaggggaaattaattagaaaaggattgtgtgtggaaaacgatgaccttatttttattgtgattatttggtttctctatccaaactaatgttttatattacgacaagcaacgacgactctccttcagtacctcttttgttttttaatctaatgtttgtccctcaattatcatactttagattttggactgaaaataatagccctttgatattttaaatgaaatcatgtagtggccaaataaaaaactgtcatatggtgatttcctttttatttactcttttctctttgttggagtgtaagcaacatattagaggtcaacaaaattatagccacaaataacaactcttttgtaagtccatggattctaaaaatataactcttttagtctttaaattttaagaataagtacacatgttaatttcaatgaaaaaaaaagtaaaaaaattgaaagatccaattcacccaagacaatacaagttgctcaacaaaaaaaaaaaggaatggaaaatttgttttgaattcatattatactatctctattaattatttgatagtcaatgaatgatttggacccaacatgattattgaaaggttttttaatttcattgtaaatgtcaacataaatactatctagaaaaacatattttcatatcaaataaagattaatagaggaaatgaaagtcgtaataacacaagtcgttttgttcacttcatgaagatacaaagatacttattttgcttgtctctccgtgaatggtgatatcttgacatttttttcaacaacaatatctacaacttcaacttttagagttggcatgggaatttcactctaaggtaacacttaaagtttcctaaaagacaatacatattacaataccattgttcaaagttggcttgttacaaaaaagagtcggcaataatattggctaaatattactaatccaagtgaggaaaagaaacattatcctaactcacactcataaattatggaggtaattatatattttcttttaaagaaaaacattttaggatttaattggttaaaagactcattttaaaggttttaaatggcaaataatataattggtttgcattttttttctttttcctatgaccacacgtctcttctcatctccacatgatttttcttctccagcacctagcgacaccaattgag

SEQ ID NO: 7338 - DNA, 1279 bp, Cucumis sativus
  Intron number 1 from transcript Cucsa.394270.1 (locus Cucs a.394270) derived from phytozome v7.0 (chr-ID scaffold0410 0; pos 297392 to 298670)
gcccttctaattactcctgtcgtcggctcctacacgtattcttttttaaactccttgttcttttccttaattttcttattttttaaatttagaatttagggtttgcttgtcgaatggtttcatcctttcatatttctagctgttatcatttaaaaatatggaaaaataaaatgaaatcataacttgtttttcgatgagcttggtagctttgtattttgataactcttggttgggtccaatttagataagattttatttcttgatcagatacaaactggaaaggcataattcggcgacgtagaattcctgtaatgatttggtcttttctggacttagccttagatcgaaagtgaaatatttctcccgaagctatcatatttgaaatattcgcctatacgaatttctactgaactgagggcatttttttttatagatttcatcttattgagcatacaggtttgattgattgtttattctttggaatggaatagaaagctgtgttgtttttttaaaaaaaagtataggcattactttaccttattgaaattgttcctaggtcatgtcaatcagatctttgatcacccttctcgggtatgtgtatagtttcaattgctttagtctgtctttaattagcaaaactagttctgtattttgcataggttggaagtaatagtattttagatatagattacagaaaagacattaagaagtaccatcccctaatccaagattgatccgggcaagaggtttaaaaaaacaatcccaaactcgtgttggatgataatccatgttatttaagtggggcgtaagaataatttttttgggcatttccatgcacgagaaaaggtatttatataagaattttgagcactagatggaaatggaatggtttgaatttttgttttggttttggttttatgtttttgaaaattattcttgtttctaacaactttctgaaagcttttcacctttcttgaaatgcctaaagttttcctttttatctaaagcgtgcacattgcatcaacagataaaagatgtctctcatgcggtgttagtgttagacaaggcctaatctttcatggatgttttttccttctattttcttgaattttgattgaagtatcgtttgtgtatatattacatattacacgcataggatagatgagttcatgaaaatgttgaagcatatcttgattttgatctccacgcaatgaaggcatgatcatgtctgtaaatggacgcaggtacgtacagcagtacaaggagaaggagaagttgt

SEQ ID NO: 7339 - DNA, 803 bp, Cucumis sativus
  Intron number 2 from transcript Cucsa.105600.1 (locus Cucs a.105600) derived from phytozome v7.0 (chr-ID scaffold0092 9; pos 215138 to 215940)
attaccatttcttccataactttaacatttcaattgtaattctttaaattttaattaatgcaagtgtactcgtagttatattctcataatttgaaattatctattacaaaactttgacatcaccactggctaataggtgggtttgggtttgggatcaaaactcttaacctctaattgatagtgagctaatggtgatagtgagctaatggtgatggataacacttttcaaattttaatttaccttcattcattggcgaattaaactcttaaaattcgtagcatatatcgttaacttatacaacccatttcaagggtataattgttgagttaattgaaactcgagaggatcttttgtgagtattttctttggttcgatgaaattgggaatctggataccaaatatattaatgagatgtttggattagtaatttataacttattctaagttatatatactcatattcacaaagtaaagtaaagtgttatttgcttccttttgtgagaatttaagtttatagagtaatgtgattattcaagtaaaaaaaatcaaatgtttcatttgtttcatatctttcgaaaactcactagtttatgttaattttctgatgcaggattttgtgaatcaaatagtctatttgagctgaatataaaaaacaatcaaatcagagacaaaatttcagaatgtattgggaacttcactaatcttaaatttcttgatgtctcacgtaatcaattaagtggagaaattccaagcacagccattgcaaaactcacatcaattgagtacttgtcttttcttgaca

SEQ ID NO: 7340 - DNA, 4473 bp, Cucumis sativus
  Intron number 6 from transcript Cucsa.177260.1 (locus Cucs a.177260) derived from phytozome v7.0 (chr-ID scaffold0122 5; pos 1273054 to 1277526 reverse strand)
ggatcctggtaaacaaactcgtctgttagtatctcttaaggaatttgcaattacctgaaataataattttgcatgtatatatctttgaatgaatatgcatgtctttttgtttctaattgttactggttgaaattttaaatatgcttagaactcatttgataatgtttccatttcttgatttagagaaactacaaaggattctgttttcttcttctttctttttgtttatttatttattaataatttttcttttttcaattttcatgtatatacctcatatttcttcgaggaatatagcaaaatttcggacactatcagtgataaatatgaaattttgctatgtttgaaaatgcccctatttctttctttccttctacatgcatctgacctgtttctgtctcttccataatcctttttttctgtttaatatttcattatgcttttctctttttttcttttccaattgattctttctcttttctctgtttttttaataactttctccctctttttcccctttttctactaacgatctttttgttatttaattcttaattattttcctcaattgttaacaatttgtgtctagtctatcttgtttgttaacgatcacaaacaaaagaattgatcggttttttaatcattttctccctctttttccccttattattaatgatctgtgtctagtagtctagtttggtcacaattcatcgtagattttttgtgatattactactttactggatataatgattttatatttatatcaacacatattatatatttttgcatattatatgtaataaattttatttcagttcagaaaatgagaaaaagttatcagtcacatttttgtttcgattccattttttaaaaccaagaaatagaaatacttatcaaacatgttgtctttagttatttcacatcttttagttctttctgttttcaatgaaaaaaaaagaaaagcaagaaatgggaaaacaggaaataagaaactgaaataggaattttatcaaatggtcctgcccccttagttttaattacttatgaaaatgtttattttaatttgtaatgcaaaaacattgtaaattttttttagctgagtgtctttcttcttcctgatcagagagaactttttggctcgttacaaatgaacaaaaatgtactaccttgtgcgagtctttgaatgatagaaatattacctcctcaagagaaaggcttaacttttggctaactgttggtttagttaagaattcctccaattactgatgacagggaggaggttgcaaagcttccctcaaagattatgaaaaaaattaaagtaaatgaaaaatatgtactttctgctaccaagcattaatgagcagaaaactgaggggggtttagttttggtgcacctccaaaagattacttttcttttgaagaaaagaacttatccttggcaaatgtggaagaagattaacctaatggcatgacatgacactatatatctaccaagaatttgtctgatcttgtggaatgtaatccactagatgaccttgaaccgagctaaactcaggacaagatttctttccgtgggcagtaattgatgtagtatgggagctaaacgatgcaatatatcaaagagtatcactccaagaatactcaacaaaggaatttatttgtatgctaaagcctcacaaatactagggattaaccccccaagtaaatcacttatcactaaacaagcaaactaaaatcaattacagtctctggattgaatattgtaagatggagcttcttcaaccttacttggcttacctttgggaggaaagcccaagttatacagtctctggatttccgttctggaatttttttgaaaagattggatagaaggagaaatctctttgtctagaggtggtcttctcagtctgtgctcctccattttagctaatatccctttttattacgtgactattttcagaagacttagaaagggtttggattgaattggaaagaaaagtaagaaaattcttttggaaaggcaagaatgatggtaagcttaaacatctggtgaatttgaagtagttacttagcttttagattgtggtggtttggaaattagctagaccaagtgaagaaatgatgtttttctaaaatcacctattgacccaaaagtctaaactactgggtgaaggcgaatttaatattggatcatgtaatactctccttttcttgtgtacttgaaatatgtagaagaccgaacaagtggaattcaatttttattgggaagaattataaaaaaacatcatggaggtttgagcacaagtccacttattctgttatcatcttaaatcactaaatgacccaaaaagattctgatgggtaaaggaaaacttaatattagatcgtctaaaattctccttctctcgtgtacttaaaatatgtagaagaccaacaaggaatcaattttaattgggatgactattttgaaacttcaacatattgtagattcttgtttatcctttatactgggttgagggggtcatatcttgttttggaaagatgtttttttttaacggagacgagcctctttattaattgtattgataagagagactaatgctcaaagtaaaagagaattatactaagaacgaaaagagcgatcacaaacaaaagtacacgaattgaacaacacaaacaacacaaacgaacccctgtgcaaaacagtagaaactaagaacaaagcaaacttaaaaatatttcaacaagaagcccaaaaacagcagaagattgcagactaaaaacttcaaaatggatgggaggaaaacaccaagggagagcaaacagccatgcagcttcaagttgagaattgttgagaaaacatgcctcctaagtaatccttaaatcttgattgagtgactagaaccagaatatttcagaaaaactttagagggccaaaataatagaagaatccgtcgaacctctcatgatccactaaaacagtcttaaaaaataattggctgaaaaaaacaagatgaagtctaaattctgtactaaaccaaaataattccacttttctcaacaatgggcttcaagtgatctggagttttacagtgctgagcttgtgaggaaaagaaagaggcctgtttctcagtaattaaatcctcctgtctgaaacagggtattggaaagatgtttggattatataaacaatctttcatccacatctttttctattttcagattgagtgataaccagaattggtaaacggaaaattgttaggaatcgtcttgtaaatcttagagaagtgttcttagagaaatttaaaagatgttgaacttgcttttttagcgagcttttgctttctcaacatttttcagtcaaaagtttctccagattctaaattttgattacttgtttcttagtgggtcatccttggtaaaatttctttttgataaattggttggccatcctcctttgccttcatatttatttatctctctctggaaatctaaaagtccaaggtaagttgattggttaatgtggattttactttatggaggtgtcaatagactcaatacaacagaatctcttcaaaggaagcttccttttgtggctttattttcatccatctgtcctgaaggccattatcatttgttcttcaagtgttcttattcaagactttcctggtcctatttctcctccatccctaattccctcagctcgttagatgcttcttagctattctaattatttgttgatcagttgctctctggtttgcttaatggtttacatccttacatagataccagcatctataggtaaaaaatgacattgaactgtcagaatgaatctaagatagtaatgatgattattaatataattagattattcttaagagatattattctggagataatacttgatattatttctttaagtgtatttctctatggttatatataggcttgtatctctactaaataataatgaaatatagactaattccataaaatcaacaatgataacagattttttcattgaactttacacaaacagtactatgccattcaccctaaccaaattttgctaatgcatgagagctgtaaatttattttactggtatctatatagggtttgatcttaaagttttaagggtcgttttaacctaaaattgaatccaggcccacatcaccagaaaaataattggaaattccatttaaatgcaaaaaaaaaaaaaaacgaagtctggacatgttaattattagcgtgaaaagcatagttttcgaagttgattgtttcctgtcttacagatagatgtttgctgataaccatcaagaaaataatgtacttcactgattaattgtctacagaagatagttaatatttgaggttattaactgggtttcaagattttactcatttgtaactaatcattttccttctttctgacaggtggaacaaggaaacccccaggatctcctggaaaa

SEQ ID NO: 7341 - DNA, 567 bp, Cucumis sativus
  Intron number 6 from transcript Cucsa.116630.1 (locus Cucs a.116630) derived from phytozome v7.0 (chr-ID scaffold0099 5; pos 529557 to 530123 reverse strand)
tttggcaatactgacatctttatttgacgaagaaggtaccctggctgaatctttttgtgttaaactttcttaaagtacaccaaatgcatacatttatgctcttttcatcttttcatctgcccttcagccccttcctctattagaacttagaaggagagttgttaatttatcatttccttttagggattttggatattttaagatgtaagggtgttttttttggaaaatgagtcttcggcaaaatttgactcaaaatgtgaatgaggtgaagttgaaaaggaggttttaaatactcaatcccttctagtagattttgtgttaaattaatgtagaagtgttgtttttcacacttgagaagaggaactcttttttcaatttcaaattcaatttaagtctctcagcacctcttctccaagagagaaaaagagagcaattatcttcctacttgtacaattttttttatttcaaagaatagaaggaatatgttgctttcatgtattagttcattagtaactgtgttaaattacaccaggaactttcgattgcgggaaatcttttaacaacacg

SEQ ID NO: 7342 - DNA, 2888 bp, Cucumis sativus
  Intron number 2 from transcript Cucsa.355600.1 (locus Cucs a.355600) derived from phytozome v7.0 (chr-ID scaffold0357 7; pos 75050 to 77937 reverse strand)
atctcaccgtggatagagaagggcactggtatgtattcttttatcttcttcctcttctttatttgttctttttgtcattttttgtttattatttataatttctgttttataatatttttggaatttaaattatgtttttggttaaatttcttgtttatttatttatttaattatcatagctctcatatgctttgtttattttcgaatatttattttgcttgtcattttgttttctaatagatttgaattttccctgggattaaagtactttctttaatgttattattgattttctagttgaacattgggagtgaaaatttggttatatgtcttattaacacattaataacgattacacaaatatttaaaaggtgatacatctattttccgttcattctatgttaattctttttacttgtacacctcttagtttttcctaaaaaatattttattacattctggaatattttttaaaatagaaaaataaattaaacaaaattttggagtgatagtttggattttttcattgatgacttctatcattacaccatatcaattactatcaacaatagaatttgttataggttgtaaatatttggtaagatgtattatttttaaaaattctattataattgatttttttagaaataataataaataatatttaaaaaatgattacacactaccaattttctataattcttttgagttttggtacttttaataaattttaaaaattaaaaatttatctactttaatttaaaaatagtttttaaaattaattttaaataataaaatctaaaatttgtccgaggaaattgctttaaataacaaaattagtaaatatatttataaataaaataaaatttaactttggtttcggtatatgtataaatattttaattaaatatttagaagtaattaagtatatgagctaaatatggaaaatggtaggaagtaaaaggatacacaaattaagaaaaacaaaaacctatacttttgctggcaaactcatatatatatgtatgtatatatatacacacatgtgtgtgtatatatacattttcaccgaactgaatattctagatatataatagaaaaaaaggaaattatatattaaaccaataaataaacaaacaattgtagtaaaatctaaatttacagaacattctaaatatacaataaaaaaaagaaaagaaaagaaaagaaaaaaaaactcaagaaaattatatagaaaatacacaaacaatgaaacaaatacagagaacacacaatttaatgtattatcctaaaaggtaataaaaacttgtagggtagaaaatacattagttattttgattttatgtatagtaggaaggaaaattgcatcacagctaagatttggctttttgtgagaatatgggagtgagccatggctctacataataaaaaagaagattgagatgtagactttcaaaaatcaaatcatatagtttctagttttcccactgctttttctgtaaccaataacaacttgcaataaaaaggtagcagattttattttttagaaagggactaagtacaatgcccatttgtttttccaacttctctttttgttgcttttcttgctcaaaacagttatccagtcttacttcctaactatatgttttggattgaatttatgatggtttggtttgacctgttttcaagagtttaaaaaaaatacaaaagcaactttatttaaatgaataacttgatcaccattattgtttcaacttattcttaattttgttattataagaaaagcatttttttggttacattatatttgaaaacttttaattgtttgaagtgctaataaaatcccatgtttggttagagatatataaaagagatacaccatagtatgtatacatataaataagtgaggacaattgtctactattatgatattttttgagtgaaacaaaaaacaaagcaacaaaaatgtacgtttaattaagtggatagtatcccatcattgtgtgtgtatatatatatatgtagtggtacaatgttcttatcaaataaaactgaaaggagctaatggaaaaattacagtgctggtctgcatccaaactaaaaggtgcatgtggccatttattttctttaaaagttgttaattttttatgtaagaaaataggaatatgactacttaaaaatatggcttagagatagacttatgaagttagaccaataaaatcaataaaaagagtgtgaccaaactgaaaactaaagttttgttggttaacaatttagttttttaaaattaaacttaaatcttttggtttgatatctacattttacccatgtttccaagtcaaaatttgaaaactatgcttttagaatttttgaaaactatgtttttaaaacattgtatatatatatatggtggtacaatgttcttatcaaataaaccaagtcaaaatgttccttccttagatatctacattttacccatgttttcaaaaaccaagttaagaaggtaattttttacttaatatcgatacaaatcacacggtaataaactgtaagaaaacatgcatatttttcaaaaactaaaaacataaaacaaaagtataattaggaagagaacttaagttattaatatttaaacgttattgttatcattatttttgtttacttccaacttcataccaagatctaaaatctattttgaaatttgatgcgtgtgtaaaagggagaaaatatggcaagatcttaagtttactgataatagatatttctgtatatcgaattattatggaaaaagctctaaagacttggtagtttcatttgagaagaattaacaaaatgtttgtgatggtgatgcagttgtccatagccctaaaggatcaccttttcaaacc

SEQ ID NO: 7343 - DNA, 2529 bp, Cucumis sativus
  Intron number 1 from transcript Cucsa.100280.1 (locus Cucs a.100280) derived from phytozome v7.0 (chr-ID scaffold0092 6; pos 823788 to 826316)
gacggcccaaacaaggtagtgccttatactgtagctttctgtcatacccacatttttcctcgctcagattgaatggaaattgaaatggtactgaataagccgtggcagttctacaaccatacgattatgttaccccttttcttatttttcttctgatccacttgcaaggtgtttgacaaaatgcctcaatgggtaagcaaaaaagttttcctttaatgggtccactttagaacttggtaatcaattatcaatcgattcttcataagaaaaaatggtttcattattttgaattaagacgacagcaatcgtagttgggttgtaccttggttgtgaatgaatgccatcagtcaaaatcactgtaatcttatagaaactacagcttgaaggaaagaaatgtttattttatatgcataattggtagttgttgtgttgtatatttgtattagagttagcaagatatgctacgttaaaattggacccttaaatcaccaaatctagataattgtgaacgggattgctttgaatatgaagaaacagtgaagatttttatggtagcactggagatgtctcttttgaagatctacatccaagcacattgctgtcagcatggcccaatgaaagaagaagcagactcatgtagatgctccaccgagtggcagtgtcagcatctccaacttggtgatgccaacatttaaccaccaaactctcaactccatacgcaaaaggagagcagtggcagtttacaatgtacgtgctacctcctaacatggcctgcatttattttggggcttttacatccttctccctctatatatctcactccacctacctatctacttttttttactctgctggtgcttctgctctggttgttgattgttgagagagaaaaatcactttcattagattcttgcactgccttttgccccgaaggaccatatgattgcaaaagtttaaacctagaattggtaccatttcccctcaacttttaactgtttatcgttgattggatggacaaaagaacgagatgccactttaccttttccttttgatacttctgcacaccttagtttagttcctatgggtctgcccattgggttcattttgaagttctcttttgtaatgtatataaatattatattatcatttatcacatcaaccagagaggatgtcacccagtatttctaataaaaggatcttctcttgaataaagattgcatgatccggcgttctctcaaccttagtctctctcaaggtattaagtgatttggacaacactaattgagtgatcttaatgttttgatctgctttctgtaaccttacagcacatttgagcattgatctatctgccgacttgctgtggaaagggttttccttgagattgatttgaaaacaattcccatggggggtcaattttactttagtaatttctttccggggggtgagagagagaaaaagagcgcgctttcgtgggcttgcaaaagtagcgcttttgctgctttcagttacttggatttccactttgtctttcgtacaataacagagacaagttttcttaggtggcatcttcttccctaagcaaacccgatcaaggtcaggtctaatatcatataatatttttattacaaatatttttaagatgaattctacgtttttcttgtagaaggtttcacaaatctgtacaagaagttgttatctgaaagcaacacctagttctaatcaacagctcatgcttgcttgtttcaagcgggagttttctgtcttttcaagccatttttggcaaatttctagcataatctccagtctttacgcatcaattatttttaaatttatgagttacccacgagcatcaatccgaggtcccaatagccaagacaggtaaataacagtaattttgaactatatttggagccaatctcaaggctgtggtaactcaggaatggctgttggaggctccaaaagtccccccctcagacgaggaaaataagtaataatgttgatgacgaggcagcattcccttttaaatcagcataattaccaacccactataagaatcttccaaattcattggagaataaaaaaaccactgtttatcgttcagttggatttttttaatcacgacagcaagaagggtttaggctaaaaagaagagaaaaataagggagagaaagtgcccttcagaaggaagagagagagagagaaggagggagagagaagacaaattgcactttccaaaataaaacttaaccgaactccattaataaacagctgcagcctgcataaggaagatgctaacagaatcctaccttcacccaactcttggtttggattctaaagttttgtgggattgatcggctgacgtaagtatgtgtaaaaaattatgcttttgtgggtttttgttgtttgcctgtatttcccgatgggcttcacttattcttttaatatagccaaaatttgagttagaattttgatttgggttgtcgttatatataatcatatctatcctggttcttgtgccgtttttcagtg

SEQ ID NO: 7344 - DNA, 7920 bp, Cucumis sativus
  Intron number 9 from transcript Cucsa.357210.1 (locus Cucs a.357210) derived from phytozome v7.0 (chr-ID scaffold0357 8; pos 74716 to 82635)
caaaactgctgaatacagaagaccttgcttcatcggtaagatgcaatcattgtctgtggtaattttgttatagcaagcttttgaatcaacaaatttatattttattgtaataaaacctggtaaggtcaaggccatggaatgcttaacttctgccacataaactatgatccggaggttttaaaatggttgtttatttacttttgaattcatgtcagtaacttcttcattaggttttattccacgcaatttcttatatgttgccaatattcatggtattgtgctttctttccttgagaatgtcgagcattgagaacacatggttgaggttcccttccctctgtttctcccttggcacattcacaccactggatcaattgatcccaccaagcccacaattttggccacataactacaaactgccaaaaaaaaattccttgaaaattttgcattgtgccatcatagatgtcgtgtcgggataaaatagtagtgagtagctcaatattgttgggagagatctggatcacttaaatgtctaaactataattctttcacctatctattaatgggtatattttaggtaaggttctatcaatgaatactggtagaattagtgggctttggtccaaggaaagatttaccctaattttctttccttttttatcataagcttgttgtctatttattttccccctcgtatttttttgttaatatgaggaaataataagaaagtcagatcatggtttttctctcgatactcggattttcatgtaactcagtgtctattttcttttactgcttctaatatggtattagagctaggtaaagatgaaaccttagacatcaaccttgatgaaacccaaattgttcacaagacagtcaccgggatcaatgtcgctgctgctgccgctatggaaaaattactccaataacttcagacgccgccgatgagcaattctgtctcaccctcggagccatctgtgccgccgagtggaagaaaccagctgcgtgcgcccagcctgtccacccacgcaccgccactgcctattccgaatgtccatgcaccgccatccaaccttttctccgttcagccgacctactcccacttaatctctcaagtctacccatagcacccttttgatcggtcacacatccacacgtcgctgctgtcctcgtttcacacgctgccctcttttcacgtgccgtcacattctgatcctttacagcagcctcacatccatgggagccaaggagccatcggcaattcttatgttctcattctcaacacacggaatgtagggcccgaagtattcagaggaattggttaaatgtactgtggcacgagtccaggatccaaggattcttaccatcaatactaatgagactaaaggactgaggtatacctaactggacaatagctccaagtggttggactaacattttcactcacataggaagtggataaagtagggaacgaggttaccgacttttcagaatacatcggtacaggagtgttggatgtcgtctttagggtatcctcaaatgctgctatctgttgttgacgctctttcagttgttgttgagttattccctagcttgcacgttagggttggaatatgccgaagattcaccaacctcaaatgttgagtgaatttgaggattcttaatatcgagataataaataaggttagtgggtggcaaggcatacagaagatttgacgacagaaccaatggtgaccgaccgaaattaggtggcagaacatgaattggggtgtggggagcaatataggccgcgaatgaagaagggggttgctcagatgggatggtcggaactatctgaggaagatggatcggagcgtgtagcatcggtagtggcgcgtggaggcacgtgagggttttggcgacgtggacgatggcagaattgacgggtctacattttccggcattgtctgaaggcggtggaaccattagtcaatggcagcacagatccaagcatcgaggcggcggcgagcggcattaaaactggtggttgtctcctctgtttgatttccatcactaattttgttgtttagggtttgttcaatgtcccgctctgataccatattgaaagtagagacaaagaacacacaaatttacgtggaaacctgagtgccgggagaaaaaccacgatatttttcttcttattattttctgataaattttacaatagctacaatgagggagaataaatagaatacacaagggaataaaaaaggaaaagatttaggaattagggtaaatatttccataatctttccataaataccctaagggccaaacccactaattctaacacatacaatccaattcaacatgataaaactaaacatgtggagattgattgacactttattaaagaaagactagacaatggtagtatatgcattccttacatcccctctagtcaatagattgtcgatgttttcactatgagacttcagatacagctttgattcatgtgtgagcaagttgggctttattgatatttatgtcccaacttgagcgtgaatgtgtagagaatctactgaataaacactaaaatacccacacaatggcaaaacagaggtggcactctgatacactttatttatatatatatgccacaatgatgattacagtagtcatgatatgtaaaataacaaggaaaacataaagaacacacccaacctctcttaagaatgccgaataccttaccaagccgcagcagtcattcttaacaaaaaagataataatagacctagctacccaatcccgaaaagacctatttatacctccttctctcattcatgctcgtgggccccgcctgcacgatctttttccatcattccctcatcattaggtgcttgtacattgaccattttgccccttcttttatatgtgtggacaattgggggccttacagaatgttagaattagtgaactttggcttaaggaaagatttaccctaactttctttcctttttttatcataagcttgttgtctatttatttttcacttgtatcttttgttaatatgagaaaataataagaaagtcggatcatagttgttctcttattactcaggtttccatgtaactcggtgcctattatcttttactgctttcaataaatacaactgtattgccaagtgggaaaaagttagacaactgaatcaaatttgcggaatggtacccaaggacaaaaaagtttagaagatactttctagagtgaggagttcagctatgttggaggtctgaatcaattcttgaataaggaagtatcagggaaaatagttatctatacccttccatagggaaacccacaaaaaagaaactgttggtgcatgtaaatcgcgagggaggagttggggaattcaatgggacgactaaggagaaggaagtgagttgaaatgattgcaaagagtgtggagaatggagacagaactccatctatttttggagcccaaacttcacaaggcccaacccatttctttagtttttttcctaacccataaggcttcctctttattggtaaatttagatgtgaattttcaaaaggaaagaatttaatcggtaaacttaaggtgtgtactaataatcgaagaaacggatggcagtggacactgttatacagaagtaatttgaagaatttgcagttggccgagagcctttgccactgaagaagaaaacgtgctaatgctttgtggagattttacttcagcattttagagtggcaatgagcaaaaatacactgtgtatttttcttgttgggttaagggtttatcttatcatttattccaagttacgagttgtggtactggattcaaatagttcgtgttggactatttgaggagagatttgtagtgtggatttaagttttttttacagtctcctacagaagattggacatagtcttgagtttgagataaaccagtatattttttggtgtcattctctttcgctatccattttatttgtattttatgatttacttatttgactctaacttgtaaaatcggagtttgagatataatttagtttattccgcatttatttatatctcatataaattcccaacaagtggtattagagctatttgattcaagagtcatgggatcaatggagccaaaagaaaagtcgaaggtatcataaaatttgacggaaaattttgcatattggagaaaccaaaaggattgttggatgaaaattgggagaacctgactgaagagacaattgctctcattaggttgtgtctattaatgagtgttctcagtcttgtagccagggagacaactgcagtgaagttgatgaaaaagattacaaacaggtatgagaaattgtgtaaactcatgttaggatcccaacctcccaggtggcggcagttgggcatagagattccacactgcacacatgtcggctcactaccaggagctgaagttgggtaacaagcattttatcatactcttcatgccaactggtcttcccccttcacgaaaacatgttcactccttcaacctgtgaaccatgaacacactcaagtaagaagaaaaagattatcgtctagtgggagaaatgttgttggtttaaagcctcaaacgatctgaccaagcagaagtcctctttcaactcagatgcccttagtgcaaacagaaaaaagatggaaattagagtttctatacgtctattgagtgttgcacatggatattattctaaggtcatccctacatttttgtggtgtacatttatctgtttcttatcaaaagaaaaaggatttcgattcaaattgcaatacaaactcagtttggataagaaggttattgatctatcatatattttctgcagaagttactttgacatcaattttggtgttgtagtaagatttaatgcaacgatattgcacattagaggatttatatctggtaatgttcaacttaaatcaccgattaacccaaaaactttagctgatgggtgaaggcaaaattaatatcattatcatctaacagttatagatgaaagttgttggtttgatgtaagtagtggcatccatagtctccatttttcatagaagatgactgattgaagtatctatgtaacactgaaagactctcccctgattccaacacttctaaaagagtaccatgtaggttattggatacacatgtagggaactgaaaacctggcaaaggaacgcagaaaggggtcgatgactttgtacacttcaatgtaaagtctaccaataatatcagtacaggaatacttcaagccctccctattctcgatttatcttgagatgatattgcagtgacttctgttaattactaatttgccttagtcaccttaaatatccttgtactgctaacttagttgcatggttgtttgtctaggatattgtatacttgcatatgctccttcatcttttgttttagacaatgatattatctttatttgcatgttttggtggaaattgtttaaattgctagggatggttactgaattaaagagaatcatgggcatctcaccatttcaacgatcagttaaacttgctgaattgttgcctcaaaacttcgtagtgttgtttcacatttggaaaaccaaaaactggagaggtggtataaattctggtgcagcacctccactatgttttagctacctcatttcagctattttatgaccactattatctccttcaggaaaaacatctaaccctattttagcaattgatgagcttccacaggagcgggatgctgtccgcatgatttgaaatttcagatgattccgacgaagagggaattaaaatatcaagtgatcaacaatatggttttccttaaattataaccatatcaacagcgacctgtgcctgaaaggtagaaggcagaacttgtcctcatttattgagacctttccatgcattggaacgaagcaattgccttaggggagggtaatgttaggtcagcaattatcaaacactcttcttgattcctatcacagtggtgttgaccatcctgtttttcatgcttctcaaaatggacactgcttcattgcattcaccaagggtatcataactttcgtttcatcccaaggactaggtgtattttgaggacagaggtgttgatgttaggcctccgattatgaaagtttatgggaagaaaaagattaagggtaagaaagcatagagaggaccagccaagtttgggtgcgttttgggctatcaccgtgcagtgggatcaaatggttgttagggtatttatagggttttgggatgagtgcgtgataggaaggtgtttgggatcttgagtccttagaggagggaacagctctctcgaattagccagtagagttttgtgttttgtgtcttctttctttctctcattctcatcttgcattcttttgtgattttgtggctggaatctgttaattcttgtgactaatgattgataatactaacctgagagtagttgattcttagttagtgtcaataactaactaagaggtcatgagttcaattcatgggggccacctatctaggaattaatttcctacaacttttctttgacacccaaatattgtagggttaggcgggttgtgccgtaagattagacgaggtgggcataagctgatccaaacactcacatatatcaaagaaaaaaaaatacttgtgcaatttgtgttgtttgtgtgagttgacagtttgcaggggaagatacctttcagttgataggagacaattacttgatctattttacatatacttggaagaaagttttagctattaataaacaggttttgtgtgaattttgtgggtctcttgtgggaggaaaaaatagccagcaggtggttttatttaactcccctccacctggattgaaatttcattgtcgtaaaacctcgctaactctcgaagccatttgtgggagcaagtttatcataaaagcaaggggtgggatctctaatcctcagttacctaaagggaaggggaaaaaatccttacctccctctctcctattttctctatttatagccgcacaagattaactactatgattaacatatccctaatggtgataaatataattttcggactctaataacctgatagaacactgatgtagtgtttctattatattgataattcaaacacaacttactattaaaccaccaattcatccaaaagtggaatcagttttacctcacttttgggtttgaaatatttgaaaggcccaacaagtgaaaattgattttaattggggagaaaacatcttggaccacctgctctgataccatattaaatcaccaattcatccaaaagcttaagctggtggttgaagacaactttaattatctatcatcaacacttacaatattaaacaaatcgtgaacctcagagaatgagtcacgttacaattcacagtcaacaagcaaagtaaacctcctaatccaaaataccaaaaccaacacacaaaacaaaatactaaaaaccaaactagaacacagaacaccagtcttctgcttcccctgtctttcaaggagtattgtagacctcttttacttcaaaactgcctcctttctccattccccttctcatcgatttaactccctcttctcagtaactgtcttccaagtaactgtcaccccttctttcctctcttaacttcttctaatttttaattaactgttggtacctcacgttatttatttttctttcttctattataagtaaataacagtggtggtctaacataacccaactcactcataactaataaatctttccctatagtctcacaggatcatagagtttagcctgttatgtaattgttactgaataataattttattgtacttactcaaaactagtagattgtgtatgctaatatatgttctgtaggttgttggcactcctaattat

SEQ ID NO: 7345 - DNA, 276 bp, Cucumis sativus
  Intron number 1 from transcript Cucsa.350620.1 (locus Cucs a.350620) derived from phytozome v7.0 (chr-ID scaffold0350 4; pos 125803 to 126078 reverse strand)
tctttactggttgccattttacatcagacacacaggtacctgtttcttattgctaaggaatgttaacattctttgaaatacaaattttagaatgaatgtgtcttcgagtgttcttagttgtttagacactcaatcctgaagggtttatatttctaaataggttcagaatgatgtgaaaatgattttctaattctagttttgtagtccaattgcttatactagtcttttctctgttggttagctgttgctggtgtgcatttatctcataaaacagcc

SEQ ID NO: 7346 - DNA, 3237 bp, Cucumis sativus
  Intron number 6 from transcript Cucsa.340590.1 (locus Cucs a.340590) derived from phytozome v7.0 (chr-ID scaffold0335 6; pos 2988767 to 2992003 reverse strand)
ttgaaagaaatcaggttataattccttccacgtcttttgcatttctattgtgttgtacgggtgctagtactctctcttcctttgtaaggaagtagcattcattatgatgatgcataaaaaaagggcccaaacaatgaagcagacaaaaataaaagccagttacaaaggattggtctcattgtttgattggagagtgacaggttgctctcattaattagaattagaaataaaggaacattacaaaatcataaagatgaggaagccaaaagggatgtttgggacttccttcaagacctctcttagctgtttaccacctcacagttgtctaagttataaacccaaccaaagctgttttcttcctgctaatacagacttcaaagctttttcaaagcagttcaaagtataaaagaaattatccagctcacaatcacactctgctgtttgcaaacagaaaatgatgatgattagaagttggttttggtctactttaacactgttcagaaaatctgcctctatgtccttgaaactcgttaggataaggatgtctgccttcaatacaaagagaaagggtggaaatatacctcttctctaacctgtttaaaagtataaatcctctccttaccttctcattggcaaaaacaaacaacctagcatcagtaagacttgtttatttacatgtcccacttagagctggagtctttcagatatgattctctcttctttttgtaatttgggcttcatcaatttagaatggcatattttttttttaaatcttccttttttttagggatgccttatctcttctttgtctttcctaactcgggttttttggatctagcaaaacatgtttataaattacttagtagtgacctctttttggcttctttatttttctcatatacaattcttttgtacttttgagttctaaataaagaagtttgtctcttttaaaaaaaaacaattaaatagtagtgacggagatttaacctaatatgtagttggtaactacaactaattttatgataaataaatatattgtcaaagacattctgaataactgtttgaattgggatctccacttagatcttcatttattgcccgcatttttggattctggattctttttccttagagatttagctatttttataattctcttgtactttgagcagtggtctcatttcattatattaatgaagaggctcgtttcctttccaaaagataacacaagagtcattggagcaatatggtggctacctatctaggtttttttttttcccgagaaagatacaatacttctcaataatagaatgaaaagagactatcaaaaagaaatttacagcaaagtagactttaaaaggtagagtaaataattagagaactcttccactattaaagatctaagtggagaacccattgaacttgttgaggagagagcaccatgaagatgcctttgcatgggctaattcaaaactttcataatgcaatcgagaagagccccgaaaaatagttgattcctttccatccataactaaaaaagaagatttgttactacattaatccaaagataatatgcacttaagctcaacaaaggaccacatagaaactgcacgacgtcatttgaaatgaaaaccttaggatttgaaagttaggaacccaattagtgaaccgctaatatcaaatgctcaaaccctagtcaatttgacaacaacccaagggaatggattagatttggattactctttcattgaagatcaagagataaggagaactagttccccactccaagttcgaacactccacaagcaaggtgatcaaacttacctgaatgttcttgacatgcaaccttgaatcgaggattgcaaaaagatggtgacgagactctgtcatctacctgaatgttcttgacatgcagccttgaatccagaattacaaaaagatggtgatgacgctctgtcatctgttagagaattttcattgataaaagaccttaaatcttcaaaatatcgaaaactacttggcttaaatagcttcccaataaaaccctaatgcattgcaaaaagactaaattgaccctacttaaatattattaaaaaggataaaactggaaaatattaaaattacattacaattattaattaaaatctaattaataatttgatgtttggtcggttcatatcatcattcttcaatttgtttgaaaagattaatatgaatattactccgaaaagagaatataggaagtcacgtcgccgaggtttctcaagttctgaaattctttcattttaaatttgatttgaattggggataatataatgaatttattgggttatcaaatgatacatggtgcaatgcaatgataccaaggtttagtaataaaagatagataacctggtaaacaggcaggacttatccactaaggttgaacaatgaaaataatttgaatcatctactgtgataaagagcttgaaaaaaatatggttgagatgttctcaatctaccaaatagaaagaatgaatgggaggcataaaaatctgatcaggaacctcttcacgcatattttttttatgatggtgatggataaatacgaaatagtccaaggcttctaatagttgaagcgtgaactaggggatagaaatgtaagaactggttatgaaatcgggatgaaccgatgattggacaagaattacaaaacaaccgaaggctagagatggagaggtgagaagaaagggttgacatgttactggaaggtgatgcttgaattgttgttggaaggcgacagttggaggccatgggaaggagagagaacaaagcattgtgcgaggactactgattgcttacgtaggatgttaatttcaaatttcttataatcaaatgttgcaaagttaggtttttgtcttattgcatttattgaggttcatgttatttgacctagacattcacagatattaaaggtgaaaaaaaagagttagtgaggcgagtaaaaatggtaagccatatcaaagtctcatgtgctagtttaggactattcacaactagttgattgatatatttggaaatacatttttatgtccttatcgtcttatattgatcatttgactaccactactaaaactgttacttttatttgttcatttcatttgattgtgctcatatgatgactatacttcagttcatggaaatatcactcactctagccattgacttctcaaaaactgtctgtataggaggattttg

SEQ ID NO: 7347 - DNA, 3201 bp, Cucumis sativus
  Intron number 1 from transcript Cucsa.012520.1 (locus Cucs a.012520) derived from phytozome v7.0 (chr-ID scaffold0016 4; pos 81407 to 84607 reverse strand)
actttggtgatgatctctctctctctctacctatcattatgttattttgtataatttccctttcaatcctcatattttatattatattaatttgatgttacaatgttcgtcttttgatcggggcatgatgaggctattgttagagaaaaggaatctagttgggatgtccttaaacatctactatcttgccctgtgaataatatatttaaaggactttttaactttaaacatatgtttgctttagacctatgattagggtcaattttacacaaatgttcggaagaaatgtgaacaaaatgcagatgttgatgggtttcttttagaaatttttatttttaaacaaatctagtgaaattattaattgaaaatgctttaggaattatatgatacttgcctattaatacatttggttggtacttttttttatttgtgtgtatatatatattttctatattgatgttgatcgaaattctgagaatatttcttaaaatttaaaaagtattttaaatcacatgtcaatccaaattattgagtttgatggaattactgtaaagctaaatatattgtaaattattaagagtttaacttgaagctattgcgtttttattaaatcctccatcaattcaaaatttttagtcaagagattacgaaaagtgtaattatatatatatttttaggacgtttctaaaaataggaaaaataataataggatttttatccctatatttttgttgtttgttgcggtgaaaagtaaatagtcatttgataatcctctaatatatctaaatacttgtaatatttgttatatttataatataaaaaagtattatagattgtcttttcctaaatcttttctgttattggatacaattttcttttttgttattaaacaatcttgtgacacttacaaaaatgacaaaataagttataataattaagttcatagcacacacactttattatttgcgaaaatgacaaaaatgaagtccagctcacccatcaagaggtaaaatgtcacaaatgcccttgttactaatatacgttgggtacacctaatactctttgatataactgatacttctttatacacatgatatatttaattgatatacttgatacacctgattcttttttatacactcgataccttttggtagactccgaaaacattactaatatatgtttgatacatctgatgcactacagatacatttagtattctttacttatacaattgattgattaaatgcacttgatatgcttgaagttctacttatgcatttgatatactattgatattcacttgatatactattgatatccactttatatactattgatatccacttgtaaacttggttcatacttgataacaattcactttactgatatgttttaacaatatattgttgatatacttgataatgatacatcggattacatcattcatatacttaataatactctaatgaattgcataaaatttgaaaaaatgaaaaaaatcacgtagtaagtatattaaccaactaatacatataacataagtatatcacaacactgatatacaaaactcagacaaaataaaaccaaaacaaaattaatgtaaaaaaataaaataaaataatttagaatcagattcaactcaaaatacacatcgaaaaaagtaaaaaaaaaaacacaaatgaagttaaattactccgatgaacaaccattatatttcgtattgcaattattatattattgatattctaaaattaagattaagacacaaataataaataatttttctactataaaaataaacaaataattagggtcttaaaaatttggagaataaataaaaaatgagtagaacattaaaaagaggaagataaataagttattaaagggcagtttaggaataataacaaatttaagatctaggggcgagaattttgtcatatttgtaaagtttcgtaacaatatgctataattagtatatcatattcacaaaattttattttatccaattttataaaaatctaatatatattttatagttttctgcttataataaatttttaaaattttaaaatgacgtggcaaacataaaattgacctaatcacagtggccactattttacacattattacatacataatccactctagatttaaattttattaaatgtttaattgtaatatcgcatatcaaataaggatgtcatttattgtaataataaattctctatgttcaatgcttgtagggtaacaaaatctttattaagtttatacattgcatacaatataaggatgtattattctatattaaacctttattttcaagtaattaggttaaccatgtgattgagtgtaatttaaacctctacataataatgaaggaaaaaaaggcttattgattgacgatattaattaatttgcatcataggtctaatgattaaattcaatatgtgagtgctctcattaaattagagattttcatgagactaatattaacaatatgatttggtcgattatattcttacttaactacatacaattcaaacaagtatattttcaagcttgtgattgaaaagaaaaaagaaaagttagatctaccatctaacctaattgacatctcaagttaagagtattatttaatgttgttttagtatcccgtgccattttctttaatttttcaatggattgtggtaaattaagggagacatctatattatataagtttgatatcaagttttttattataaaaaaattccaaagactaataaacaaaatagccaattttaaagaatcgtagagatatatagatgacattgtttatctttacaaactcatattagatttattatctaaacctaggtttgttttccttgtcaagttgtataagagccacactaatagaaaaatagttttacgtatatctttattgagaggaagacttttaagtggtttgaaaaacaaggctattgagaacgtattatgtctcaagcagataatgtaatattattatgaaggtatatgaaaagggttcgtagtcaacatgaacgtggccaaaccaattgaatataacatttgctcctattggatttactaaaagttactttttctttattaactccaattcttggattataaagttttgctttttaaatttttttattggtaggtatcccggcagaagtaaagacaaggctacttgtg

SEQ ID NO: 7348 - DNA, 2894 bp, Cucumis sativus
  Intron number 11 from transcript Cucsa.398010.1 (locus Cuc sa.398010) derived from phytozome v7.0 (chr-ID scaffold041 58; pos 564053 to 566946 reverse strand)
acctttctcctgttaaggttcgtaacatatctacatctgaggtgtatctgaaaacaaaaattatattgttctttgttgtaaattgtaatattggaacttcaaatgtcatgatgggaaatgataatctgatactttttgaccaattcaccttttctcttgattatcgagagtgtttgaagggttttaatgcctcaaatgacaatctgaaatcatgatttagctattttaccataaataattaaatcagtcagcgtcatatgaataatatgatgcagttactgaatttatatccctgcaactattttgggggtgttaggcccaaggagttgggaggagtagaagttgtgaattcctctccttatttggtacaaagaatttgtgtgtttcattactaaaaaaacaccaatcttgtgcctaactagcttttgacaccgtgtcatccaaaaaaaatcttacattgtaggctataaattcacaactctcctgatttcacaactctactccttgtcttcaccctcccttttgattttagtttttctagttgaacttatttacaaattatttcttgttaaataatctgcttttttgttccttctaataaatttttttatgagaacttttagaataattgtcaaagtttaaaaattaaaaatagttataaaaaaatgtgtttcgttgttgaatggagtgggatggataataaattctatggacataaaactaaaaacagagtcatttaaggttgggatctaaattctatctaagttcttttagatctttgaatggatcacttctatttgaaatgacaagagaagtccgtggaacttttagtttcttggtggagtaaaataaagtagaaaaagaaggatatctgtagattaaatgtcatttaagtttctttttcaagtgaaccatatagggctctatataatgtgtgtagattaaatgcctttgacttccaccccattagcctttttactactgtttataagattctggctaaggttctcccgaatggtttgaggagagtgatgtcctccactatttttgaggcccaaggagctattttagcttggaggcagattttggatcaagctcttatagctgatgaatcaattgaggagtataggttgaagaataaggggcgtgttgttctaaactcgactttgaagaggcttatgatcttgtggattgagattttttggataaagtgttcatgaataaaagtttttttggctataagtcaaaaatgtggatgtggggaacaaatgcactatttttggaattaatagtgagattgataagatcgagatgtgggcggaggctttcgagtacaaggttggctcttttccttcctcttaccttggtctctctctttgggtggcaaaccaagagccatgacattttggaatctaatttgtgaaaatattcaaaaaaggcttggggtgtggaagtaagggtttttctctaaagttcgtagactaattctgattagatctgtgtttagtggtatcctggcatattatttatcccttttcaaggcccctagttttgtttgcaagataattgagaagttacgagagattttttgtgggatggggtggatgaaggaaatggttcacctttggtcagttgggagatggtggggcaccctgtgaatcagagagtttagagatcgacaatcaaagaattcgtcacaaagctttgctggctaagtggcttggcacttactcttgaacctgattctttatgacgtaggataattgtgagtaagcatggtacccatccttttgtgtggacggagaaaggggttaaaggcacacactaaatatattgcttttgagcttccttctatttctcatttaactcattgctttgtggggcaataaggacactaatttttgggaggatcattgggcaagggggagttctcttagttctttgattctgcatctctatcacttgtcctcctttaaaaaccatccagtgttggatcttttgtttgggcctgggaattccgtgtctttcaattttaagtttcgtcgcaatttgttctgtagggaaacgcggaggttgcctcttttccttctttgatcgagggttgtatttttagggagaggaggaaggatcttcgtgtttggagccctattctgattgtagatttttcggggtaaatccttgttcagtttgttgttggattcctccccctctagggagtcggtctttgatgtggtttggagaattaaggttcctaagaaagtagagttctttgttcgacaagtcctgcttggtcaagtgaagaccatcaataggcttgtgaggaggaagactatgcttgttgggcctttttgctgtttgttttgtcagaaggatgaggaaaatctttgatcatctctttgggactgtcattttgtttagaatgtgtggagtttgtttatgcaggagttcggcattagctttgttggtcaaaggagtctttgagctacgattgaaaagtcctccttcatccaccttttagagagaaaaaccgtgttttttttttttgtggcttgcggcgggggtatgcaccctgatttgggtatttggggggagatgaatgatagggtgtttcggggtagagaaagatatcatagcgaggtatggtctcttgttagattttgtccttctgggcttcaatattggagaccttttgtaactactctattgctaacattttacttagtttggtctcttgttagattttggtgggctggtttttttgtaggcttttgtattcttttattatttgtcaaccaaagttgttgatttgtcctaaaaaaagtgtgccacagggattgcaatctgtgtttgacttctttttctttgcattgttcaggtgacatatactgaggagc

SEQ ID NO: 7349 - DNA, 757 bp, Cucumis sativus
  Intron number 2 from transcript Cucsa.152650.1 (locus Cucs a.152650) derived from phytozome v7.0 (chr-ID scaffold0112 4; pos 53414 to 54170 reverse strand)
tcaaaggtacattcagttacatgaaaattttccgtgaaaataagtttctattcatgacgatgtcaaaattaagagtttaattttccgtgaaataagtttctattcgtgaggatgacaaaagttaaaatttttgcatgtatagaagaaggttaaaatagcattttggtccttgtatttcagattttgttttgtctttgtacgttcacttgttcaattttagtcttttttattttcaattaatcttataattatttattgtagttagcttcttgttgattgttcttgaaagaaaattctcttaagagcatctcctttataaattgtaaaaattatattacgtagtgtcatcatttaatcaatttttatgaaaattaaatttggtggagtaaatctaagatttttttatcttttatcttttttacttttaaatagacaacttaatttaagattcattgaaagtacatggactagaattagaccagggaccaaaatggaaaaatggaacaaaacctaaagtacaaaatcaaaatagtattttaactaaaaattacttagcgggattgtagccttaatattgaaatttcccctgaaattctaaaatgtactaaagaagaaaaccaagcaggacaaatgatatttgggatcgcttattctatgtactgtaacatgtctgtactaaaagcaatttcagccctgttatctatctggaatttgacccacaggttgagaatcaagaaggtgtggcaaattttgacga

SEQ ID NO: 7350 - DNA, 2997 bp, Cucumis sativus
  Intron number 8 from transcript Cucsa.207380.1 (locus Cucs a.207380) derived from phytozome v7.0 (chr-ID scaffold0144 3; pos 218293 to 221289)
tgtgccaagtgtgtaaaattacttatttcaactgcaatatatttttttataaatcacacacgcattaaatttaccttttcttttaagaaatgttaaataacatgggttccttcttagtaattgatatcgagaagggtagttcatataaacactctgaaggctcttagtttttccaatgtggaatcctcaggaagatacaatgtgttaattacaaaagatgtacaagaggaagatttagtatcctccaattggagatcagtactgattgcaaaaaaaataaaaataaaagaaaaatggaagttttctcaaataggaatattctctagttaacgactctaccaagtaaaagatccattgtgtaggttgtagttgtacaactatgtccttgaggaacagttgtatgggttgtcatttgtcaactatttctttgagatctaaggaatattctctagtttgtagatcagtactggttgagaaacaaaaggagttaatatttggaagttttctcaaataggaacattctttggttgacaaccttacttgtgtaggatctgttggggttgtacaattatgtccctgaggatttgtttgagaagctggacaactattcccttgggatttaacagattttctcaagttagtatgaaataaaaaggaattcctagtctgtatgagttaaagaagaattattatatgcctctccggctctttctaatgctggaaatcatatgttgttttggtttctacaaaatcctcatttgaacaataaaaaaactcttactcctctccgaccaaataaactaaaccaaagcaccacaagaatttccatatggtgtttttcttcccctcgtgatgacttgactttgaatataagctacttgtctccgttttttttaaaaaagaaaaaattctgtacaaaaaattttggatgctacgtgggttggattttgcacctttgtaggtttgacaaataaaaaatcttccttcaaatttactgttaggtttcataatagcaatgcccttaaataggaaatgaaaaaataatcgacaatcaagtataccagtgtaaccctagaagctcaagtgttacaataaggatctttcaattggtggaatgaaaaggtcttagtggcaaaaacctttagaatgaatagtctatggagggtctaaaactctatactatcccaattgacccccccaattctcaatttcaaaaattaatctcctgttcctctctaacaacacctgccaaagcaaagttgtaacaatcacaaaattgaacttctccctttcagaagcgtttccttaagatctgattagcaacacactattaatgtttttttttttaaaaggagacaagcttctttattattaataaactcaatgtacgagagatctatacaatgagaataatagggaagccaagaaatggggggagagagagggataggatcagtaggtgcacccggacatctcaactaagttgacacccctatagcaccctcatcatatccaaaatacaaagaaaagaccaaagtacaagaacaatactaaggtcatgaaaagaccaaagtaacaaccaaaataacaacagaagctacctacggtagacaaaaacaaggctgaaaagtgaaaacataacgacagaaatacatataatgtttgaagtcaagaaaattaggcccttgaaaatatccaccaacctgcttgaaagctatctagcaaacaaacacttcaaacagatacagtatcatttgtatggtagtctactttgaagcttatcaatgagtaacggtcctatatcacttgggagcttgagcttagacatctttggcatgagaaaggaggctattttacactctaacctagatttaaaaaaaaaatctttgccgtgtttgtgttgtgttgtatccatgtcttgtatgcatagctatggttgtgtcaggctttcgaccaaaatatcaaataaaacacccaacaatggctaaacagaggcaatactctgttactctttatttatatataagccaaaatattacaatcaacgatataaaatataacaaagaaaggaaataaccagaaaacataccagctccttttacaagaaggatacttcccttttgcggctacagcagcctactcatcataaagatgacaaaataaaacctacctaccctctcacaaacaatcactatttatagccctcctaaaattcttcccagcgggacccactctgcacgatatccttccctcaatcattctttcttgttattagctgatgaattcccctttttgcccttcctaacatatgtgtggataattggaggtctcacaggttcttagcttcctattcagcctgttgcccactagggaataagttcttgacgaagcatgggactacaacttccgagtgaaaacccgggcttttagcacttgaatttctgttattcactgacctacttactctccaattattgccattatggcaagcaccctttgccatgttcggttttagttttgaatctaaatctatctagtaagaaaagccaaaatttttctaatgttaataccaattcctaaggtcttgtggaagagttttggtcgagtttcaaattcaaagcctccctttggctgcttgtgtcagtagttaatttaactgttcactttattttggtgttgtttttcttgaacatttattcatttctattatatcaatgagaagttttcaattcaaaaaattgtgacttttagtaaataggacaaggctggagccatcccttctacatcagtatgtctagcttcctcttagtctctgcaattttattttatgataattgatatcagaaatatttttcttgggttattctgctcatctcattcccttgcatattttctgcttgccgtacctttatttcaagacagctttagaggttattaaatttgattatccctcactttacagggccaatacaaatcaactttagtctgtcccgtgtg

SEQ ID NO: 7351 - DNA, 2723 bp, Cucumis sativus
  Intron number 3 from transcript Cucsa.303710.1 (locus Cucs a.303710) derived from phytozome v7.0 (chr-ID scaffold0295 1; pos 1562610 to 1565332)
atttccctccagattatccgtttaaaccacccaaggtacttagaattgatatgctccatttacagacatcttttgcctacacatctgcatacctgcgttttttattttttttttgacaaggaaacagacatttaattgtgaaacttgggagttacagttaacaaactctttatgaagagtataaacatctcatatcctactgaaaattacaagaaaacccaaaaacttgacatcaaattctgttgagagaaatgtatttaaactttttttgtttgatcgtttagaaataaaagccaaccgtttacagttgtttcagagagttttctaatagtgccattttgaaaagaaactttgggttcaccgtgtcttcagaatcaagaagaaagaaaaagagagtgtgccactaaattagcctgataagtcggcaaacatgtaaaactatttaacaattttgccttagttaacaattttgccttgatatcaaagactaatttttgtaagcaatcaggtttcacttatatatatacacggtaaatgttttgagacatcggccaaattcgtagtattggttgtgatgagtcccctccacctcccacccacccgcactcccaagtgggggtcggcaagaagttttgagaattactaaaaagtaaaaaaaaaagaactgtgcagaatgaaattatattatggttagaagctattgtttaacgtatggttagaagctattgtttaacgtagagacatttactaaacggatatgaatgggttaaaattaatattgcataaaataattttatttgcagctgtttgttgcctcccaagtgtttgggttctcgttaatggcactcctatagtaaaatttggtagttttggaccatagacatatctacgcccattccctgtcttagtgactaatatgcttgggatgcgagattgacaaggagttcaaaattttcttgcttgaagtagttccaagtatgagaaggtagagagatcaagtttgcacagtctgttttaagatgacattgttgcttttgcttcagaaacgatagaaatctggaaaatttatcatgatatttttaaggtggcttctgacttaagtgtaacatggaatcttccaccgttgaattcgttggctgagacttggcctctgaatcctcggctttccccttggaattaatcccagcacatgggctaattgcagccaagtactgaaatgatccaagtaattagtggacgataacaaggtctggtgacctaacaaaacggtgaagtgctgttggggataactcttgaattgcatttcttttggcatcagctaagctagttgcgtgcgaatttgataatgatcatttgcagtgattccatcgctctaaatacctaaaaagtggccattgtaatctttctcaaaaggattacttttgtatgttgaagttgaagaaataagctatccaatgtctgaccgaagttccaagaagatcatagagtaaagtaagctggagagttcagggttattttgttttctgtaaattagacatgaaccagagacaagccgcttgtctccccttataattatcgcctcctttgaaggcaaagcatggcaattcaagatcaccttttgagtctctgcacctttgcctcttgatttttaagtgaacagttttgggttttgggcatctattgcggggggaggggactctccagaacgcccagggacttccatgtgcagccgatttagaggttttgccaccctttatttattttttaaaataaaaagttcccaaatctggatggagaggaatccttgcttgaaggacagaagtagacatgaaccggagaagtaaactcttgtctcccctataaagttgttttagggggttctatggctaagcttatagctattatttgcaaagctagatggagacagtgcttgcaggacaaagtagacattttgaacccattgggagttattagattttgggttacctactcaaattctcttgtaattctaaccttcggttactgataagataactgagattccttaaacgctttggctttggatttgattggtacctgtcttcctaactaatactaataccctttttaatcattcttcttaaatgaatctgtttaattatcaaactcaatgtaagaccatcgattcatctacggtgttttaagtaagcatctcctattttccttctctttttccataaatgaataattcgatttccccattcaaacatcagacagcctgctcattctattaggctgatgaagaattgttaaattgtaaacgagtattatgaccaaaaactgactcaaagtccatccacccagtcgttttgggtaggtctcagatgagataaccttctcggtggagtcatacgtaccttgattcaatgactaagataattcatgttaagttttcaatttctaacccattgagattttgacgtgaaggttcaattttttacgtatgtctttccaattgatagtgatcttggtcatgttaattacatatcttacttactcatactattttgtgttgtgtatgttatgccaggttacatgttgctgatttgagaacttgctaatacacttaagtttatctagtaaaattattcactcaatttctcttaatacataattggcatctaaagttgaattcattaactcatacaggttgcattcagaacaaaggtctttcatcccaatat

SEQ ID NO: 7352 - DNA, 2203 bp, Cucumis sativus
  Intron number 12 from transcript Cucsa.118360.1 (locus Cuc sa.118360) derived from phytozome v7.0 (chr-ID scaffold009 98; pos 168311 to 170513 reverse strand)
aaaaactggcctctttgtctgggattcagttaagggtaaatctttttgtttcttgttttttcatcatactgtttaaattttatgtttataacttctattttaaattatctctaattgattcttctcatttgattttattcttcttgatttccttctgtgataaaaatatgaaggttgatactttattctttatcatattcaagctgatgtagcctaaaggttgaaagagccctaaacccgataaaaaatcccaaataaaattgtcaccttgtgttgcactgcaactaaaaagattgaaggagcccaattaaagaactgtaaaggatgactatgacgtcatcaaaaattttctttggttgtcaagaactacatacattcctgccaccaagattctgctcaaccattttatccaaagttggagtatcaaagcaactctgctttgcttgctaaatggggttggagatacttgaaagaagagtcagctctttggagaaaaatagttagaagcatccatggtaaggaggtttttgcttggttcaccaaagagaaatccggtaacagcctaagaagcccttgggtcagcattgctagagtttggaggttggttgactctgttaacagccaaagagctgactcttctttcgagtatctccaacccctattcagtttctaaggttttaaaatgggtatttttggtccttcagtttatttgaccgttggttgactaacggaaagatgatgtggcatggttgaagtagcatcttttaagtgatgttacaaattttattaattttatattaattaattttgatgtgtcattcttactttcattttactttatatctctcctccatcttctgctgctagttttttcttttcttcaccatctacaatcacaagatcaatggctgcactagcaatcatcaaatctacagggcggcaaattcaaaaattagaatttaggacaaaacccaaaacatttgggcaagaaagttgacattcgcataccaacggaagataaatattttacccaatttatgttttgatgagacgatgacctatccttcaaaatctcaacgatttgcacaaacaaattaaatttcaagaagcttagtttgaaatgggaaaatgaggtggaggatctgggatttatggatgtggggtttgggagtgggaaagcgttcgatgccaatggaggaaattaaggtgcaccaagcttggattagatggggaaacgggtgtggttgggggtgagtaaacggggaaaataactttccctagtttacttgagtgatacagaaactaaagtgatttgtattttgtgaacaggggcaaaatatttgtatggacagaatattccttgcccaaagttttaggcttttgtcctaaaaatataaatttttctgcttttccttcttcgatcaagtattagcttgaagatttgatgattgttaacttgatacagccattgatcttgtgattgtgggtggtgaagaaaagaaacattataagctgaggaagaaggagacaaggagaaatataaaataaaatggaaaaaagtgatagcatcaaaattattaatataaattaataaaacttgtttgagttattattaataaagaagtttgtctccgtttcaaaaagaaaaaatttgttacatcacttaaaagttgccacttcaaccatgccacatcatctttccattagttaactgatggtcaaataacctcaaggaccatttaaaataaaatttcaaatctcaaggaccaaaaatacccattttaaaactttaaggacgaaatagacacttaagtccttagggactaaaagtgtattttgccctaaaatcaaatactttattttggatcaaaatttgtgaatacaagaagacaattcctccatttatagagttgtaaagcaaaattaatcgtaatttgaattaatcaaataatctaatcctaatcctaataaactagtgaactaatcataatcgaaatcagtcaagaaaatcaatcctaatcagaatcagttaaagatttaaccaagatatcccaatttacacttatcccaccatatcaatccctagaaactcactttttactcggtggaaaattatcgtttcaaatttatagtgataagaaaattgtactgatgtcttgtttgcaactgaccatctcttcattataatttctgtgtagacagg

SEQ ID NO: 7353 - DNA, 1653 bp, Cucumis sativus
  Intron number 2 from transcript Cucsa.167210.1 (locus Cucs a.167210) derived from phytozome v7.0 (chr-ID scaffold0115 4; pos 577761 to 579413)
cagcagaacaaaggcttcaaaaggacattaaggtaaaaagaaaaaaatacaagaaccgtgctgatataaactgttgtgcaaaatctcagaatatatgtttcgtttgtctcatcattgccataatactcttaggctatgctgacctatgtcccacagaaatagatgatagcaaaaatgtgaaatattgtaaaaaactcgtacgatcatcttgtagttgttgatattgttggcgatatataattaaatttaccttcaaccacccatttaagcttttggttgaattgacgattcaatagatatgaattccatctttaggattaatatctgcttcaagaatcaatggaactcttgagcgtttaatggaatttgatcatgatgaagaaattcctcatccatatcttaattcaggacagcttaatttgaatcttttacccttcttctcccaacacctacttgctcttgccatgtggaaagtaactgcgcaaagaatttaagattttgctcggtgcctgattgttgggggtgttaatatgcaaggcgaggtccacccaaagacatcctgatatgcaagatgtggttgaccaatgacattctaatattctgttacactcatctccacgatgacaatcaaatttttttcctttgatcttacctgagaacattttcgtgatttgtccattatatcttaaagttgtggaccaagttccaagagggtgtttgacccctaactcaagtgggtggagtgggctattatagttgattttcatgtttgggatttcaattataatagttggtgttctaactattagaatataaccaacaattaactgtactattgctattttttttataagaatctgtactattaatatttttaatccctctttgttcatgtttactcttttctactcattctcttgttgttacagtctttactatttcttacctagaccaaatagtttgcactctaaatatagacttttataactcatattaaaatagttttcatcccaaaacacggactattataattcataggcgacaataaccactaacttaatcaacttagcgtctcaaacaactccttagaggttgagttcacagaaccggtaccttgttttgctaggaagtcttgtagatagctggagcaactgttttcattcatcagtaaactttaattgaactggaacctactggctactgtaacatcatgcatggactttgtttaattgttctttgccttgtagattatttttgaagactgtaacttacggtagtatgaaatgatgccaattcaaggcaggtttgattgatatatcaatactggtagttgttatacatccactgttgaatttcctatatatcttttgtaatgttgattgtgtattatgtatgtatgtgtatgtgtgtattttgtttttgtgattattttttcttattgtttgatggcctttgttaagaaataagaggaccttgtatttgattcagaaaatagaagaaatacagtaattttgtttcttctcaaattcaagtactacttgcatatgattctatatccttcataagttttattgagattcttttgtccttgtttttatcaaattttcatattttgtaggaagaagaaggtaccaatctagagtataaaaagaa

SEQ ID NO: 7354 - DNA, 3224 bp, Cucumis sativus
  Intron number 1 from transcript Cucsa.323060.1 (locus Cucs a.323060) derived from phytozome v7.0 (chr-ID scaffold0308 0; pos 2595435 to 2598658)
ttgtcaagaaactcgttggaaaggctacgcgtaaggtaaagttgttcactctttaaatttctttctactctgctagttaacctctcttcttccgatcttcgttactgaatcctcatcatcgcattctcgatcggactcttttcattttatttatatatatatatatagtgtttttttatttctaatttgcctgatattgctgctgcgattgagttattttgctttctatatcttgttcgtatgtgatttattttttgcggaacttacgaggcttgaaagaaacggaaagctcgaattgatgtgaaatttcttcagttttgcaacaagttttgtataaaatatggactggagttttcgaaattgatgaatgcgcgtagctagttcagtattatcttgtttctgtttactgatttttggttcctggaaagcttgggaaattgaaaatcgttgcaactttagaatttatctggaaaagactagctgtaggagttggaatctcttagatttgattttgatttcaaatgcgaagcgttttatgttttgatccttcctccattttgcttctgcaaatcggccgaaggtcttcgacttcgagagaggaaaaagaaatgaaaatgccacgtggacgacgattttggtttttttaagtaaagaaaaggtttgattgtttggagtcaagaggtcggcagatgaggcagaaaccgatatttatttttatgaaaatagaatccaatggtccaattattcgcgacccttgtacgagacatcgtgcccgtgccgtacgaaattttacatttttggtggagggaaaatgatttattttattatttcacttttgctttttaaaattactgttttgtcttttttaaatcgttatctacaatatttgcatctatgacctaaactaaaacatatttgattatatttataattaaaaaattgcattgacaaaaagaaatttaaaaaaataattcataccatttttttaacttttaaatttgcttgttttgtaattttaaaaatggttagttaatatttcaaattttattggtatagatgcaaccatcttccatttttaattaacattttcacttagatttttaattaacattttcataagtgaagccatccatttttaataaagagatttttaaattaaacattttctaatattttattatattccaaattttttccatcaaaatatgtttttattacttaaaattatttgttttatcctttagtgtaacaaaataataaagcgagtagaaaaaaattggtcatagtttctaatatttaaaccttcaattgtttgacattttcagaaatgacagcacgtaagataacaaaaaataaataccaaatttatatttgatggatcaattaattttttcttagaaaaactcaataagccaaataaaataattcagaaagttattagatattcttttaaattaaaaaacatattaaatactgggtgaaaatttgaactccaaacctacatatgccaattgggttaagctcagattggcaatactacctaaattgaggtttgaggttgtgatataaaatataatggtgagagaaaatgatggtttaataaggtgagtgagatttgagattgtaatgtattaatatatgagaagagtctgagataggagcagttcacgtgatgtgggcggctagggtgcagctgctgtaattaaatctgcccatgcccagcagctgccggctggacatatggagttcccaactatatcgggaatttggttttttaaatctatgaaacgctttcgtgttgggaagttttggtttttcgaaatggacccttcattattcgtacactatcccctacattatttatgtccaccccactattaaatataaaaggtctcccatgttgcttttttcttttttccttttataatttccctttttcttttctttggaaagaactcgaatgttaccttaatttttgtaatattttcttaaaaatttaaatccaaaggaactttttctataaagccattttcttttaattttttcttttattttaatagactctctccttaaatgaaaattattggaaaaattgtaattcaagtgagtgtaagtctaattacaagttgtcatgtgcaaaattttatttttcttttttagaaacgtgatctttaaatatttttttgattgaaggagaagtatggtgatagatgtggtcttagcaacacacacccacttattgctcaagttattatatcttgcttttttcttttttctattttgtaaatatatactaagaaaaaattgtcaacaaaaacagttattgtccctaacattatgagttttccttcagtagctttgagttttaactgtttatattctgaactcttttcaattgacctaaaacttgaatgttaaaatcaatttagtacttgtatggcatgataaagatgacaaaaaaaatatgtattattggataatttgacagaaatttactggaaaaattagaccgcctattaatgtctcttctaagtctctgtcaactagtaaattatcatgtcatataatatttttctcctatgtagggttggaataatctttaggataaatgttgtatattgtgacctattaaattatgttgattgtattgtcaaccttttctttagaagtatacaaaatatgttttacagttatttcaattgtcatcgaatacagatcagctgactaaggtatttatttgcatagctatgttttgcttcatattccatagttgaaattagcaaaagaaagagtcatataacaactaaagttgatgaagtacaaactcttatttaaaccaaaatctcatcatcaaaccgaatgtcagcataaaaactaccatactagtaattcgctccgtcctaaaactattttcaataattttttaaatacaagaaattgtccaacaagacgaacaaaggattatttctcaaaaaatacagattaaaataatcaaagtgattgtagttctctctggtttaagaagtgggaggatgaagaacaagaaatgtaaagtagggataaatattgattgatctatccatgaaacgaggggtttgcattgttgaattagaagtatgacttctttgctaaacatgaaaaacatggagaaaagaaagttatgtataaattggcatgattgtgatgcagccagaaaacacttttgatagtttgaaaggaagcca

SEQ ID NO: 7355 - DNA, 1004 bp, Cucumis sativus
  Intron number 1 from transcript Cucsa.265870.1 (locus Cucs a.265870) derived from phytozome v7.0 (chr-ID scaffold0235 2; pos 314881 to 315884 reverse strand)
ccattgcagagctcaatcatctttcctctaccagagtatgccctaccgcgttccttcactactactttgtcttcttcgtcaaatttgtactagatgtacaactatgtactgtcattccgtttggaaaaattttccgaactctgcctgtttttcttttcttagctgcgctagttactagggtctaagtggaactgaaatctttattacatgttaatctaggttttgagtcttccaataattgttgaactcatcttcttttggattcgattttaggtatttttgaaacactagacggacttctggttttttttcttcttattgtttctaagaatgttagtttggtagtgacttctgattgctctatttttcattttgttgagctctaatgaaggattaaaatgtctcaaattaatggaaatatatgtgaaaacattcatgtgaatcaattgatattcttacaagaacatgtacagatgttgcctaaattgtttcatttctgcaaatattagtggaagcattaatatgtggatgaacacaattttttttatatccatgagtgtttgtgactaatttcatggacaagctgacacattagaaagccttcagtaggatattaaattctaagcaaatgacaactatggattgaattcatgacttcttttgacactttttaggattgtttatcattttttaacactaggtcaactcaggatggttgaacacataatatcacttcagtaactaaggtcctttcgtgattatgatcatagttggatttcattggattggagttctatattttttatggattttttttatgtctttgtattttctttttattctgttcaatgaaacttaggtttcctacttttggggagaaaagcatcaagaagattaaaagatgaacagccatcgcctctctctgagcaatgtttcactcattctgaccattactattgcaaattgcaggctgtctttcagaaaaacggaaacctgttttttcg

SEQ ID NO: 7356 - DNA, 1898 bp, Cucumis sativus
  Intron number 9 from transcript Cucsa.143250.2 (locus Cucs a.143250) derived from phytozome v7.0 (chr-ID scaffold0107 9; pos 1567185 to 1569082 reverse strand)
ttatctgatatagcatttttttcggataattcaaggttggtcaaacaactccttatatttaattttttatgttggtcaataggtgtgcgactattatataattcataatcttggacagagtgaattgataaaaagctttatctatttgggatttggcttgattgtaataattgaatctttggagagactgagaggttttgtggggacatttggagatttaatacctctgtatgagcatcatcacatcgttaccgtaggcctctttgcaattatgattttggtttgactttgcctgattgaagttcctttttgtagtttgtttttggactccattttggctggacttctctttctttcttttttgtgtgcttgttattctttcatttttctccatgaaagcatagtttcttataaaaaaatatttgtttctattcttatggggttgtcttttcccttcacattttaggattgagtatcaactttaaagttaccttgaatgttacttcttttttgtaatatacttacgtatacataaatatatgtatagaaacaaacatatgtatgtatatgcatgtgtgtatggatattaaaaacgatgctttcagtaagaaatatgaatactacaatacaaatggatagacaagaaaaacttcattattgttatatcctatacaaagaaactaagtttgagattgcaagaaagagcttcaattgttgagaataagaacccaaagatagttacaaaactccttagaagcaagcattcaaaagagatgttaaatcgagtcatatatcacacttcatataaagactctcagctcctgcaaaaaaaaaaaaaaaaactccagaaagagatatgatggctaatttcaactttaccaagtgatgcagcgatgagtatagctaatttgaatgatatagatggagcagaggaagagaaacaatgcaaatagtcaagtttgataccatgttgaataacaatgaagtcttcatttttctctatttgatttaataagatcaatctcatacaaatagtcactgatctacaaaaggtataaaaggaatacaaaggaaacagggtaacaaaaaaagaagttttgcctactacagaaaacaagcgtgctaaagactaaaaaatgtgccaaaaaatcatgtgtatggattgacctttacgtaaagttgcctgaaacttgtgttaggttcctccttcccctgcactcagtgaaacctaacacaaaatgtgatagaacagagctgactgctctgatagccttgatattgataataaagagcaccaaagtcactattacaagccttaagaaggaaacaagagccacaatacagaacaattcagcaagctaaaagaaaagacaagagattagagaatggaaagaaagtagcaaaaccagcacattcgagagagctggaactaaaagcctctaccagcctttaccaaaaacagcctgcctacactggttcccacactttccgtttataacagcttttctgtggttcctcaatgattcttcttctccccagcgtttatgccgctcttgtcttctgtgcaattccgttcctgccccttcgtttatatgtatataaaatttggggtttaacaacttgatactcttctttcagtacatttatgatggatcgatcaagtttaagttgtgttcagacaaagtctttaatatggtgactgataatgctaactattgatttcttctgaacacccgaactttcaatgttttaacaccttagataagtcatgtctatctttattcttagaaaaaagttgaagatatatatattgtcctccatgaacaattttgtagattacttgcatctgatacatgtggcgtaatcaatatgtgggacagaagaattggaatacttcc

SEQ ID NO: 7357 - DNA, 2782 bp, Cucumis sativus
  Intron number 10 from transcript Cucsa.048280.1 (locus Cuc sa.048280) derived from phytozome v7.0 (chr-ID scaffold005 42; pos 3108202 to 3110983)
tcgagtcgatttaagctcacaagcattggacaaatgtaggtatggtttagttgattaaacaatagtagaactatagcattttatttatgctatctatcttgttattggaaatattggataatatattattaacaagaataagtggtagattataggcttctggctaacaagatggaccatcttttgctaactcagattgattgggcactcttttggggttttccatgcttttattgaataggaaataaaatatctcattgattcaattagtttcaaaaggtatggaaacctctaacccatcccatgcttccaggttctattggaagtttgaatttgaacaggcctgcatgataaatggggaggtatatcttgaatcctccttttggtagcagtggaggtcttttctggtcaatacggtcatgctgggtttttatttatttctttgagatttggtcagggaagctagaagatctcttgtattagtgataaccaaggactttactcccccaccctttttcctcgctattttcataattagtttgctagggtccttctctctctcaaaatcccctctgaacacaacaaaggaatggataagttggttagaaactttctctgggatggtggagactataaacagtgtatgcatttaatcaagtgggagtgggcaacaaatatcattgtgggaggctggacatcaacttcacaaaaatagaatctttgctctatttttgttagtttctttaaaaaaataatcacactttcattgaggaaaaaaacaaaagaatacacagacagaaaaaatgaagcccacaaaaacgaagaggttcctgaaagaaaggcctccaatgaagcaaaataatgctaggataacgattacacaaaaaaaaggaaagaaagatttcaaaaaaaaaaaaagaaagaagaagaagctttgtggctaaagcccataaagaaataaggagtctagcaagggaccaacattcaaaaggattaagcttgttcccttgaaagattctattgttcctctcgctctaaagccccacaaaatagcacatattcttgcttgcctaaaaaactttccgttctccctagagagtggaaaaataacttttcaatcatctctctacaactgcaatgtctagccaactcaacactaaactcatgaaagaagcaaatccgtttttcgcaggcaaagtactctaaagaatgtaatcaagattctctgctgccttctactaagactgtgctccaacacgatgctattgaatgcatgttgggccgatctcttatcggcactggaaatgtgtttagttatttgagaggagggatcatgtctgattagctagttggtcaagaaaatggtagtaaagaagagaacgctgggattgctagatttcttgaagaatttgcccaggccaccctcatcctgaatcgacttttgactagctcgacattaagaaataacgtgtattgggaattatttatcgatgaaagtttgagttttagctttatcaatagcagaaataaatactttacggccctatcaaattaagcatcttcctggccaccctctccaaggtgttcactgttccactgagaaaaaactttgctctattttttaaatggctttaaagattctctcaagaaaataacaactttttggaagaaggcgatcacttagtatttatggggctaggaaagacgttagaaggccttggttagatatagctgagaatgttgactcttaaaatttgctacatttgaggctaacaacggggatcgtatcagactttggaaggatcgttgggtagattagaacagcttagaacatggtttcctagaactcttcactatttctatgaagaaaaatgcttccgttgctgcttgttgaaataagatgaaagaggatgagaattaggtttggaaaagaggcctctcgatggagaattacaaagtcgacttgggctggtgaatcagataaactagggtggaagaggacaagttgtggtccttgggaccctgagactcctcaaattctttttctttttctctctcttttgaactcgtttgatatcatatcctccttgaaagcccctttgatctaagcggtttggaagttccaaacttcaaaatagtgaaggtttttctctggtctcttgcacattgaagtcggaacccctttgatggtcgactggtggaagccctaggtggctgttgtttaaaaaggaagacatgttggagccttgctaggggaatccgataatcgttgctatgggtctatttactatccaccacttccccctaaatggaattatgcccgtccacttatctctaacccaatggcatttctgactattaaatttcccgcccccaggtcggctttcgagataggccggtaggtaacgtccagttaactaaattgaaacactgatttatccatgcctttccacaagatgtcatacatgaatttctctaatttttaactactaattttgggcatttgaatactgggagatggtaaagaggaagttgaactcgtaaatcattttggtagccgtatcctgattttatatatttattcaatggtagattcattttattttctgtttgtaacacttgagatttttgaaagctgattacatgttgactcacatatggagtgattgttgatgcgtgatcacaaatacattgaaattaatcgcaatttagttcaactttagactctagctgttttggtactgtaggtggagagaattctattgcaacatccgggagttaa

SEQ ID NO: 7358 - DNA, 2434 bp, Cucumis sativus
  Intron number 1 from transcript Cucsa.163790.3 (locus Cucs a.163790) derived from phytozome v7.0 (chr-ID scaffold0114 6; pos 206480 to 208913 reverse strand)
tgccctttcactcccctttccatttcatacacccggtatgttcttacattcttctctttcctcttcgtttcaattctagggttttccctctcatttccatgtaaaccccttttcattcttctttctttcatttgcttctcttatctatctccagttgcagtttccgtttctgggtctgttttatttttgttcaatatctttgttatttattgcttttatcacttggggttttgtttactgcttaattttgtagttgttgcatgttttgcttgttctcagatcgtgtattggtttaattgctttgattttggatgatcatcatatgactgccacacacataggcagatcagttggggattgatgtttaagaattttacgatgttggggctgtgtaattctgcttttttcttttttctttttttgaattctgagtagaaagctagcaagtacgttaatagtctgatggttattattttacaaaattgatctggtggatagaaagtttcttcaccgtaaaggaagttgttattttctaagctgggaaatggtgtgtctactaaaaggggaaaatagttagtttataccttctaaactttgtgggttgaatcaattcaaaccctaaagttttgaaagcgaatcaatcggtttggattctttaataggatttcattttaaaatcttcaatgcatattttgtatataagagtttttttaacgtagggattttgttgtaatcaaattgacggtagtttttttcattaatatgagttggtttcacgtcttctctccttcctctgtttttatcatacttatttagaaagaatgacacgaaattgttttttaggcattttggtacaattttcggaatttttttttctctattgtattcactattttcagaatgtaaaatgtattgttgaaacaacttctatgtgcaacttgctttagaggaaactaggggtttggatttaaattaaatagaggaaaaaggacatcttaaacaaataatagttggcttggtttgtttctttcacaccattctatttggtgtgtgtatttgagcattaaaataaggctaatggggagaaaagtaagagtgaagtgccatttaatgatggtagtttcaaactttgagtccctattgtagaatttgattacttttgttgagttaaatatttgcgagtgtgtacgacatgtacattcttttcatttttctcaatcagaactcgggtacttatcttacagtaaggtatataaaataatttagtgcacttgttgaaagtggtattttcaaaacacaggacacgctgaagtacaatagccctctccatctgaggcttaagtatgaaggtccaaaaactgcaagggcttcatcttgtttgaatgtagaatggaagaatgtaaataattctttttaatgtgaaagaaatatagtattatcaactgaaatgttatatgtataagagtttccttgaagacaagtgaggtttttttaaaaagaaatttgttgttttcttagagaagaaacatgcaggccttgaatttatcctttattttctcttgcatactttccctcactcacttaagtactcacttcttttttctttgtatagttgttcttagggggctattattccttctttaaaaattttgatatttttttacggaatcactattttcttattcttagttatagcttgaacgtcctcacttcagtctctttaattcttaatctgttaacgttttgtgtactagttattttttacttatttatctttatgaatagccaaacttccattgggaaataaaagaattaatacaagggcatacaaaagagagcctacaaaagaaaagagtcccacaaaatgagacaaattaatagcctccaattcagatggaaaggataatgcttatgattgtttaggagttcaaatttcattatttgcttgtatttctattttctccttcttgctctttcattttccattcacctgcctgttctgatttttctctttttttcttgatattgatatttgaattgtacttgcagacattaatttcaaggattaagattctttgcactcctggatgttgtagcttcaatccctttgtttaagttgcgatgttcatgctccatttacttatttaactgacttgcttcaagttagttcagcctgttcgattgttatgttggtaagattctccctgttcaaagcttgattttttgtctgcatttcaaatcatgaagtagagtataccttattcttagaacgtccaaagaattttagtataagtgtacttgcttacattagtgcagattgagactatggacttttggtgctgatggacagtcagcagcatgagtagaagaactcattcatcctgtgtcttctgtgtttgacattttaagtcgttaatgcttgaacgtggtagta

SEQ ID NO: 7359 - DNA, 2119 bp, Cucumis sativus
  Intron number 1 from transcript Cucsa.048210.1 (locus Cucs a.048210) derived from phytozome v7.0 (chr-ID scaffold0054 2; pos 3058404 to 3060522)
ggctacctactcgggttcttcttctcagaaacgtacgtccatgtagaattctgttaattttaaatgagttttaggcagcagagtttgttttcggggcaagaattttagtagttcttgctcattgctcagaaatttcgcaattcttagttagattggataaaatagttgggaagtaggctgatatttggatgggaaatttctggttatgtcatagctttcctcgggtttcattggctctttctgtttatatccctaaccaatgtttttttatggaagaagtctaactgaggtaatagaggaggcaagaggcccgattcaaattctagatgacctacaacctttgtggtaggaaggataaaaggatttgaagaataaatccttcagtcctatttttagtaaaatttctggtaaaagagcttgttggatcacagactggaagaaggaagcaaaaatctcttggtttaatgttgccaaaccattgtttagggatataaactcaaagatatcaaagattactaggaaatgaaattacaagttctgaataaataggtgttttggtttttggaaactgttccttttctcctattgttttatggccagtttcatctttgttaaggaaacttttgaattctcagctaaattctgaattttttttcttcagtgtcaaaaaacctgttaatcatatatatccttattgtgaatcatataaatcaacgtatttttttcttagaaaaacaaaagaaccaagtgtttctttgtgaaatatgagaagaactagtgagtagacaaacataaagttcaaaaaataggaaactgaatacgaaatcattgtcaaacaggatctaaatgtttcgggtgtgatactattggggtttcatgaagttagttggtaaagaggtactgggtagtactactagagtatgagctgttttcaagctttaacggaagctgtcattttctatattctattttgtaaacttccattttggttatgagttacattcagcttttttatttgatcataggggttatttgaacaccttatgtgagaatatttactctcatgaaagaccactatttgtaaactgtacgtggagtttcatgacaaatgtatgacagattgtgtaaatatggtagaaaaaacaagatatatttcagattattattatttaacataagaatcttgttttatatggttgaacctttccctccctgtatcctagcgagtagcgactactacatacaattgtgaagctaggttatgttttaattgtcactaaacaatttagatgatagatgtcacatagtggtttaatattctaatctttcatttgtgcttatgatgctttggagatttagtaatttccgctgtttaataatttaacggattttacatcctttaagcgtttgcattaggagagttagacaaggtaattgggaggtgtaccagtgtatataaactgattagagagactgtgagagggagagagcagacctcttatcctgccacttgtatgggatacttatcctgaatagaggttatgaaatttctaccataaacacagaattttcattaactaacaataaaagattttgggccgtttgtttttaggtggcaaatatgaatgcttctcagtggtgttctcatcccaaattatttactgggctttctttataggatatttgttggagttagggaagctttatattctctcagtttttaatttctctcccttttgaaatttgtatctttggaaagtagtctagaacaaaaaggaaaaaacagtatcaatcaagatagggattcatcattatgtaagaagagtatcaacttgtagggatatttctttataacccagatcaatttcagttttgatagacgtgatcacacgtgagtatagcatgctctatttatgcataatgctaagcgagtggttttatctccgaggatatctcaatgatcgagcctttgatgaattaagcattttttatattgtagaaaggcactgcatttttcttcagacgtctaaagcatctaaacttgtgattttttctgatgagaataatgagaatggctgccttgtttgatttttcttgaaggttggcccgggtgaggtag

SEQ ID NO: 7360 - DNA, 832 bp, Cucumis sativus
  Intron number 1 from transcript Cucsa.310170.5 (locus Cucs a.310170) derived from phytozome v7.0 (chr-ID scaffold0299 5; pos 43626 to 44457 reverse strand)
ggttacctcagccgaagtgacccaggtttgtgttcatcccttttgtttttgtactcgactttaaagtgcaagatcttgagttgtttgtagctgtatacgttgtgaacttccaattttgggagcttgttgggtagttgggattttggaatgcgagcaggttttatttgtgtattttatatgcttgcttcaatgtaggtgctgttttggtttttagcttggaactctgttctgcattttcttttggaattctgtgtttctgaagcatttagagcttgtttgcagaatggtctgtttttgggttttggttttctctttactctattttgactttagaaattttgattgaatttgagctgggagtcttcggatttcggttgctaggttagaattatctcagtcggtgaagttagtttcgtgtagctaagagacttgggcgtgttttcagagattttgttgtccttttctagagatccaggaatcaggacactccacaggtcttgatattctttgctaggccttccattcaaagctgataacttatttattgtcggtggacaactaaccttttaaggagcaatcttgtatggttattttaaatagttcatcagtgctttttttaccctactgatagttcactagtatttctatttccatggtgacatttggttagaaggcatggagcagccgttcaatgtttcgtaacttgttcaacttttgttattagcatgttttcaggctagggtcaagtccttacttttgtatgttttcttattttttttgtttccctttcttcgcaggacatatttactgcttacaagcagccttttgcaat

SEQ ID NO: 7361 - DNA, 930 bp, Cucumis sativus
  Intron number 8 from transcript Cucsa.319400.1 (locus Cucs a.319400) derived from phytozome v7.0 (chr-ID scaffold0307 8; pos 98410 to 99339)
acaaggatttcaggtaagtgaagtgtattgtctaacaacataagatgcaaatagtttacgatctattttttaatttttcaggaaagtgtggtagtttaacctagctctacatttagattccaatttgttaaaattgagatgtcttcatattcccaatttagtttgttactgttttgttttgttttcttcgttttttcttttctttcaggtctgtattaaaaaacataaatattgttttggaccactactttaaattatgttcttgagactttcatgatgacatgtcttttacaagtgccagtagctgaaaggtggagctagtcttgtaatgctaaggaaaccaaaagtttgtgaactacagaatcaaaataaattgagaaacagaagtttcaagctgtgacaattattgttaacttcatatttttttgaaacagaaacaaattgatataatgagaagagactaagtctgaagatgcaaggatagaaaaaggaatgaaatgtaataagcataggaaatctgacgactaaaggtcatgggtcaataggtgcacctggacatcttaactaggttgacaccgtagctctctcaattacaaaatccagccattcaaactagcaaaagaaatgccatatttatactaagatttaaaagcattccggttaagacaaatatcctggatagagtagtttataaaaatgttctctgagagcaccaagaggatgttaacttcttgttggattttctttggctccaaattaaatcaattatgggtggacgggtttctgtttatgcaactttccagaagctttgcatttctaccattcctccgtgtattggatatccattcttttcttgattttgtgttgcgtgagtgaatggatgagtttgatctccagttattgatttttagattatgatttgcagatctg

SEQ ID NO: 7362 - DNA, 1334 bp, Cucumis sativus
  Intron number 1 from transcript Cucsa.365130.1 (locus Cucs a.365130) derived from phytozome v7.0 (chr-ID scaffold0361 1; pos 2643667 to 2645000 reverse strand)
tcgtctaattcatccaccccataaaccatctacaggtacttcctattctctcttctttgttcttccacaatttctgtttttttttttttttataatttgtggttgtttgctttccaatctgttcatttctggtaccaatttttcctttttacgtcttatattcagttgggttttcaagatttcgtttttttctctttcgtgggtcaatttctgctgagttacctttctttgattgtttcatatggcgtatggatgtaattttttatttgggttcatcctgaattggagatttttttccttaatcttacacttctttttttcggatgttgtgtatttcattctgattttgaatttctcttactttctcgatggaagactctggttctcgtaggcatttggtagtggtatgaatcatccatctcttgaggcaattatggcttctttttccttctctattccgaagtccattttgttaattgtttcttgtattattcttaaagatcactcctcaattttgtaatcactttattccttttcttctttgaaaaaaattatcctagtaaaagattacttttgtcaattctctctaatttaaatttatttgacgttgtggtgttagtttctggaacatctcgaggctgctaaatagtaataataaattgattttcatccaaatagttttgttcagccaatcagatgatatgtgttttttcaatgaaatcaagttgtgtagagaacaagaaacaaaactaaagaggataaatctctgttgttacctactcaaaagaaatgaaatgttgtctagagaaccattagtcgtagctatgctccctttttccaacagcttggttagcaagctagatagagcacactcgacaagtttattattggtaatataacctttctaaaagatcattgtgttgtgagatcaaggggtatttataaatttaggcgtcgtcaagtagttaactttgggttggatattgagatttgtgtctaatccaagaagttcaagctcttaatgtgtggacgtggactcctattattctggtgaaggtctctgatactaacaagaataccagttaaaatttaatgcttgttcaatctacttctcttggcatgtattttaagattttaaatccacttgtttactttgaatgtgcataacatgcacaaatttttcattttttgctctgttttccccccattgttagtaaggtaaaatactattgttcttgtgcaatcactagtaatttttttgttataactatgaaaatttactaaaggccactgttgttgatcttagtgaaactgtcctatcattgtgcaggctt

SEQ ID NO: 7363 - DNA, 2361 bp, Cucumis sativus; identical to SEQ ID NO: 7270
  Intron number 1 from transcript Cucsa.002600.3 (locus Cucs a.002600) derived from phytozome v7.0 (chr-ID scaffold0003 3; pos 112692 to 115052 reverse strand)

SEQ ID NO: 7364 - DNA, 6355 bp, Cucumis sativus
  Intron number 11 from transcript Cucsa.236650.1 (locus Cuc sa.236650) derived from phytozome v7.0 (chr-ID scaffold020 18; pos 509873 to 516227 reverse strand)
gagaatcattggatccattccgagtcttagaggtaatcatatactgcattcctcaagcaatcacctatttctacatatataaacatcaacttcctcgatttcataaagttaacaaaagatgtcagttaagaaattcacctaaagaagattactgaaaaccgaaagaaacttcgttagtttttccttttgcatcttctcgtttttaaaaccgaattttttcaaggtaagtgaaagaatacaaaatgacaaaagtagaggctagagggatctcctttcccatatcttggtctcttaaatcactaattgcaaaagcttaagctagtggataagggaaggtaaatttaaacatatatcgctaacactcctcacttgtaggcttcaaatatttgagaggcccaacaagtggaaatcaattttaagtggggtggaaacaataatgcaaaggtttaaaacacatgaactctctagaccaatctgctttgataccttcttaaattaccaattgactcaaaagcttcaatactaacatcaaaattggctaatctaccgattgtctatgtccatttgaagcccgccggtgaacctagcaattagctaatctatcgattgtggaagaacaagaggtggaagaaaaccccaccctctccaagaacatcaacccaacgcttgctgtccgttgaatcttcattggaaggaatttacgtggcacttactggttaatgagatatgcactgttccattgacaattggaaataactacaaagatcacattgtttgtgatgttttgagatggatgtgtggcaatacaatgctcaaaccttgcaaggggagagagaatacttatgaatttcaatggatggacaagaagatacctttgaccaaaaaggatgatgaaggtgtccattcaacaaagaagaggagcaataatttgtttactacaataagtggaaagaagttgctaaaggagagaggaggagacatacaaggacttgttactgaaaagtgcgttgaagatgaagatcgtgaagttcctaaagaagttcaacaattgcttgatgaattttcacaattaagcaagaactagagggattaccacctttgagagatattcaacatcacgttgaattaattctgggggcttcacttcctaacctatctcattatcgaatgacccctaaagagtacacgattcttcaccaacacttcaaggagctcctaaagaaagggcatgttcaaccaagtttgagtccttgcatggtgtcaactttcccaagtccaaagaaagatggtagttggagaatgtgtgtatatagtagagccatcaatcagattacaatgaaatactgtttttctatcccaagaattggtgagttacttgaccaacttggtggtgcattgttttttccaaaggttgacttgtagagtgggtatcaccaaatacgaatgaggcccggtgatgtaactcaaatgagagttttttattaatgtttttgaagttgtgaatataagaagacaactactctatttatagcaaaagtaaactaatcctaattaataagagaaacttaacaaaagtaaactaatccaaatcctaatcctaattaataaaagaaatttaatcctaatccaaaataataaaagaaactaattataatcctaataaaccaaaggaactcatcttgatcataataaattaaggattttaccataataccctattcctactacatcatttctatccttccaaaaaaaaatcatcctcgggttttaaaacgaaaatgaaggtaaatgtaaaaaagtaagtcgattgaatggagacatcttggagcatccaacatcaataatatctatctttgtattgccacttcttttttcttcgttgattcttgcataaattgcgatttatacataaattgtgatctatacaggatcagtgtagcccaaaattcatcttcatccttttaaagaattggttcttcatttttgtgtactaaaacatcatttttgattggtttgttttcctctaaaacactgtcgacttcatcttcatcgtccagagtaggtaattcggttgctctgttgtcaacaattttcacttcaatgattagagtttcaatcatgttttctttcgtgtttgaaattttgggtggaatgttagatacctagattagtatagggcaagtgtataaaggtaattatatttgttggcagttagatggttataaatagaaagttgggaagggaagaaaggcatgaagattttggtgaagataatggactgcaatattccttgaaagaaaggaagagcagaggattagggttcctttaagtgttcttgagtttccttttacttgttcttttatattgtaatttctgttgaagatatcaataaacatagacactatattggtgttctatcaaattggtatcagagcactcatttcctgggagatcgaaggaaaacggcaatcacataaactctggaatccataacaaagaatattgagcagttggggattcaaatcgaggagaacaaccagcagatgttaaagtaaccaaggcaaatgaaactcttgatagacacatggccaagttagttgcaaaagggtttacgcagacctatggtgttgattactctaaaactttttccccaattgcaaactttaatactgctagtcttgttatctgttgctgtaaataaagactaacccatatatcagctagatgttaagaatgtgttcttaaacggagacttggtagaggaaatctatatgaaccctcctccagggttttgaagcccagtttgatcatcgggtttgcaaacttcagaaatccttgtatgggctaaaacagtcatgagagtatggtttgataggtttactacctttgttaagtcccgagggtacagtcaaggcactctaaccagactttgtttatgaaagtcttcaaggttggtaactcactgtgttgattgtttatgttgatgacattgttttatttgggaatgacaccgctgagatcatccaactgaaaaagaagatgggcgatgagtttgaaattaaagatttagggaatttgaagtatttcttgggatggaggtattaagatcaaaagaaggtatctttgtatctcaaaggaattataccattgatttgttgatcgaaacaagtatgctaggatgtcgtcatgctaatactcttaaattcaactataaactggaaaattcaagtgataaagttccaattgagagaaaaatatcagcgtcttgtgggaaatttaatttaattgttacatactagaccagatatctcttatgttgtgagtgtcattagccagttcatgatgtttctctgtgaggaacacatggaggcagttaatagaattttgaggtacttaagaaaagtcctagtaaaagggtcgatgtttaggaaaatcaacatgagagctgcctatactgattttgattgggcacggtccattgttgacaagaaatccacctttggttgttgtacctttgtgtagagtaatcacgtaacttggaggagtatgaagcaaggggttgtggccagaagcagcgctaaagctaagtacagggctatgagtttggggatatgtgaggaaatgtggcttcaaaaggttttatctaacctaggattatgagatgtcaatcaaattattctgtgataataaagcagctattagcattgccaacaatccagttcaacattatagaactaaacacgtggagattgatcgatactttattgaagaaagactgaatatgcgttccttacatccccttgagccaacaggttgattttctcaccaagggacttctcagacagagttttgattcatgtgttagcaagttgggctgatcgatatctatgtcccaacttgagggggagtgttagaattagtgcacttggcccaaggaaagatttaccttaattttcttttcttttttatcataagcttgttgtttattgatttttcctctttgtatcttttgttcataagaaagtcagattgtgatttttctcccggtactcaaatttccatgttactcggtatctattttgtttggtcgcttttaataaaaaaaacacgagtaagaaccgaatccaaaaatttatcaagagtagaggtgtccctgaagagccaaacattctgttcaccccaaagagtccaaaagaacctcaggataatagccaacaaaatatttcgctcggtaccaccaaagatttaaactaccgtgagtaaaaggcgattcagagctttggcagccgatgaagcaccaggattaggaagaggaaagctgcatataaggcatatgtcgttgtaattgatctgctgcttttatgtctcaaagactgagtttccataagaaaattctaatatttgaataattgttcttctaaatagtagagtagatcctcctacaggggatcaacagatccaaccaaatcaatcattagaaatttaacggtaaaacatgatgatgggtccaatggccagatccaggcatcaattgtaggcctatgttcaacagatgttaagtgataagatacccattcaaaatttctaagtcactaaagattacgacagatgtgcaaatccgatgtgcaaatcccatgagctcaaaccagctatccatatgtcatataggttttttcttctttattattaactaaaaaatcaaatttactaaagcctaaatacaaaatttcttgtatttaagggtctttttggtattcccacttcaactactttatgttagattacgacaaatatgaaaatctcatgaattcgaaccagctatcaatatatcagctaggtttttccttctttattaataactaaaaattcaaatatactaagcctaaatgcaaaatttcttgtgtttaagggtctttttcatatttccacttcaactatgcttttcttaatgtactacttatatacgtaatgcacctcacaaaaaaaagtcacatttttttttggtgccttgcacttaagccctagaacactattgctctttattgtgcccaagctttaaaaagcactagtcatatttccttataggctataatagccactttacagatgcagtagggagccacagcctctttggtaaccattttaacatagaatgataaatagccactttaggagtgttctcttctatgctagatttccttgctattctgcttctgattgcttttaaataattatattttagatttgagataaggtgctctagacctttgaaagattcttcattttcttcttttggaaggccttagtggagtcaaatcatctaattggcaaaatggaagtcggtctttaaaagtcttttagaatggaggcttggaattggtgatccacatcaaagtctggttttaatagctatgtggggctggtgataaatgcttgaagttaagtctgtttgaagtatacttttgcaaaccacccatggctgtgattatttcataaagccacatttctggttctgaaagtttgttaatagattaaatttgaataagtctacatggttagaggtgatgcccaacagaatattccaaaggtatatcgacttaaaatatttttatccaattttaggaagcaactacaagatgtctcacacagaggtggagttgttgtcaagagattgcaagtgttttaagtgttagtttgctgcatttttctgctgatcaaggccttcctttccgaaatttggatggaaagatttttttttaaaaaaaaaaggagacgggtctcaaattttattaataaaacaagactcataatacatgattgatgtacaaagatcacacaaatgaagagattgagaatcaataggtgcactcggacatctcaactaggttaacatctcattagcaccctcatcacatccaacaaaatgaaactagggaatttggatggaaagatttaagtgccttttccacaattctatacaaagttcttatgctctctttgatgtggctcgattaaaggctttctcctggtgttctagcttctatatccaaatactttgaggggttttcaatcatgacatctaccatagctggatttcttattttgacttaataagttcgctgttttttttctacttcctggttgtatgtttttctctgttattttgtttttgctatgtttttggagcttttattttatctctttagatttgttttattttttttgctttgaatttcatgaatctttgagcgttagtctctataacttaatgaaaagtctcagtttcctttcaaaaaaagattatacttttttatactttaatatttggtttcaaatgcagactttgtccccaaat

SEQ ID NO: 7365 - DNA, 5317 bp, Cucumis sativus
  Intron number 3 from transcript Cucsa.162500.1 (locus Cucs a.162500) derived from phytozome v7.0 (chr-ID scaffold0114 4; pos 2107759 to 2113075 reverse strand)
tgaaactggagactttcttcagccttgcattgaaggtacttgaaaatgttgcttctttggtccctatttgcatcctcctttttggggttttgttttgatcctttgtgttacatttggatttccctttcagctgctctcaatttaggctgcacacccagaaaagcttcacgaagccaacgaaacaatgtttctacaaactatctcagttctaggaatcaggagactcccagcttgtctaaggctcccatggtaatgaagccttctcagggagctgtcactaatactcatcgtgtcccctgtttttggagtttggccaagcctgagaacaatggcttaggcaattcaggcttcggactcaaaagctttcttcctgctcataatttcacttctgaaaagttctctgctttttcaagcccacatggtttgatagaaaatgctctcccaccgaccaagttctccgtctatccactatattacgggaatggtgttcagtggcaaggacaacgctctcacttcaatgttgctcctcgaccggttgctacatgtttggattctactgatggtggcatggagaatatgagggcctctggtacaatgttagcaaatggcatcacccaaaatgaagtaatatcttctcttgctagcccatgtgatctagcattgcggttgggtcctctctcagattcaagctcaagctgcaaaaacaaaattccgcttcgtgtgcttaaagttggtggttcaagcagttcacgagaggaaaccaaaactgaggattgttctctagtgatggaaaggaagcttcccttgtttcccaggagaaatgcatatggcctatctgagcacaatacatgggggaatagtctagaggacgagtttgtctacgcagaaacaagggtgagaaaacgaaaggcagattttggtgattcattcaaggaaagacacttaagtttgcttccaaagggtccttccagcaggttcatagactgaatcgttttccattttgaaataaacaagattatcgacgaagaagctgcaactatcggccagttcattaagcattgtccacaactgcaatgtaagaatgaagttcaaaaactagattctaaatttggacgaaggaaggaatttatgcgaggatctgttggacccatggagtagattacttaaatttatgaaggggatgatgttttaacaaagaagcaactggtgaggttattgctgtgcaaatgggggacatagaggcattgagccaacaagcttacttatcatattttgggagcaatatgcttttgttctgtgggtcctttactttttcatctttgttcttttttttggaaagagttgaattgatcattgaatgtttggatggaagtctctgccttcaacttttaatgggtggtaacattagtgtctgtggggtcaaatagataattcttgttttatctatcgttaaggtagacaaagctaagcattctgattttagttaaaatttgctttatcaaattaggaggtttaaatatccaactccccacaaaagatgtaccattttcactcacagttttattcttgtcctctggagaaccataacaaaaaagaacaaaacaatacaaaactgcacaaattagatataatcctgtgtttgttggttgtaagttaaattctcatcaatctttaaatatgaagtcactcgttatgttcatcaaccggtggagcgagtgtgcagagaatttcctcgcaaacaagaacgggtgttgacgctgatatgtaccaacggatacaatccggccgccgccccttcgggttcctattctaactttcattctccttccaccgtcgccgtatctcggccgggcggttctcaaaccacgtatgagatccggtcccacgtcagatgccacgtaggtgcgtgggtggccatcgacactgccgttccagttgacgtgtgttagcgtagctggcacaagccctctccggtcccacatgctgagtaaggtcgggaaataattctcctcggggtaacacgtgtccagccgcacacaaggcaagtcaaactttgaccaaactgtcttatctctcaccactatccacgcgtgccgccgcctcaacacccaaaactgcgacccaatacgaaaatccgccaatttaacaaccggaagcatcacatccgggccacgcgccgcccacctgtcgtaagcccctaactcacttttgagaacctcgatgaagcttttcttcgaccgaatcagcgttttgtatgtgaaattgaaggaatgaagagggatgcaagagggggatagaagagcgaacatggaattagcagaatcgtgaagcagggcgtgagcaagaaggcgacgagcggcagcggaaagagaaggtgaatttctctgagtgggtttagaagggatgacccggttggcaaatacgccggagaaaggcgggtcgtaataccgggtcgggtcggcatggatgtagatattgaacagatcaggtgggatattttcgaagaacaattcccaaagaggagcaaaaggaagaggtgaattagtgagaaacaagaaggccaacttgtgtgttggcgatggggtagagtttacaccggcggctagtgggaagagcaaatcatcatcctccggcggcagcggggagggcggagaaggggtaattttgcgatggatgttggaggtgtaaagagattgaaatggaaaaataaaagggtaatcaaaggaattgatggtggtggtgggggtattgatggtgaagaaaagggctaaggataaacaaagaaggagagcaaagataagagagaatggattagggaagaacatgattgtttgttttagagtgagagtggttagtgatttgagtgaaatagagggggaagatagaggagtggtggagaacgcgtggcaagcatgtagaagaagagataggagggaaagggaagagtgagaaatgagtgtgagggagaggaatgattggttggaaaaggtgtggagtgtattgttgtatggagcactgaatcatatctaatgcaatgggaacccatgttgacgtggattaattgggtgatggggcctcagattctttcatgccttattggtatttgttactaatatttcacctaactccttccttttctgtttctactttccatacatatctataaaatactactttttaactccaaaattacatcattctttcttcttcttcttcttctattattcattttgaattttgaattcaagtttgaaatttgttttgttctataggtgaaattagagttggtttaaactgataccattctcaaaagtttatatctaatttatttgtcattaaatatcaataattatgggaatggacttagcaaaattaacaatttgaatgcccattaataaccatttacaaaagtgatccattgtagcaatgaattctagtacactaaattgaggagacagcgcaataatttatttataatgctttgtaggtctttaaaaagctacaataatatccttcatgaaaattggacgatatatttattactatttcagatggctcaatcgtctgattcttatcccatgattattgaattatagataaaaaaagaaaagaaaaaaagaaaaacagaagagaactttggttttagatattattcaaaaccataacaatattctttaagaaaaagacagtttggttgataattcttagattcaatgagagttggatagaaatgtatagccaaactagagttatgagtaaaaatatatttgtaaccgatattagatgttaatcaaaattctataaatagtcacaaaatgtaaaacatgtagtttgtagttttttgaatgagtcactagagattgatattataatcttaaaatggaatgaaaactagcataagttagaacgtatgttttaaatggtttaagtcagtgagtatgacttatcccagtagatttgagtggaggaaaaaaaaacaaaacattaaaatcattaaaatcatgtgagggcgataaggatggaaataatgtaaaaatacttttttgggggtttgtgcaaaaagaaaagagttatggtgggcatttttgcaaaatgagattgaggttggggttagtttgggccactgattgtgacaatatcatcataattctccccctgttacttcatcaatggtcagaacttttgagaaagaagccaaagtaaaaaaaaaaaggaaaagaaagaaaaaaagatcgatggggtagaagaaggaggcatgtggatgagtgggggacaccccaaactcttcaatttttattaaaaaatccttcctttcaaataattgagctttttacacgacgaactttggtgaagaagaaggggggagctgggaaacacacacaataaatcaatacaagtccctttttttcccccctcaagtctcctctcttcttcttccttgaatcttggaatttcttttgcattttgttgggtttgaactttaggggaacggtcttcacaccatttttctgttaaaaaaaaccccacagccaatttgtcttttactgtgttcaagatgccaagacgagggtcaaggccttatgagtgtgtgagaagagcttggcatagtgataggcaccaacccatcagaggttctctcattcaacagattttcaggtttctctctattactctctgtttctgtttctgctcatttttttttgtttctttctcttttgaatctctgatggaacttttttgtgatctgtgttgtttgctctgttagggttgtgcatgagattcataactcctccaccaagaagaacaaagaatggcaagaagtgcttcctgttgttgttctcaaagctgaagaaattttgtactccaaagccagttctgaggtattctccttctctcttcttacccttctctgctgcctcatattttctggccagctgatttaggaatcaaaatatgagatattttgcttgcatttgtaacttctaaaactttcggcactcaagtagccaacaattcatgatctttgtttaagcttaattttttcaaagttatagtctctttttctttagataggttgaatatatggattttggtacccttcgataccgcttactggacgccattaataccataataaggcttgatgagagcacagaaactggggactttcttcagccttgcattgaaggtacttgaaaatgctgcttctctggtccccgtctgcttcctcttttctggggtttgttttgattcttagtgttaaattttgatttacctttcagctgctctcaatttaggctgcacacccagaaaagct

SEQ ID NO: 7366 - DNA, 3961 bp, Cucumis sativus
  Intron number 14 from transcript Cucsa.159140.1 (locus Cuc sa.159140) derived from phytozome v7.0 (chr-ID scaffold011 42; pos 1199744 to 1203704)
tttcaagtttggcatctttaatagatccattgtaagtaaactgtctagtactttttttttatggctgtttgaggccaaagttggtcataatagtttgtagttattatactttgtggttgttatattaatatggctgtttgggaccaaagttggtcataatagtttgtagttattatactttgtggttgttataataatatgtgaagttgaatagtctttatttatggtgcaaactatttcagcgttggtcaaatagtatgtgttggtgtaaactatttttgttttagtttaggaagtttatgtatgaggtccatgttattttagtctgcatgtagggtgtgtctttgagttcctaatttgattaagataaagttcttcggtatgagtttcggttttagagttttcgatctatttttggtattgtattatacaagtcatactacctttaatatcgtattttgtaaatggaaatagaaagattgttaaaaatatgttggattttaggtcaagttattcattgtctatttggtcatttttaggtgtactaatattgttgaatatgcacaaaatagtaaaagtttattttatccgttaagtaggaaaactatatatttggaggtgtacaaagctactaatcctctaattccgcaatattgcacaaagaaatataactaggaatgatagttgtgaaatatttcacaaacaaatatatcgtcaacttagatacatgatttgaaaaagaaatgatgaaaaaaaacgtggaagccaaaagcgcagaactgatggtgggcaaactgagcacttttcagcacttttttaatcatctttcaaatcttcatccaattgaaacaaaacattagcgtctgtttctacaggctctgaatgcggcagacccgctttcacatggaagatgtggaagctcaatgtggaagatgtggaagctcaacgttcactagttgtctcagaagaacatctgaattggttccttgcagcgatcgtagagttagtcagtggccttgaagatcgattctttatgaaatttgggaagttagaccatgggagaacgaagctctcaatgtttagatccgaaaatggatgggttttatgttgcaacttctggtctgctttaggtggatgctcaaccatttgggttttttcaggggatgacaaaaaggggtggttgtcctttcttcagatgttggaaagattcttatcaaatttggaatataagaaatggttttcgagccattgtcttccagctcaactttcttcacagattcaaagtttatcttgtgtagatagagttacgtcttttggttttactcttcttgacaagaataaaggattccagtgtgttagtaaaggagagtgaagttcttcaggcctcctctgttctgaagtcagaaaagcagatttgtcaggcctctgttcggacagcagcaaaacagagcataatctcaggagcacaaaacttccatcaattgagtaatcagaggtcttcttactgggttcacaaggataaggacgtttctgtggaagatttcaaccgtctatggatcatctttaggctctttgtataaaatgattggaagaaaaccgttaaaactttagagaatcactttcaaccaaaaatcagcatcaaccctttgtttgcatataaggccttaaaccgtctttcacgagggaatttggaaaatttgattgagactcttggtaaatagcagcgttttgatacatgatcttgacataccatgccccaagatttcccgagatgaaagaattttgcctttaattcattcgatctcgggcatacaatgcaccgagatggtccgagatgaaagacagaagtttagatctacatgatcttgtacttcattttaaacgatgactttcaaatttaaacgatcgtgcatgatcttgggccttagttgcaccgagataccctgggatggaagaattcttccttttgttattggatctcgggctttagtggcatcgagatggctagaatgaaagaattatgcctttattttattcgatcttgggaatacgttgcttcgatatgtgcctggatgaaagacttctacctttagttatttgatcattggctttaattgcaccgagatggtcgaggatttaataaattgcaaaaaagatataactcgaaagggcatatatgaaatttatgaaaagatgattgcgtggcatgagtttttcttattttgttagacgatcggtaaatattatgggtttttgttacatttatgtaaattactcagaaaatagtaatacaagagaaggaaattgaacacttttgctttcccaaatgagaatccaaaagtcactctgccattaaacattcacttaaattcctctcagagttaactctgttcttacctcattaaaggaatgccaaaaggcaaaaagttagatgtttggcacttagaattctttgaagtacgacagcttcctattgggccattagatgttcccaccccatccaatgctcttcagagtttgcttcagccaggatcccatcaactcttcatttttaggctctttctcctcttctgctctctactccttagcaagatcagggtcaagattaaaatcggaaagaaagaaatcttcaaagatcttcccaaattatcttaagccctttcccaagtgtttcatttgaaggaaaaaaataaatgatccttaagagccaaaccattgaagatcaagctcctgacttgttagaggcaaatcgtgtcttttctcattgttcctcagttcattgctgcagttccaaggtgtttttagaggctaatccagttttattggaagctatttgcaccctattgcatgctctaacccgcccgttttactaagtcagattctaattcctctcatcttatgtagtttaagtactcctgagttttctttgctcaacttgaaggtgaaactttttaggggctcttcaagcaaaacacctctagaaagaagggcgagttctctttcatctctccttttagcgttagtagtgaggaaatggaacatattgataagtcaatcgagcttgagatgtagaggcattttgagcctttacaaatagatcttaatgccttatttcaatatgaggaagactcgaattttgaaaaattgccctctgctactcgcccttttcctcagtcttgcaaaataccaatcatctaaagtcaatagtcgctgattgcagacttattctagtttgattcttcaggcgttcattgtagtccctctagttgttggaccaacttatgtctttccctaatttctcttgtgtgggagaatgagtatagccttgttgttgtggtagcttgcttgatattgtttttgtgtttggtctttgtttttctggcttgccaaaggggagtatcttctggggagttcttttggaatcaggttttgtttgttttggaggatttcttcgagttctcctcggctttggatggtattgaaaagaaagttttgaggcagccagttgcttctccttggcacttctctttctactttcatcttgatgttttggacgtggaagttttaatattcaaatgggctgctcttgagagaaattttaagctatgctttgttttttgcgttgtatttagttttaggttgccatctttttatgttgcctaagtatagttttgttttcttgtgagattgtattctcccctagttctttttgctagtataatactcttgtattttgagcttatgtttcatttattatcattaataaaaagccttgttttcgttttaaaaaacagaaaaactatacttcttgttcttgatttcgtattatcaattcctctctttttagctttttgcataatttggatatggcttaccttttcctcggtttgcacaaacatgtaaagtttgtaaaactttttgtgcagatctacttacctgtacgatacattgcgtcctcgac

SEQ ID NO: 7367 - DNA, 1703 bp, Cucumis sativus
  Intron number 15 from transcript Cucsa.132630.1 (locus Cuc sa.132630) derived from phytozome v7.0 (chr-ID scaffold010 37; pos 531783 to 533485)
ggctatagctggcttttctttgaagcgaaaatcaggtttgtctttacatatgaccttgtattctaaaaggtgaaactcaattttataaaaacaagttgcttacaaactcattccagtgagtacacttttttccccacaagaaactatgagctagaaacttttgattgtgatttttacaaaatgatagacttcatggttgacttctttccctctttcttttgttagaaatacagccctaaatataatggtacatgactactcagtaaggaaggacaatatatacaggatacaaatataggaggaaactgaggtttagtttgggcactgtcatatctaaaataatttacatttatcgtgcttatagaaaaatcagctgtaatagacaagtgtttagggaatttcaattttgaaaagaatggataaaaaggaaaaatttagaagcttgttggtaagtctaggtgtttgatctcaaaaagctattgttgacccatttttacaagggacatttttaaatatagcataatgaaccaaaatattgcaaaatttcatattctatcaatgatagcctctaatagaatttgaaattttgctatattttgtaaacattttcaacagttttgccatttataataattttcctttttaaaaaacaatgtaaatgaaaatggggttttatttacattaacattgcataaattttataaaacgctagaaatagttaaatttctcttgtaattactttcaacgcctgtcaaattgattagagcctgacagcaaagaaattaaagagagagaaaactggagtagaaaccggaaaaatagaaagggaaaagttttattttaacaagaaacatcaattatgaaaaatgaaagagtaaaagtacaagctaccaaaatctaccagaagtagacttcagataaaaataaataaagcagcatcaaagaaccagaataaaaagaagacaagaaacccttaccatgaagcccctcaattatcacaaatatcattaagtgagtaacacccaaagagcttcaacaaaaggagaagttgttgtaccttatataggggcagatgggaggatacttaagagaaaaagaaaacggaaatatgttagtggttggcctaagaccaattccttatgaacctgactccaaaactctcatgttgagttgaaaattttcgttggggccaatctagacttatactcttcatgagctcttctgtggagagccggagtaaaactgtcagtattttgcatctgaatggaaacatagattagggatataattttaccttcaattttttcctctgtgaaatgttggttttcgtccacatgtttcatacaattatggtcaactggatttgtttctatacttgctttagcttgtttgtcacacacttagacgcatgtatgcgtgtctatctacaaagttacaagggcatgcatatccatacattgtaaacgttccatattatgcttgtgtgtgcccatgcgcattttggcatgcatacttatatgttcagactgaggcagtgctattttgaaatgaccaaggacacaagtaaaaagtgatagttaacagataactagagaataggtcgggtcattgttatttttttaaaacctattttacatttattttccatttaattgaaaaaatatttggaaataaatgagtgatcatcatggttgcagctgttg

SEQ ID NO: 7368 - DNA, 1046 bp, Cucumis sativus
  Intron number 6 from transcript Cucsa.076350.1 (locus Cucs a.076350) derived from phytozome v7.0 (chr-ID scaffold0078 9; pos 728430 to 729475)
tctttcatccttgctgaaaagatttttcttggagggtaattattcttatttttttcttttcattacaattaatattcctttttagtgtatttaaggaatatctttttagtaatatcctaaaaaacaatactataatatatctaaaacatcataacaatatattgaaaaaaaaagttcattctaattaattgaaaatattatttaatttggatatataatttaaaactctcaaatttattctatatttttctttacatattcccattagtctatatatttttttcaatttttttcaaaattagtaaaattgacaaattagtaaaagatctattttttttataatttttcataaaaaatattaacctaattatccaaatttattttttacttcaaattagctaaacaacaacaataaaataataattttaattcaagagaaaataatacattgaaaaatcgagcaaaacagaactaacctagctaaccaaatcgattaaatcgttgatggtttgaacatttatttaactgattatagtagtgacagtttggttgaaaatcgattctaacgacctaatgtgatacatggttaaagtgttttgaaaaaaaaataaaataataactttaacaatagagaacaaaattcagtaaaaatataaagagagaaataatataaatttttaaaaatggaaaatgggaaataaatatagaatgagaataacagaacgtaagaaagcactaagactcacacatgatacgtaaccaccaatcaagaatattcacacccccaaaaccactttattcttttcttctcttttcttttctatatacaatatatatgtatataaatcctttcacattctttggaataaaaatctctactaggaatatttattttaagaaacgatttttttaaaaaaaaagtaccaaaaaagtacttttttagcacatatatataataataattgcaccatgagattaatttgtattattgttgttgttattttgtgacagaataataggatccatcttgatagtatttgggttat

SEQ ID NO: 7369 - DNA, 3377 bp, Cucumis sativus
  Intron number 7 from transcript Cucsa.123160.1 (locus Cucs a.123160) derived from phytozome v7.0 (chr-ID scaffold0100 0; pos 457442 to 460818)
cagcttgttgtggatccatttcaaattcttgagaggtatgcccaataaaattttcccttgtccgattgtcatttggcttaaatttttcgtagcatggtcattattatgctaattcttttcctttttgcaattttttgtatccatctacatttattttggattctgatgaaatgagaggtaattttgattgaacccatggtttttggagggttaggaatcggcaacctaagattacttaatgagccactgttagcaaaatggttatggcatttcttcatagaaccacatgttgatgttgtatatgacctggtggtgagtttaaggcttgaaacaaaaacctccaggttgctagctttgggtttttgtttattctcaaagtttgttacatgctttgttggggatggttcaaatactttactttgggggcgattcttggtgagagacaagctcttttgtgtgttatttcttcaacttcatcatttttcagttaagttcctgcactctttgcttgtatattaccttcctcttattgttcctgccttctttgggcttttgatttcccctcattgaccaagaggttttcggaggtggttagcgaaggaatgatgaaagaccaaagaaaggaggctttggaggtatgaggggatctcagatttggagttgcagcagagaaggatattgacagagattgccattctatgatagaaaaggtggtcctaacctctatcttttggcacaagggaggtgtgttgtggtaggattttatttatttatttatttttaagcttgttgctattttgtgaggagtttagttggagagtaatagtagggtttttaaagtgcttgaaagatccttagaggaggtttgagaggttgggaaggtggaatgcttctctatatagtagtttattaatcagactttttgtagttatcaactagattttatttttttggattggagtctatttctctgggtagtttagaaactccttttgtcggtttgttttttatatgcccttgtacttcccttcatcttctcaatgaaaacttgatttctaataaagagcatttgtaacttgtatggacttataactgcaaggttagagatagtggcagtttttcctttgctttctcaatttattcataatgatgttggagataagcgatgtgatctcagctctgctttcctcactctcctcctttctctttaagctctgaaggagagaatcatgtctctaaaacccatgtcattcaaagggtttttctcgtagctctttcttcccgtgtttatccaacccatccttggtggggggttctttgttttcttccgtttggaaggtgaaaatttctaagattgagttctttgcgtgacaaatgttgcatggaaaaattaacacctcggattgaactttgtgtagagggtctttaatggttgggtcactttatcatactctctgcgggggagttgagggcttgaagacatggagcatattatgtggagttatgattttgctctgttgtctgtatcaatttcttttagggaattggtggaggaggttttcctccactcgttttttcataataagggcgtttcttgtcgcaatctgagtgtgctattttgtggggctttgaggatagtcttcaaagggtgttagagctcccttttgtaattatagtctgttagcagtctataattaaatatatatcaccaacactctccttcacttgtgggcttgaaatatttgaaaggcctgacaagtgcaaatcaatcaattttatctcacatgtgggcttgaaatatttgaaaagcccaacaagtggaaatcaattttaattgggaggatatgacaatgcagggacttgaacacaggacctcccccaaccacctactctgataccatataggcaaatttaaatatatatcaccaacaaaagggtgttagagctcctatgttaatgtttggatgtccaaagattgtattctcctccctgtggatggatctagaataatgtttaagggagggtgagtctattggccacgtcttcaatcattgtgatgttgcccatcatgcttggaactttccaactggtcttgtgggaattttgttttgtatgccaaggaagattgatggttggcttgtggaaggtttgagtgcttggaatctgaaatgtaaggtgtggttaattgatagctacgcctttcaagctttcttatgtcttttgtggtaggaggttactgctctttcgtctgaatgttttgactctttttgtaatgttatacaaaatacaacatctttggtggattgcttacacacaaggttcttttgtaactatagtctgttagcagcctcttttgaagtaggtgctttaggccgtttctatctttatgattgaatttactactccttttgaggcttcttattaaaaaaaaaagtctctttgtaggctcttttgtaactattcatttgatctatttctcggctagtgactgagtccctcttttgtagtttggtttttttttggaggctttttttttgtttgtctatgaattctttgatttttatcccatttgttctaccaaaaataaaataggttggcacaacttttaagttgtttctctaattctcttctagattaaatctgatttagcaagacaaacaaaatgagattgtgagctttgtttggctacgatatttaaattttattaatgaaggaaatttgcattttttttcaatacctttctatttgattgtccaacatttattgagcttttgcacctattttattttatgaatccaatttgcactgaaaattgtttaatggatttgttattttatgtttagttggatgaccaataaattgaacaattaagactgtaataacaaatgtccccgtgttttctttagtgggaaactttgaaaaagtttggatggatctgtagggctcatcatttagagaatattttttatatcctcttatatcataggttggttgacataataatgggttcttccaattgcttcttatgcatgatgtttctctgtcaaccgcttttgattattttctggtctgattctcgtttgtaggttttatgtcaatgtatgtttggatgttgggttgtgaatgataagttcattccgtactgggccagacactagtttatatacattctaattatgaataagggttatctggagccccagatcaccccaaataatctcgtcactcacctactctcttgctatttatacaacatccagtactaatttcccatctattgatcaatatatcccttaatcctagcatacaaatatttatatctaggtacctaacactattattatgtcaattgtcttacaggttcttgtggcgtcaaa

SEQ ID NO: 7370 - DNA, 2418 bp, Cucumis sativus
  Intron number 4 from transcript Cucsa.272600.1 (locus Cucs a.272600) derived from phytozome v7.0 (chr-ID scaffold0250 0; pos 1076686 to 1079103 reverse strand)
aagaaacatcttttgcaacacaggtacccctcatgtttctgtttctttggaatcttccaaacttttgtttgtgttgaacctattcgattttttagttgtaagaattgaatgaaacttatctaatgactccattcttcagcataggtctgtaggaagatagtattattgagaagtaaatatgttaaagtagcaaacgttaagtacggaaggataagtgtatgcctacctcacgtagctcctgcctacataatgctcataatgtttaatagtgtttctcataccattattgcaattaattaaatattaggatttctttgaacacgtaggcttgtttctgaatgtgtttcaatggtagtgcttgaaatgactcgaccgctaaactagagtattttggatatttagagaaaatttaagttttttttttcaaaatataaaaattggcaaggacatgatgagaaatatatggaagttattagcattatattagtaacatactagtattatattagtattaacataatcagagggggcgaattagtaattggctagtgagttggttagggttttagttataaataggagtgggttgtgtggaagaatgtgaaaaatattgtgggatttctttagttgaatttgagagagcccagccctctcaaaaggttagggattgtcttgttccatgttcctatgatattatgatatatcgtagtttctttattgttattgcaatgcatctttcctttctttagtgttctttgtttgttcttgttagaaggtatcctaacacaatcctaccctgtttggtaaccattttgttttgaaaattgttggtgatgcgtaatttttttaaaaaaggaaacagagttttcattgatataatgaagataaatgaacgattataacaagacaacactgagaaccaacacaaggacaagatcttttggttcttttgctcattgtacaattctcttatactataaactttaatctcattattattattatttaataaaagacttgttctctaaaaaaccaacccagtgactccaataaatggatacaagagagaccaccccgaagtagaataaaaacaagagaatcaaactgaagaacaataattacaataaaaggataatatcaaaccaaaaaacaaagcagaacgaagacagactatcaactacaaaagccggggaaggagaaaaagattgactttagagcagacttgagagggatcacgggcaaaacttcaaggaagaaaacatcttgcaaaaaactgaatgactttctagtcagacttgttagtgatatataattaaatttacttttacctacaagcttaagtttttgggttaagatggtatcaaagtaggaagttatgtgttcaatcctttgcatcgttgtttttgccccaaaattgatttgcatttgttggactctccaagtatttcaagcccacaagtgagggggagtgttagttatatataattaaatttaccttcacctataagcttaagcttttgggtcaattggtattcggtgatttacgatgatatcagagcaggtggtccaaggaggtcttgtcttcaaaactttgcaaatgttgttttcttcccatttgattttttgcttgttgggctttggtgttaaaacttttacctctaactttcttcctttattttctgcctttcactaattgcaagccaaattttgaaaactaaaaaaaagtagctttcaaaaagttgtttctttttaaatttgtctaagaattcaaccatcatatttaaaagagatggaaatcattgtaacatgtaagacatagagataaaatagacttaattttcaaaaacaaaatggttaccaaatgagccttagttttggttgaatgattttgtatttacacataagtatcgaaacgtgagccttgtttggtgcttactacactttttgttggtaactaatcttctcactttgtaaagtactctttttgctgcatgataatttcaatctattcgtgtaatactcgttaacagatttaaaattaacatccttgccaataaatggaaaacttgtattagttcgggtactaatatttgctctactttcaataatttagagggttaatatagtcgtatataaaaaaattaattcaataagtaattgaatttgaattgcaacaaagaaagtcagttgttaattagaaaacattggagcctataacgtaataattgtattagtttccagtgggatttgccatctaaatataatacccggattagtcagatgttccttctactgcgtaaccacgttgtttggtgctccaacccattaccttctatctgtattgatagtcgactttgtggattagccttttccttcctttcattcttgaaattaagacaattgtactacagagtccct

SEQ ID NO: 7371 - DNA, 1731 bp, Cucumis sativus
  Intron number 1 from transcript Cucsa.096130.1 (locus Cucs a.096130) derived from phytozome v7.0 (chr-ID scaffold0091 9; pos 1881515 to 1883245 reverse strand)
ttagcaggactgttcctaatctgccttattggctggtgagtttaatttttatctttctctttgtcaagatctttctttcatgttctatgtgttcttctggcttcttgttttcaagaaattgtgggctttcttctttgttggttgtttgatggttttgtttgctgttcttgattaatgcaacagtttggatttttggttgctttgttattagcctatgatccaagtcttgatgtttctctgttaatgaatttttggtttctgggagatcttgaatcaaagctgcttagtaactggttataacttgattgataactgattagctaaatgctgtgggttttgatacagaagttactttgtaagatttaatcctttttttgttgatatgatacaaacaactgaattaataatgcaaagagttgataagaaatccccctaactcatctaaatagtatcatacgaaaatgattttttcaatcagtaaaaaaagaggttcctattatttccttccatcaaatagaaagaaatagtcttacactgaggtcaaatgaggttcggtcaagttaaacaatcatgatatatatatgactacatctcttgtggaaaagattgtttatccgaatctttgtaactacataaaccccattaaagttaaatggagtgaacatacggatttggctaactaatccaataatgttgtcattatttcattcttttcccctggtcaaagtttttcaccaaaagcacagaataagagatgggtgatatgattgttgaataggtttagggtcaaaatttgagcaacttttagcagaattagttatttcattggcattcatctatatagaatgtcagccatcaaattttgaaatgaatgtatatggttggtcaaagtaatgctgtcaactttaattgcttcctttgtcgattttgaaatcaaagataattgagatcttcagatgatttaaaacgaaactaagcaagcttattgattctaatatggtcatgccatctcttgtggttgtaacttacatgcacaatcagtcagatgaaacttcatatgtattcaatggataaggtttaggtttacttgattaaaagatgaatcctactatatggcattcaagcaactttggaactccgtcctacttgattcccaagcttccttcatctactttccttcgaattctcacttccaatttttcattttgtgccattctattatctactaactctactacgcaacttcaattacattttcatatctttcatggttgattcttgaacgtctgattatagtttttgatagaaactagagaattgggacagaaaaggtatcccttgctaggaaaatacaataagaataactgagtaagtagagaaacttggagacgccattgagagagagtttaagcttaaactaccagacatttgtctgccttcatcttcattcattctgttcctgataattttcctaacagatttacccaacgagcataggtaaagcagaaaagaggcctaacatatgagtgcttacatattcatccatttgcaaagcttaatttcctttattctttcctagtctttgcagaattttccttagttttacttcttgatcttgtattcttccattttttctcaagtaacgttaggttattcatttagaaaaagaaaaaagaaagaaagatatagggcatgtgcattaaactttttatactgaatgtcatggcagct

SEQ ID NO: 7372 - DNA, 3958 bp, Cucumis sativus
  Intron number 19 from transcript Cucsa.307810.1 (locus Cuc sa.307810) derived from phytozome v7.0 (chr-ID scaffold029 78; pos 83630 to 87587)
gttcgattgttgaagtgtataggattgttgaggaggtatggtttgttactctcttatattctttacgacactttttccaggttctggttgtttgcttgaaattactttattatattaacggtttctattacattcatgtgattctttttgagggtgtgaacactggcctacattttgtgcttgataaaatgtgtcgacattggacagatgaagggacaagatgaaattgttgattaaatttgtttacgtcaaggatgtcaccgtcttaaagttttattattggtttgcattgtagatatatattcttttatgtatgtttttttttagaaacagagacaaacttctttattaataataagaattcaatgtacaagagaattatacaaagagctaaataaagaagtctaaacaagcgaaagaagaatagggatcagaaggtgcacccggacatctcaactaggttgacacccccttagcaccaaaacatcatatcccagctaaaactagcctattacaacaatgagaacaaagtacagcctattaccatgagagcggaatccagccaatacaacaaatctaaaaaatcatcaaaaactagaaaagaaaaaaagccagaaaacagatgagccttattagtacagttaagatactactgagaaaacaaaaagaaagcatagaaaaaagctccatggaagtccagatagggaacaccacatcagaagtagtcctaggaaactaaatgagatagaaaagctgcccaattgaggcaaaggtcttgagtggagtaatttgcaaaattcttgtttacagagcaccaagttgctgcattacattgcactggattgaaaatttataggcttgatcttttcttgtcttgaaagatccgctgattacgtttaaaccacaatttcactaaaagagcttttaatagatttaaccaaatcagcaaagacttttaaggaagaggtggaccctccaatagctaaagcaccaaggagctgagggacgcgtcgaatacccgagcaatatcaaagatggagaagaaactattccaacaaacagaggaaaaggggaaaagtaggaagagatgaagcaatgactcattagcattcatacggagagggcaaaccgaaggttggaggcacctgcttggagatttcttttgaagaatttctgcacaatttagggacccgaaaagcatgatccacatcagaatgttcactcgtcgaggacagtttgatttccatagggctttaaagagttttttatccattggggaggcagaattcaggtgggttgagagagatttaacagagaatctaccttattgtccaattgaccgaaccttggagtcatcaaaatcaaacactttttttggcgcaagaagagctaataaggaactggaggctgctatttcctcatctttcaagcttcttctaaaggaaaaggaccaagagagggtagtatgatcatatcagtaactgagccttgtcgtgataaagcaattttggaaagcgaaggaaaaagttcctttagagtagagggaccgacccagaaatctgtccaaaaaccaattctgctgccactgccaagtttaaggtgagctaaatgctccactagcctccatattctagaaatgttaaccgaagggctccacaggctatttctagattttcccaaagtgaaccaatcgattgtatctttgccatggataatacaaataattttcctccataaagctgaatcttccttagaatatttccagccccacttagcaagcaaaactgaattttgggttttaatgccactaaaccgagacctccatcttttaaaagaagggaaaccaagctccattttactagaggattgatcttgccgcctgcaaatctttcccaaaagaagttcctcatgattttttccaatggaagttgccacatgaactgaaataagaaacaaggaaagatagtaagtagggaggctggccaagacagcattacataaagtttgccttcctcctccagagatattaaaacgcttccatttgtttaatttcttatgaattctatcaatgactgactgccaaaactcccttcgctaagggtagcctcctagggggagacctaagtagagaataggtaatttttctgccttgcaacccagatgggatgctatttgaaacaagtcatcatcacttatatttacaccactaagggctgatggtttggtcagattgaatggacattgcaaaaagacatctgcttggtgcactctgaacaaggagttcagcacatactctattcaagatttgtctttgaaaagaaaacagaacttttcattttttctaaaaggagacggtctcaaaattttataataaaatcgagactttatcttacacactctattcaagatttgtgtttacatgagtagtcgttttcagtttgtagtctattttgtttgggtttttttgtttttgtttttatcagattctttaagatgactatgttgtggtttggtagttggttatattggtgtgtattttgattttagatatattgttcggattgtatttgcatgactttggatttccttttcgatcaaagtcgggatgtgatgagagtactatgagggtgtcaacctagttgagatgtccgggtgcacttactgacctcatagactttgatctcgtctcttcattgtactcaaacattactctgtatattcattttcttaataaagaggcttgtttccttgtcaaaaaaaaggtaaaaaagcatttttttggcgttcatctcaagttttttatggctatgtgatcatgggttgaaaacttgcttcatactaggttagacatcattcttctttgctctgtgttcctgggttgaaaatttaagttctattgttatggtaaaaggagctcaaagcactcttgtggagctttcatctaagcaaccaatgtattttgtgaacaaacaagatttttgaaaggataatttcactatgattaatctttcggcagtttcttgataaatttatcgcaagaagctacacttgggtttcttgggaaaaactgtttaaagagtttaatctaaaattttttggagctgattctagaggaaatgtgaggattttattaagaggttccagtttgaataaagaagctacacttctttcggaaaatgctgtgaaagctatattggcagaaatttggtttgagaggaaccaaataatctagggtcagacgggtcccgcgagattagttgagatgcgcgtaagctagtccgaacactcacaaatatagaaaaaaaaaggaaccaaatagtttttcacgataaatcattgggctgttttgatcaatttgttacagcacacgtaaatctcacctcctggtgctccctctcaaatctgttcgaagctacagaattcaagatttcaacctaaattggagagcttttatatttctatcctaatcctgttgcatattttactctttttttactttctattctctttcttatggttacctctctttttgtctaaactctttactagtcatgacctagtaaagattcattatcatggcctagtattgagcttattttcacctttttgtctttgttcttctggatatgatggggtcgctataggggtgttatcctagttgagatgtcagaggaaacttctgatctcttatttttgttagctcttgtatatctctcttgtacttagagttcatctctttttattttttagtaaagagatcctgattcgtttgataaatttatcgcaagatcttaattttgtgactatgtctggatttttgttgaggtggtcttaaatctgtgtgcatgtgtgcacgtgtgtgtatgtacccatcaagctcgattttcttattaacatcaaacatgtttggccattttgggcagactgtggatcaatttttttccctccaagtcccaat

SEQ ID NO: 7373 - DNA, 3744 bp, Cucumis sativus
  Intron number 1 from transcript Cucsa.267050.1 (locus Cucs a.267050) derived from phytozome v7.0 (chr-ID scaffold0236 4; pos 111626 to 115369 reverse strand)
gaagaactcttatcttgctctgattcttgagactggtattgttggttttctaacttctgtttcatgttcatcttttagtgtttgatcttgtttttgcgttttttggggttgaagatcttgtctgctactattgattctggtagttataccagttataaaacctttaaaaattggatgcttgtcacgtagatgtgtcaattgtttcctaatttctttttgctgtttttagtgttcttgttttttcaaacttgagacgcttgtgagccaactcattcgaggtattgtggttctcttctttgttttgtgcgtaatctatgcagagaaaatcactaatcaataggatgttcaaatctccttatcatattttattagcaggatatctcgttatgaatctattactacaattcatgagaacttgctgaacacgtgttatttcatcttcttcttcttgcccagctgcttttgaccagtgtagcttcttgttctcttctggaattcgatttccgaatggttaactttctgggtgctttgctgggtattatcttgattctatgtaagtggaggtatctgatggctgaaaacttttgaaaaagagatccaatatactctcaatttgcactggtgtgtccatatttttcattggtcctagacggttgtctggaagagaactgtaagggcttacggtttatgggtaggagtagtacggtactacgaaggcataaagataatattagttagtgtatttggttataaatagagggagggggattgaggtaagagaggctattgttgagtgatttagggcttgggttagcatactaaaaagaggaggaggtcctaagtgccttatacttggtttatcttttagttcttaatcctttacatttcaatattttcagttcttgatttttttaggtggtatcctaacattttcactagcacattctgagctgccatctgagcccggcttctagcctatgtgtgcaagcacagaactggatacggctgctgtaccctaccttccatcaggtcaaatgcacaccattgcccatcattaggggaggggaggcaggtgagatgtcaagtcagactctaggcgaacatgcttctattatgtctccctggttggtctatcggtttttacaaaaaaaaaagaaaagaaaagaaaagggttatgattagtacgatggattattttaatacaagtaacaaatgaacaagcgtagagaagttgtctaaaattgattttctaaacattcagtgctgtccagaactggtatgatatcctgattgcttattttctcctcaaagatccttttctgactcgactgtgacttgtacactggttaagtgaagtgctatagacagcgatattctacatacttgttaatgactccattttccttgattctttatctggagctttcatccatgagcatcatttttcttattaattagccacaaatatagaaggtagcacaattcggttggaattaaaccatccaagaaaaacaaggatgccttgaagaaggtagcacactactttgattcatccttcccggcacgaaggaagtgtgcgtattgttactactttcgcacctgaatctcctattacagtggaatgaaatccttcactaaaacttcttttcattgcatttcttccttttctacaatagtcaagcttattgcttctacacctgcaacttcaactggaattttgggaacatggaaagaaggctactttgaaagacattctcagccctctagaaagacatttgagcaactggacagtggctgtaggttctactttaggtgaaatatttctatatttctttgagagttttgaggtttaggcatgggaacttaacgaaaagaaatgtgtcgctccctttttattaaataatggtggggttttcccttggaaaggaaggactaatggctaggttataaattactagtatgggctttctccccattgggattcgtgttcagcttcatgtattaatgccagttccaatagtttctggaaatcaattttaggtttgagtgatttgcttgtttagagaattaatcttgtggtggggaatggtgttaattggtgcttttgaaaggagacctgactccattttcttttctcaggttgtttgcctatgacaagtttcttgcataactacttgggtggctatctgaatttctgaaacctcaatcttgaaaggaacatgaatgatgaagagaccttggagtgggttgggtacaatggctcgacaaagattaaggtctttgtttggaaatgtgtatgaacaggccttagtacttaagacaaagttcaagcaagaaactctaatcacttctcccattattatgtccttgtaagactgcagaggagactggcaattacctcttattttgatgcccttttcctccgtctttggttccaggtcttaagtatctttggcttcaatatgatttccagtactgatgttgttaggatacctcctaataagaacactcacgaactaacaaagaacactaaaacatagaattatattacaatgtcaagaagaaactacaatatacattagcacattagaatcctccaaattcccccattaggatttggaatgccttgaattcgttacgtggaactacgaacaacctagtaactctttagttttcataattgagtctaattacttctttatgagttatttatgtttgacccaaggtaaagagaagtgcaatatatatactctctaacctagtggcgccgttttgtattatgaaatattctctcgataatattgttctccctttgctccatggcatagctaatacattgttagtgaaccacgtatatctgtttgtcgatctttatacttgttttatattgcttaattgttgatttcgtagcataggaaatcaccacaaaattcttggcactttgcttccaacccaaaccctctaattataacaaacttactaactaattaatattttgtcccttataataaccatactaatattctactaataatcctattattcccctaactaggggtcttacatgcttaactactttttttgtctttactgttgtgtatgtcgtcccaaaaaatgaaggccagactctcctcacgaacaggactatttcatttttatgagaaaatgatccaaattgttttgcacaggagcttatggtttccagagaacctttctacttgtaaaattaactttttgtgacattagtattttaactctcttaggagattaagagagcgggtggacaggtagtggctaggtttagcgtctcccttttggactcccatcagtgtgcctttttgtaattatgaaagtggtcttggtttttttggattgaagttctgttttctagtttactatagaataatgctcaagtttgttttttgcatgcccttggactcttttgctttctcttttttcaaacgaaatcttagtttcttacccagaattataacaatatgttcttacatctataccaactcgaggaatttttttcataattcccctggctgccggttgtgttcaatcatttcattcctcgaacaaagtttgttttgaatgcaagaatggtatttttctgatgccacaacgttctgtttttttctcaagatttctaattaacgatctatcacttttccatattaaattaggtttgatttttttttctttaatggagtgataaatatgtctatgccttggaacagt

SEQ ID NO: 7374 - DNA, 1209 bp, Cucumis sativus
  Intron number 3 from transcript Cucsa.144180.1 (locus Cucs a.144180) derived from phytozome v7.0 (chr-ID scaffold0108 0; pos 595856 to 597064 reverse strand)
agttcttgtcacagctttctgcttccatttcagtaaacaaaaacttccataaccttattctttgaaacagagtatttggtcggttcggttggttccacaaatttggttttatttattttctatccaaccgaaccggaagaaaattacggccaaaagtgttcgtgtcgtcccctactcaaagtgttagaattaggtactaatttcttttgttcacgtttttattttatcataaaaatagataaatccatttcaatcctaaattttcaatattctatttttgtatgtatcttgaattaatttttattagaattgactaaattattataataatactccatctgggaagaaagtgtttttataatgaataacaaatttaaaaataataattaggtatatagtaatattttataagaaattacaaatataaataaaatttaaaatattattatatatttaattatttagaatctaataaatatagttgtgaaactgtggtcctataaactaaagagtgatgtagagggtggggtgggtagcatatgctctcggatctacattatttttagagaattgatattatgatttgattcaatactcttttggttggtttcggtttactattgaattttgaatattcttaacttttaatcaacccatcttcattggtttttactttgtagtaaattaaaataaacctttcgaaccaaactaaattggcccaccgactttttctctagggttaatttcgtaaggttttttagtaggatttaaatttgttacccttttggaacaaagaattggttggctttcagttttatgatcctttctaggcaaaaagtagaatgattttcactttctaattcactgggtagaaataactaaaagttacccagcaaatcatgtgcaatatgtttccaattcctttcatggtaacattcttcaacaccaagacgttattgatgttagactaatattatacgtgtaatttattgctaatatagttcaagaactagatctaaattttgctacatctatacatacttttaaatggtattatttttgctaatgctttccatttgatttaaacacaattctacaattgttattcattgtaaaacagagttactaacttcctcactggatcatttttatttgatacaataatatcatacagttcatccaataagttctgagcttcataagccatca

SEQ ID NO: 7375 - DNA, 611 bp, Cucumis sativus
  Intron number 1 from transcript Cucsa.147950.1 (locus Cucs a.147950) derived from phytozome v7.0 (chr-ID scaffold0110 7; pos 244206 to 244816)
gcatattcaaagcttctacttatcagcaccctcaggtttctgcttctcctcgccttcaattttccctttcttctctcttaaacagtatctccgataaatactcgaggagcaatgtctttcaaccacattgtttggacatgatttgagatttgttgctttgactttcaacaactctaaattttctttgttttgagattcaagattctgtggaattcgactatttgtttgggagtagattgtttaagtttgtaaaacgacggagtgacggagtgacggagtggatgttcaatgaaaccatgacgtagatcttgatactttaagttctgatttcatgttttagcttttagtttcttcatccatgactggtttgtatatttgtttccttatcttttacttctcaaaatgtatatagtaagtgaatgtgatgactgattacaagtaaaaatgaaccgtcatttcgtttgcttcggttctattttcttttagtagtttgttgtgctaaatggaagaatcttcagggaactaatcaaatctttagttttgtatttgttcaattatttatctctgaaatggtttttgttttggtttcagtggcggaggtctattggcat

SEQ ID NO: 7376 - DNA, 1299 bp, Cucumis sativus
  Intron number 2 from transcript Cucsa.029890.1 (locus Cucs a.029890) derived from phytozome v7.0 (chr-ID scaffold0039 9; pos 127686 to 128984)
ttatcaacattggacttagctccaaaacccgtccggtaaatttcattcctctactctcccatccctaataatcaatatatatattatttactcttctttattctttaattttgttccaataaataacattccaaatttatcaacaatctaaattcttattatataaatctctctcatcttcatatattcgtacactttttataatcatttattcctttatcttgcttttcattttcacttccctttcattccacgctaaagttttaattaataaattatgtatatataaggttttttcttttttatgttttgagtttttaaattccaaatcttttactccatcatattttctaagtgtgtctatacatttcttaattaaaaccataaagttttaagacttatattttaaaaaatattattttattattggcacaatattagatcgaaattaatttgatagcacttactattaaaatatggtgatgtgtttagtaattagacatttaatgattctaactttcaaaaagaaattaatttggcttccattaatggatgaactaaagggcagttttaatgagtaataataatatacattagatagaattagttaaccaattgataatggtctcatacttcttatcaatgagttgaaaattgtgtctacaatttcttattcatatatatgttggttaccaatagagataattctctatccatagatcataaatttatcttttcttttatctaatgagaaaatatagtatttgaagatatttcgagtaattattgtaatactttccatggctaggatttttttctacaaacatcctatttattgataattgaacaaataaaaaagtctagccacaaaataatagaaaaaaatcaaaacaatacttataataaagagaagtgaacaaaaaagaaaaactaccaaagaacccaataatgaaaaggtacaaacatccaaaactccttaaagagtgtttggacttatcaatatgaaaacatcaaaattcaaaacccatatatatggaattttcaaattttttatacttttaattaattatttaatagacacacacacacagacaaacatgaatgaatcaagaaatttggctaaaatcttaataatgttcgttttttttttttctaaaaaagaaaagaagtaatctaataaattaaaaaaatcggaaaatcgaaatagaataatttattttgtatgctatttatgtggttttgatacatatgctttatttgataggggaagtttcctaattttctattcccaattgagat

SEQ ID NO: 7377 - DNA, 449 bp, Cucumis sativus
  Intron number 17 from transcript Cucsa.147640.1 (locus Cuc sa.147640) derived from phytozome v7.0 (chr-ID scaffold011 07; pos 67718 to 68166 reverse strand)
gtgtcctctgtctttattgcactcttggtgtgcaggtaaatatgtcaatctatatgaattattattggtaatcaaagaatgtcaatctacactttattttccttttgtttgttttatattgctcctggttgcgtataaactgactagattgatattgtttttttagtcaataatttacagataattctcaggaatgatttgttttcttgttattgttatttttttcatgttagttggtagttcaaattctttagattttgtactatttgggtgcatgtttcatgtcattataacataatgcggttatataccttctatccttttgctttgttttctctactatcctcgctttttaatgtggttacatatcttctctccttttgctttgtcttcactactttccttgcttcttgtctcaatcatatgttaggtctttggaggcattgtca

SEQ ID NO: 7378 - DNA, 1037 bp, Cucumis sativus
  Intron number 1 from transcript Cucsa.240160.1 (locus Cucs a.240160) derived from phytozome v7.0 (chr-ID scaffold0204 7; pos 94688 to 95724)
ctctgttgtttctggcatcaaacgttcttctgacggtatgttttattctgtctattcaaatctcttggcaaaccactttaaaaaatgacgcaagataattacttgagtacttggagattggctttaagcttcaagaaaacgaggcaagatgaatgcgttcacctctggttcctgaaaacatcaccaatgtgatacttaaatgttttgatccttttcactggtctcatatgaccaccaaatggcattcgagattgtgggcctttggtttggcttcagtgcctcgattcgtgctgttcgctgtctttttcgttaatatatatgtgtgtgtgcgtccgtgtaaaacagtattttcctcgttttttttttttgtggaaatttcgatagaatttgtggcataaattgccacgatgtcctagtcaatttattttctcccatatctttggcatattggacgaacatcaacccgaacaatagttcaatttaagtaggaaaagaaagtagtcctcattcttttacgttctctctgttaaggacagtgggatttccatatggattctgtaaccatgtattttatttataagccatctttcttgtctggaggctgtagctgtagccaagagatggtggaaatctctagtgatccatgccgcccactatatcatatcctgatatacattagtttatgtatggggttggtgtaatggttcgttttcatcctgctgctgtacaactaagttccaccacaacgcaatgatgcagttttaattgatctgatttttcgctatttttatgtttaattctagttcaaagttcctaaattctataaatcttcctccagattgcttatttatatgatatatatttcaaaaatgttatatttatacattatctactatatttaatttctaaatctatacagccgaaagagtaattgtaaaactacttacgtagtaacgtacatgtttgtctttcttgtacatatttgtctactatgtacaatagtgctctacgatcagactgttttgggttcctataac

SEQ ID NO: 7379 - DNA, 1365 bp, Cucumis sativus
  Intron number 1 from transcript Cucsa.142060.2 (locus Cucs a.142060) derived from phytozome v7.0 (chr-ID scaffold0107 9; pos 382255 to 383619 reverse strand)
cggttttgcgacaggaagaagaaaaccacaggaaggtaatggcagtaataatagcattttcacggaaattcaagcacccatttcctttacccaccgcatccatggtgatcatcatcattcagcaacaatccccaaactctttcttccattctcaatataaattccctctcctcttcctctcttctcatcattccattcttcattccccctatacatttcctcctaaggtccgtccactctctttcccctcttttttccttttcatccattctccatacgatcctctttttcccccattttccaatcgagaatgatcccagggcttttttttgtagtcgatcccagtttttatttctcttgtttgattctttgtatttaatctatgttcaaatgtgggtgatgattggatgttaatctagcataccctgatgatgattttgctgatactcactctaatttttgtgggttagaagttaattctttgtatttaatctacgttcaaatgtagatgatgagtgagtgttaactttgcataccctgatgatgattttgcttaatcactctaatttttgtgggtcagatgttaaaagttttgtagactttaaagagattgacaaatgcttcctctgtctctccttgtatttattgtgtctcattccacttgtaatttgtgagctccatgtgtttctcttgttcttcttgctctgttttgaaacgtttgacaattgttcccattttcaaatctactttaccaaacatagatcatcatctaattttattcaatagagaggagaattcaaactgggatttgttccatacggtcaaatagtttgatctctttgtctttcttatctccgttttctccccattaatgtcatgcacagtgatgacttgaaatgttttgtccattttctaccttcttttttctgatttggaattctaaaatatgggttggtccagattattgacttttcaattgtgtgtaaaggaggagggagaaaaagtataaacagagcatgcaacttttcaaaacagtgtctgagcttccatggtcctttagtgattttattctcatttctgtatttccaatttaagactgtggaactctctcttccatttgccttcctgctaaatcaagacacaaattttgaaaattttgtcagtgtttggtagggtccagttgggtggttttaggaatttttaatccagatattagttgtagatgttttgacaattagtttgtgtaattaatccaattgcatttttgggtaaagtttgatttggataaaatggacggattgtttacatattttaatatactctcttgcagctgaagctaactaagatttttctgaaaactctgtg

SEQ ID NO: 7380 - DNA, 9335 bp, Cucumis sativus
  Intron number 7 from transcript Cucsa.184760.1 (locus Cucs a.184760) derived from phytozome v7.0 (chr-ID scaffold0127 4; pos 423535 to 432869 reverse strand)
agttcaacatcctgaaaatttactccgtaagtttcctctactttgaaaataataccttttcaggataaaggatacttgctagaaataatttgttagatcaccaattactctagaaaatatgtttaagttagcaaaacagagccaatgggagataaggaagtcggaagttatcaggacaaattacgatcacatatggattgtcacgaggctctttgcgtttgatgactggaaggagatatggaaaattctggaaacatattttggaacaagcatcattattaatcctttgtatgatgaaaactctcttattagcattggttgggccttgatagaggatttcatcactgaagtagaaagatggcaggcgatggggtcctttcatctcaagttcagttcgaaaagtgggataaatttaagcgtagcagatctttggtaatgaaaggtttaggtggttggctgagaattcgaaatctgcctatggattactggcgcagaaaagcctttgaagctatagtagattattttggggggacattgccgttgaaacacttaatctcatgaattaaaatgaggcttgaattcaggtcaaacaaaacttatgtggtttcatgcccaccattatcgaaattacagattttaatagaggaaatatttttatgaacttcggcgatattgagcttatggatcccccaagtattaccaaaggaagttcagttgttataaacttcaaaactcctattgaccaaatacgggtcaggcaagttatggaggatgaagaagttgatatctccttcttccttccaaatctcgatgcattcaaagccacgaaaacggccccttctttcttacgaaaccacttcgaggccttgaacctcatccacgacccaccttcggcaccagagaagaagacaactggggttgctcaggccagtggcgtccttctgttgccagtatacgaaaaggcacatttatagaagagagattttagccaaagacatccgggttgtaggttttgtggtcccggaactccttcaactaaccacaatgtaaataacacagaatgtgaaaaggcaaaggaaggaaataagaaggcacccaatattgatttagaaaacggttgctcgcatgacactactaaggaagccaatcagtcattggggaagtcaaacattaattctttccctccaaaaggcataattaatgctcatacagctggaaaacccactaagtcacgatttttaatcaacaaatccctttatttttggaggaagcaatgaagcggaagtcgaaggggtgcttttaaagaagaaagggtgttttttggttgctccttctttattgccttccgagaacgcaagaaactttcagcctgattcctttgatttagtccatttggtaagggtcagatttcaagttccactgttagaagatctctctcttctggtttctcagcattgtttgtcccctctgcaaaggccaagtcagtgcccttcaaagctctttctaaaaaagcctcaagcccttcctcttcatatgcgtatttaccttcttcatctcaagtggctttgaccagttccggtccaagagatacttccaaaaagcataaaaaatcaaagaaacccctgcttccctttaagacatttcccaagcattttgttagaaggaggctgaaggatctcttaaaaaggactcttgtaaagacaggtgttgtcagcccagattcctcaaaattctgcttttaaaggttaaagtcactcaaggccaagcctcttctttatcttcaattagggtggacatcctgaactaaaaaaagagttccttaagggaatattcaattttagatcaaaaccctaattcattggaggttaattgtacccggacccaagctccttctctttcatccggctctgtcctgtagagttctagccttctacattttaaatactctgttttttccttaccttcctcaaaagtaaaatttttgagaggctacccttgccaagctctgggccctccatctaaaaagaattgtgattcagattttgactctcctttcagtgtgagtagtgttgaagacaatcatttggggaagctaaatgagttagaggaccattctttgaaggacccattagaaattgatctcaacgatttgtttcggaatgaataactgaatgatggaaatcaaacctctgaaatcccctttcattgtaagcattgcgaaatcccaactcatttaaagtcggtagtaaaaaaaatgcaaatgagtgaatttgaggtctgatttcagtctctttttggtccaataattgggttctttgtgaggtttgaaggatgcagataaagagattgggattcaagtctattgatcacttaattcagaactagtactctccttagatttaagaaagtaaaatcttctgattgatgctgttagattaaaagttaaactttttggatgttttgtcttcgtcatcatgattatcagtggagggcaaagatctctaggtaaagatttatttgggttggatatttttgaagcagctgattacctcttcttggtgttccctcctttcaaattgaagcatgtagaatacaaaattttagtttgaagtgggcgcttttcgacaaagtgggtatattttttttgtattaagctctttactaatatttgaattctttgctgctttggtttttttgttgtttctcctttgtttagttttttttggatgatcttgtcttttgcttatcttttctctaggctgatagtagccaatacaaagccaaaatacaaagccaagataaagtagtcgccctatacaaaacataacacaaaatgagatcagagatacattagaaaagcagtcctcatttatgctaggatccgatggaagcaaaatactttaaaaaatcatgctgtccaagacttcaaagtggaagggctatgaaggctgggcagtttcagcaaaatctccagagagtaatcttgaaaaacctttggataaggaacaccatgagaatgcattcaggcaagcagattcaaaacggtcccatccacgttgaaggcttgataaaggaaacaggccttttcattaagagaatgaatagaaaagtagtgttgtgtacaatgaagagacaagatctatgtctttgagcagaaagtgcacccggacatctatctcaactaggttgacaccttcttagcactcatatcacatttcgatttagaccgaaaagaaaacactaaaccaaagcgaatacagtttgagcaataaatctagaagcaaatatcaaaatgaaacattataatgaccttagagtctgaaaatacaactgaaatagaatgagtactacaaacttaaaatatctaatcatataaggacgcatgccaattatattctaatttcttggatggaatatgcttcaaacacttttgctaaggagcaccacaggaggcattgattatgcaatctctaaacaaatcatccaattggaagctttattttggaattttctttgatttcgctcaaaccaaatttctgaaagtagggacttcatagcatttattcatagcaatatggcttctcttttagattgggatcgattacgagctggcgaacattctttttaaagtcaaaattaaagacccaattgatgttgaaggatccaaataggtaagccaacatttcttaataaccgcttcagagattgggacacctttgtcaggattaagaatattgacatataatatgtggggatatgggaaagaactgacttacataaagtgacacgacctcctcttgataaattgtatcttttccatttatcctattttccttgaattttgttgattactgtctgccaaaaagaagcttgcttcggatagccactgaggggcagccctaggtaagagaaaggaagatgagaggctttacagttcagcgtggatgcctcttgcagctcattttcttcaatgttaataccataaagtgcagatttttcgtaattaatcttctacctggagctccagtcaaagaattcaactgtcttcttaaaatttccaatataccatttttgtatttacaaatagttaatgtgtcatcagcgaattgaaggcagtagacatgaatgatgttttttcccatctttagcctatttaacaaggcacttaaaagtttgctgattaataagaaaatgaagggtgaaagtgggtctccttgcctaattcttcttgtagccttgattgtccctcttgatctcgttaatgaaaattgaaaaattcgaattaggaatagctcatgatccatgtgatccatctagtgtaaaagttttttttctatgagaattctctcgaggaactcccaatctactatatcattggccttttctaagtcctttttttctgtttagatcgatactcctttgcaacttcatttgctataaggattgaatccaagatttgcctccttcaataaatgtgctttgtgtggagaggcgattacattaggcatgatttttttaggcgttcaactagcaccttagcaacaatcaggtttgcaagcttcggaagtccttgtacgggttgaaacaatcactaacaacatggtttgacaaatttttcactttcattaactctcaggggtacaatcaggggcactccaatcacaccttgttcaccaaagtctctaagacaaagaaaattgcagtatcgattgtctatgtcgatgaaattgtgctatatggggatgacactgatgagatcgttcaactaaagaagtagatggggtttgagtttgaaatgaaggactttgggaatttgaagtactttcttaagacgaagattgctagatctagagaaggcatctctgtgtcccaaagaaagtacacccttgatttattagttgagacatgtatgttaggatttcgttctgccgatacacccattgagttcaatgtcaaactcgaaaattcaggtggcagggtttctgttgataaagaggaatatcagtgcctggtggaaaaacttatttacttatctaacactagacttgacatctcctatgttgtgagcactgttagtcagttcatgcaagcacctaatgaggaccacatggtggtggttaacaggattataaggtatttaaaaacaactcctgataaaggtctgagatttaggaagacgtaccgaagatgtgttgaagcttatactgattctgactgggctaaatctattgttgatagaaagtctacctcaggataatgtacttttgtgtgggacaatcttgttgcttggagaagaagcaaggagttgtgactagaagcagtgctgaagccgaatatagggctatgagttaggggatttgtgaggagatttggctccaagaggtgctgtatgatctctatcaagactttgaggtgtctgtgaagctattccgtgataacaagatagccatgagcattgccaataacccaatccaacatgacaggactaaacatgtggagattgacagacactttatcaaagagaagcttgacgatggtaacatttgcattccttacacacccttaagttaacagattgctgacatcctcacaaagggactcctcagacaaaattttgatttgtgtgttagcaagttgggtctttatgacgtttatgtcccaacttgagagggagtgttagaggttaggtcatgatgaaagcccatgggtagttaagatttactttgttcaaatatttttattcttttaattaggttcgtgttgtctataaatttttcccttttgtacctttatgattattagaaataataagattataatcactgtagtttttctccctgtatgatttttacgtaaaattatgtttgctcctcgtctctactttcagtataatgtttgtggcatcgctaatatgttgggtgtttggcttagcttgaaggaaatattaggatttcagagaggttgaacgatcatgtgagaaaatttgggaaggagctaaggttaacacatctttatggacgttgttctttgggattattgtaaccactagcttggtcatattcgcttggattggaacctatttatttagttacacttttgtcaccattttttcatgcctttgcactctctttcattgttcaaggaaagctcggttactagattaaagaaaaagaaaaaaagaaaaaaggttcattcacaaattgatgaactcaaaatttgtccccaacaaaaaataaaataaaatactgatgccactatcagaattctccttagtcgcactgaagtaaagatatctctttgaggttcttgtcttccattatattatgttagggggatcttctgtctttgttcctgttgaaaaaatcaaagtagtcctgatactactgttgagaaaatggagttgatagaaaaaaaatgttgctgagacaaaaaaatatctcaatgtttcttaaacaaagagaagaaagtaaattgagagtgaaattaaattttcttattgatgtagggaaaattgtttgatgcacagaatgcaaaatgtgtaacaaaaggtataatgcagtatacaaaattgtgatcaccgacagatttagtatggatcaaggagggctcggatcaccctcaattcttcgttcttaaaatcgaaataataccaataccagaagttagtctagtgataaaactatcttccagacccctctagccctaggttcaagctccatcccttaaaatttttagatctgccacaaattttgatatgtattttaattgagatatcacccttttataggaacaaaggtaaacttaataactataggagacattaaaagtataaacttaataacttacaattaaaaacttaaaaaccaaaaactgaaaaataaaacaaacaataataacttggggaacatagatggtaacttttccaaacaatttacatataatagcaaaaaaaaataaatgaaaaacacgggaggtttaatttgttttataataccgaatataccctcaattttccagtttgatcaatcgccaattcatccttgcgctttctcatcgccgaccttgttctttctctgctttcttcttctcagctccatcttagcattcccaagagctttaatcaatcttttaaaatactccacctgtttcttccccttcttaatttcgacatcaaattctctaccacatcggacagtgtcatttctatttcctataacatctccctaattttattatacaaatcatctcattcaacatccaagcaattcatcccaagaacttatcagaaattcaaatctgattgaattgaagtgaaagttcagagggaaattaatggagtagaagggaaaatgatatgaatcaaatatggagagagtgagagacaatgataaaataggagaaatcgaaagaggaagaaggatgggttaaggattaataatagattttttgtgataacataagagtcaatttgatttatcgtgaaaataatcgatctctttccaccacaagccgaccaaattccaacaatgaaatccaacaacccagataatgcaatcttactctatttattctcatatctttaaccttcttcttactgatctccttcctcttatattcattttcctcctttgtttcttcttctgttggacagttagatcttccttcctcattagtgatagaattctttcatggttggtcactatactcttcatcttattcattaaagagtcatttccatctttattcttcttagattaattgaactagaatagttgttgaacacttcctcaattattatttttttgttttagtagtttctatattacttactgataagacttttatcggtctttattagtgatagactttaccagttactatcactgatagatactgataaacttttatcaacctctatcaatgatagattcattgtctatctgtgatagatagttataaataactatcaacgtctatttaagatagatagtgatattgttttatcacttaatcttccattgtctatgattatcattttaattactattgtgaaactagcaacaaaactaccaattctatgattatcattcaatcacttggtctatatcacttatatcacttcagttataaaagtttataactttctatcattgatagatagtgatagacttctattataatctaagaaagttgtacatttttattattgatagtcaatgatagacttctatcaggcgtctatcaacttctattaatgatagaaagttgtacacttctatcattgataaaatattgataaacttctatcactatctatcaataatagaaagttatatacacttgtatcattaatgaaattctatcactctacttcgtttaagttaccctcaatgttttgttgtatatcatcgtgacagttcgtgacaggtgattacttttgttgcatgcaaaaagaacctaaggaagaaaatgatgatatttattctctattgatagacaccgatgtcattgtccatgatagtgataatgttctatcactatctatcactgaaagacggtgatatgttctatcacttggtctatcatttgaccttccattgtttattattgtcattttaattaacatatttatttaaaagttttaagaaaactttttagaaaagaaaaagaaattcgggaggtgaaaaaactggattttaaaaaaaaactaaatttcaaaaaaagaaaaaacttgtgaactgggttcttgaatcaaaattgaaaatagaaaaaaaagttggaacccagctagtgacaaaaagaaattataaaaacaaattggtgtgcaaatttgaaaagaagaagaagaagaaaaagagaagaaaaattgttgaagaagactggttggaagaagcgaagattaagatggagtttataagactgggagaaatgggcgattaatgggcttgggctgttcttggaatttcacctatggtatagttgaaacgggtaggagtatataaaattttgctattattgattgtaaatagtttgagcttatttgctatttttaaaaatctccctaataacttcaagcattgaatgaaattttgaaactaaaggtgaaaaggaaaaatctcattactcaacatttccttttagttaccgttcgttttctttcctctcgagaaagatgtttcaatttttcctcttctgttattgctagtgttgagggtggacatcgttttgattgtatatggaattgtcttttacaacatacttttaattattcaatacttttttcttcatgacccccttcagcaggtgaatcttcagaaagtgagccaacaattcct

SEQ ID NO: 7381 - DNA, 9088 bp, Cucumis sativus
  Intron number 1 from transcript Cucsa.012630.1 (locus Cucs a.012630) derived from phytozome v7.0 (chr-ID scaffold0016 4; pos 296531 to 305618)
ttgttaagccaggtattgttggaccttcatttctgttgccttatttttcttacttgtgcaattgctgaatggagtgaagttcaattctcctatctcgatattgtttagctctgaaattcgttgggattaacgtgtaatgggtttcagaaggtaaattaagtcttcaactgtctgatgggatttcatttggggtgttttatatttaattcttgttcatctggtattagaattcaagttatttcgtattttgtttaagtgaaacctggttagtttgatgaacaaaagtttctttttcttttttgatgaaaaatctgggagtaaaaataaagaatacaaaagagttaacaaaaatcacaaaccaaaaagtgggagcataaacacaacgactaacgacccaacaagttgagaaagagctcaaatccaagagaataagacggagggataattaagaaagtttttagagatagatacctagaaagacacattaaacttggcaagtgcccacaccactttcctagattttacattcctctaaaatctagtctaatattccattaagaaagaagaaagactagcatgccagagagtatatcctttatcgtgaaagggtggaatgaaatagagccttctcgatcatgtgccaaaaatccttgttactagccaagcgatgcgatatgtctccaagatgatatttccaaattgttacgccatgtcccaagatcacttcttgcgatcaaatggagacatgagtcacatgactgtctagacactcaacgcatatatccccgcgagatagcatgctaaacgcctagtaagcggaattaactcaactttccaatcttaacacaacttgaatctttagcttttattgcctagtttaaacttaaatccttaacttattaagcgatatgaatattcacaacgtaacataacaacaaacttctctttattaacttaataacatgcgttctataattctttctcatctacaaagaactataagaaaaaggcttccaacacttagtgcaactttcccaactttcaacttctggctaacgcctcaatgtgtagcagctcaccttacccttctttaacttggcctcagcgccttgtcacctgaggaagggaaacttaacacataagtcaaatacttagtgagtgataaatttagaaaaccttttggggaatacaattcaatctcttaaattcattttcatttgcataaataggcctcaacgcctcatttcaataaaccatataaatcattcattagtcctacttattcctttccaccaagaacatgaaccatgtccatgcataaacttgggattcatttcaccagcatcccttggggaactccagattcatttctcgttgcttatgctattaattcaaatgcatttggccaacttctcaatgccttgtggtctacaacaccaccatggtttcttttactcattatgttgcacataatagctagcttattgataggaatagggctaatggtttactcgcatacaaacatcacaatcatcacatagaaattttagtttagaaactttcttttcaataaacaacatcaacatcaatatcattacaatacacattaaacataaatacaacatgagactcataatgaatgctttcaaaacacttatttcttttagaaaaccactcactaaaatacttagccttagtttccttcctttctaaacgactactccgaatcccttcttctcgcctaatgcttccttagcaagcaacagaatagttaggaaattctcagaataacaactctctttagatccttcaatcctattgataccaatcttaaattagatagtcatcctttagcttctcttagctcgccagctcctacttaacactttagacgtgccggtttacttagcttctcaaaccttgcttaagtttaactcaacacgtaaacggctgtctaatcaaggttagaaatttccttgaaatacttaactttaaatgactactttcttctcgcgttaaacatcaaaacgcctaactttttgtgttgaacacatacttctttatcgcattgctcgacttcaatgcaaacttccaaaacgcctaagtcttcaaaacgccttcttcacacttatttcaaaatgacccttctattccagacatgggtctcacacaaattgagggagaaactggcattttcaaaggatatgattgaaatcttcagatgcttacctcttcctataaaggaaaaacaaaactgcagacgtctttctacaaagaatacacctttgtgacctcaagaagggagaagaatatattggaatatgaaacttcagacattattctattgttgaagttttgattgctatacagaaaatctttgtttggatgataaatggtctcatagatgatatgtgagaggggaggaaagttaagccctgtgtcagagaagatttcagaaaaaaatttcaactggctgtacgtgaattaatgttatctttgttgaaatgagagacaatttaccctaaaaagatccaagaaataaatctgaggatgctggtagcgtacacaaattttatattgttccatgtctttgtggtcctttgcttcatgatctcttcttggaacataacagaagaatttttgaagataaaatcaccccttcagtgtttttatgggatatgtacaactttatgcttcttggtggtgtcactatttcaatgatctatttgtaactatcctcttggattggaaccctttatgtgtgggtagttctcttgagtggggattctctcttctcccagcccttagactgcatggatcttgaaacagagacacatccctctcgtttcttatatataaaaaatgttcaatgtcacttatggttgcatgaatcttgtaaatttgaccatttaatgttgtttatttatttatttttgcactctttggtttcaggacctgtagtggcagaggctatgtttgtcaatagggaagaagttcctgtacggcctatatacagagatccggtaagtcttctgtgatttgaagtgcttgcaattctggttcatgcatgtggcttttcgtcgatcaatttggtttacttctgaagcttttgtgatggaatcgtgggaaaaggctgcaggaagtttagacttttgttaagaaaaaactatttgttcaagaactagtataaatctatgcggatgaattccaaggaaagtcaaaacttttggataatattttaaaaaccaagtttgttggatttgttatgttgtctaaattttaaactttatgttcacgagtgtctgacacatgatcatcaaactcaagttttgttaaatagtgtcagctcatgttcaacaaatatttaagtgttgaagtatttgatggatgtcggacatagacatgaaaatgtatctgtctgtgcttcatagcaatgaaggatgagttttcaacattttctttcatcaatttgaataaaagtggcgccgtgtataccaacattttcgtctttcgtttttttttctagatgaaaagtcaaagagctacttatctgttctggttctttgaaatgctaatccaaatagctaccagtcttaacaagttcaaaaattcttccaaagtgaaactcctcaatataaacaaacatagaacaattgagtgagaacatctgaagagcccaaccaaattggaaactgttgacattaagtgagatatcaaaaactcacagaaagagaagaaaggagaaacaacacctaaaactacaacaaccgttggtagattcactaaggggtgtttggcaaccaacaaattattaaggggagttgagttgagttggtatactttacaaactcaatgtttggcccaccaactttaaatgttggtcgggttgagttggctattttaccaacttaactcaactcaccccaaagtctttccagttctttattcctccaatgtttctaatagctccacttattgaccattgtcggcaactacctctaccacactttggtaacatactccaacaaccacctttgatgaccaatttcgacaaccacattcgcataagcaactccaacgacatactttgacttccacctttgaccaactttgacaaccaattctgggctctgccaaccactctgatgacaatttattgcaactaactccaacgactacctttgcacaagcaactttggcgaattattctaacttctacttgtgcaaccaactctgggctttgccaatcaccttcgacgactacctttctacaagcaactttggtgacatattcggaattccactttcgcgcggctaacttcgatggctaactccagcctctgccaaccacttttgacgaaaaccaccttggttgatgaaacttcaatgaccaccacctctaataaccaacactaacgttcactcaggggattaactctggtgatgctatgtctaatgaaacccttaatgccaaccctagttttgtgcatgctcaactcatacgttctacaaaacattaaagtataaataatagtattttgtctacgtcaaatgcaatatttgtatgtagagaagggtgattataataaaaaaagactgcaactttcttaacttttttgcttttcacttatgacttttatttttaagttcatataaaagtggttactaaaagaaagactgtactagaaaatgtactcttttttcctttcttttataataaattagatattgcattgatgtggtttcatcatcttcttttagattacatatgtaccttaagtcaaggattaggggacacaccagagcatctcaacgggcatctcaactaggttgacactcctttaacgtcctcatcatgtccatacaatactagtagaatataagattcaataataaagtacattagggtaatagataggagaaaaaggcagataagagcttaatgtactgatttggagataaaacacaaatccaaataactttaaaggtaaaagccgaccaattcaaacaaaaatcctgaatagagtatgctctaaactccttgtttagcgtgcaccaagcggctgcatttctttatgcaatgtccattcgacctgaccaaaccatgaaattcttactccaccatttcacttatcaatgaataataaatcaacttaactcttttttgaaaggcaaacaagttttgattgagttcttactccaccatttctcttatcaatgaaattgtctctcttccaaaaggggaaaaaaatctaagcttttcatttgtactgaaatcctttctttttaaggaccttatcgtgaaatttccaatccacatgatcataaaccttctcaaactcaaagatacctcctattttttacctctataatccttgatagcattgttagcaatgagaacctgaactaagatttgtttccccccaattaaggtaatctgagccttaaagattggcgacaggagaacctttttcagtcttttagccaacacttaagatataatcatatgcacactcataactagactgatggacttaaaatcccaaccctattcatttttccattttggtaatgagatgaacaaaaatttcatttagaaaactttccaagatgtccctgttgaagaactctctaaaatcccactcaaaaccatccttaatgttctcctatttatcctagaaaaaggtcaaagagagtccataaggatcaaggggcttgttcctatcaaagtgaacaactgcattcttgatttctgccaacaaaaaaagggagtccaactcagtctgcccactctaataggacatttgtcacaccattctagatcttcaacaaagagtttgagaaccacatccagggcatagagggcctaggcaaaaagatggaatctcctcctcgacctccttctcctccctatctttctcccctctatcgttctccaaggaaccaatgaagttcttgttttctataccattcgccaatctatggaagtaagtagaattgcagttcttgttcttatccctctcactttagctgatattctctatacttgctactttgcaatgaacaagattgtcgaattgtagttatcaaaaccgttttctgccttagatgctgccaccagacagtccctaatccaagcaactgttactaggtccaactccaatctctcagtcccaaacctttaacccaccactctcttctaactacaccacacctttctcccacacaccatttcgtcgatgtccaccatcttcacgcttccctttactggttacatttttggaaagggggagggcattttccttattgaaaaaaatgaaaatacagtgtataccaacttggacgaagtagttttctttcagacttcttctcaagcatatttaacctattacaagaaggtgcctagaacccccctccctccctccactcatttttcgaatagtcattggtacttgtttctatttaaaagttatgataccctaaacccttctgaatatagttttaaaagtttggtggaagggtcttttttgtgatatgactccagacattattatagagacttaacttattttttactctgttttgcagttttatagctttcttttctttcaatggtgagatggaagagaacactaacagtttgttgcacatcactatcatcattattaggttcatgactttggcttctttcgctatgaccctggtgcaattcaatttcttaattatgaggagattcccctggctcccgaggctgcctgtgttggacttgagattagggttgttggtaatgatagtggggagaaggtacagtcacattgtttttccctcttaccctaaaaaaaaaaaaaaaaagaaaagaaaggaaaaaaagaaagttttgttttagtcccattttatctttcttattgctaaactatgctgaagtgattttctcgcatatgttccaaataaaaattcaattcttcattatttagtatgcaatctttgtattattttgagaggttaaatgtgacagtggacttattagattacttcactcaagttggcatttttggtgctcctatcatgtgcaaataccaatttatagattcaaacccagtagggttaggagttcttatgcacggacaaatttgtgataagatccaagcatcttgaaatatatatatatatattttgataagaaacagttgattagcattctcttaatttttttttcgccataaaagtatcttttgggtaaaaaatgttgaaatataaaagataacaaaattaaaatatagtgctaagtatttaagatacttcgaaactcctccttcttgagcatactaactcaatccatagtctaattaaacaattgcgctcctatcattatctgcaccaataaagtacacatcttatctctaaagtctgtgtgcatttgtctgttttttttggataataaatggagggaatattagaatgaccaaaaaggccacaaagaacaacctgggggccgggtagagaaaacctcctcctaataagctatatacattgagggccttccaatcatttaggattagaagaaagttgtgattataaaagaggatagtttcaaacgtaccgagaaacttaaccttagccttgcagtattttgtaatataaatgttgttggaacggggccttggcttgggaggtctcaataacaaaaatatgcacttctagctaaatgggatttgagatttatggaggaagaagattcatttaggtacccaacctaacaatgaaatactcaagaacacaggaagaactcaagaacacaggaagaactcaagaacaatcaaatatgacaatatatgaaaatatattgaaatgcaagctatgatatcacaagaacaagtaacccctagcctttcgagagggcttgactttcaccaaattcccactcaaggaatttactacagaactctttatttcttgctctccacagcccacccaaagcctctatttataacgaaaaccctaaccaccttattaactaattactaatatgccccttctaataacaatactaatattctcctaataactctaactaggtcccttacagattctttatgaagacaagtcataagaagcattcatggtaaagaaccttttaattggcacactattggaaaatttggaaatagtttgagaagtccttggatcaatatttcaagagcttggagaaagatggaagccttggctttctccaagcttggaaatggtactagaattgccttttggactaacttgtgggtcgaatgccaacggaggttttgaattttagaacttctttaaatcatttaaaaaattcttcctgctattcagttgttctctaacttacccgttaaattatttggttgcatcgcttatgttcataatcccaatcctatcatgctaaacttaaccttcaggctgttaaaatgcattcttgtaggctgtctcccataagaaggcctgaaaatgttttgaccccttgaccaaacagtattttgagagtatgaatgtatctttttttatttttttggaaaatcaacctttttagccaaaattctctctagggggagccacttaaccttgaagataatttttgggacaccacactatcccaaacatcattgattcctatttgatgccaagtatggagagttcttcttcagggggagaaacattatagactgacttgacaagtaaaaaacctgaactacgggtttatactataagagacttgactcaaaggaattgagaacgggcagttgatctatcatataaccaatctaataccctaataagtgattctgaagatccaggtaatgtacattctccttttacttcttctaattctcccacttcttcttcttataatccttgcctgatgtttctaatcttgatattccaattgcccataggaaaggaaatgtgtcaaatatcccattataaactttcttatgataaattgtttgacagtcataaagccttcacatccaaaataaccaacctgtttgttccaaggaatatacatgcggcattaaatgatttgaattggaaattagcagtgatggaagag

SEQ ID NO: 7382 - DNA, 8154 bp, Cucumis sativus
  Intron number 2 from transcript Cucsa.012600.1 (locus Cucs a.012600) derived from phytozome v7.0 (chr-ID scaffold0016 4; pos 238662 to 246815 reverse strand)
cctttcttcttctacgtgaggtacgagttatacagtgatattgaaacttgatttgttgcctttaatttttagtatgcgtataactgtacttgattatttatttatttcattttttaaaattctagtacaacatatgtggtggaaactgtagatttaaattttctgaccttaatggaaggaatagatgccttcaccactatattatgctcacgtggtcataattttgcttgcttagttgattttaaacgcaattctacgatgagatttcctatatggatttgtggtttgttacaaataagattttctgcatggaaaatacttttgttgtaattttctttcataatgtgtataataacgtatttgaagcaaacagaagcattgatagttgcattgcatttaatcacttaagttgggtaagatttctcatagtcgtagtcatagtcaaagacctcaaaagttggaatttatgtaattgattttagtgataaggcattcagtttgcctgaattagaagtttggaaattatgccctcgggaatttggtcgttagaaactgaatgcttttgtttgtacttcatggtgaatagggataggattcaaatgtataagaatgaaagatagtttagttttatttatgttataagaaacatgtgagctttcattgagaattatgatagagcatacaaataaatagcctcaacaggaaggcaagaactacaaggtttcaaatccaaaagaataaggccctaaccaaggtatcatgtaatgtcctcccacaactcctcggcgtagcactccctcttaaagttctattatttctttcaagctacatatcacaaacaattgaaaaaggaaaataaaaatgaaaaacgtactagataaacatgagattccatctcaaaaccaaccaacaacaagaggagtaactccctccatagcgccaaggatcttaaaagaatatttcttaatctctctcgatgttgctccttcctaccctttctccttgtcttactagaccctttctctaccaacacaaccatgagacctctctgatcaccacatatgacgatgcgtactcacagccccagataattgagagaaaagtttattatggcagtagattttatgtatagaggctcacatatttttttaagaggaaacaagttccgtttattaataaattaataatatagagacagaagctcatagtacaagaggattacaatgagtgaaaagagagagagatcaattgacgcaccccgacatctcaagtaggcagtttttttgacagaggttgacatgttaaaatacctaaagctacaagaaaaattcttttagaaatttactgtgggttattattgtatttatttatttactttcttatgaaatgaacaacttttattgagaataaatgaaagaatacgaggacataaaaagataaaaaaccaaactcacaaaaaggaaactcacctagagaaattggcttaagttatctgaaatggtacttatagaataattataaaagatcctcaaaattggagcaaatacagaaacatgaaaagtaccaagagaacaaacatcattagacgtccctctccaatcctgaaaaagctttgttattttgtttgcccgagagatcccataatatagtgcacactgcaaaaaaaccatgagaaccaacttttcttccaaaggacgaatggtagaggaacttcttaactatatcactggtgtctgtgtcgagcaagtgagagaccaaatgctgggagaaaaacgaagagtcaatgagattgctaagctagcatgaagaaggaaaatggttgttatggttcgataagaagtggagagaccagtttccctgagagggttagacgttagtaatgtaagaattcacaataaagttttgttggtcaaatggctttgatgttttcccttgagtccaactctctacaatatatattaattatagatgggtttatgtggaagaagtctttgttaatggggtcattttgttgtattatttgtcgaaaggcggtgaaagacccgaatcacattctttagagttgtcaatgtggaattgcttcttttaggtgtttgatttcaagcttgctcatcgggtagatgtttgggagacgatcagggagttccttctccattcaccttttagagagagaccaatttctttggttagttgagttatatgctattttgtgggatattgagggggtaacaagatgcttaggggtatggagaagaccttggtgttggaatttatgtcctaaaactcgtagttcgtagttgaaaatcatattctattaaatagagttgttgaggaattattagtgaaactgatagtacaagcaatgtgattctgaatcgttcatgtacatgaaagtggagacatcctatgtaaaaaatttacataaaactaaattatgaaatggtcagttttacgtaataacatcgtttactatataaaactgactattttgattattgatgacttaggtaacttaattttaatcttgagctaactatgaattactgttcacacgggattatccttagatttgcataggtgaaggcagcacatcagtgttggcccaataagccttccatttcacggtaagtccaagtggataactggaaacataggatgcaagatggaattcctttttgactaactttagagttagtagatatgttgttctcttatgcactgaatctaggtcttgaacaaggggcctcaccctctaattggtccaagagggattcaatttattggttggaccttaaaccgattgtttattaaagaattaatgggacttgaggaataagatttaatattgggggtaaaacaatattttgacccagtcgggattacgaacaacctgtgaaggactaacttaccgatcatagttttatattaaacggatacaaatatatctataatgaggggagtgcaactgtgagactttagtggaatgatctgttagttaacgaatgttgattagctcggtctaaaagagtttagccagttaacctcgaatcgtggagcccataatctataggtccattaggttcttctgctagctcatatgaaattaagtaattaacttagaacagtatgatgaatgattcgaattgttcgaactaggtaatgaaaaagaaactgacaagtatatttgatatagctgttggttattagtttagagatgtagtttttatgtttaaatatgatttaaatatataaaataatacagattcatatttggaagctctaaaattatggaaatggtcaaaactgtaaaagtcaaccacttttgactttgaaaagtcaaattttgaccgacaattcattcaaatgtgatttgaatttcgagaaaatgaatgtggattcatgctcgagaggtcggaatcagttaaaacaaacaaaatggtaaaaagtcaaaatattgactttttttgtcaaagtttgactttgactaattttaggataagaccattttgctcttagtgggaaaatccaaccaatttgttgaaggttagtgggctaggtgttgccttattgtgaagacaaaaagctcactaaatgttggtgggttatgtgttgttgtgttttggtgaagcacaaatatgcatattacatggttttttcttataatttgtgttttcaaaatgattttggggttggcccttttggttactctctcaagtgggttggatttatccactcacttattgtttgtataataatttttcttcaccaagatatctctgaaccctaagcccaattcctcaacttccatctctttctctgtcttggttccttcatccatcgggtcccagaatccaatttggagccgggagaatagtaggtcaactctaatggtggagaatagtaggtcaactctaatggtggactggttgatgtttgaatggagaattgagcaattacagagctacgaaggtgagatttaacttaaccctaatttctgtttaatttaggcaatttagatgttaatttagtgcaattagatttagagtaaaattgatccagtttatgatgcgcatgtcttatgtatccatcacctggtgatatttggttcttggtagggatgcaatcagttcgacttggcttggtttgagtctcgaaccgaaaccgaactgccatatattactatggaaatgggaaaatcgcaccgaactgcctatgaatactaatcgaaccgatgagaaccagtttctttggtttgctttttggttctcattagtaatggactggttttgtccctccaagtgagggccgacgagcccatttcgtattattggatcaggcccaaagcaagtcaaggaaatttgtggaactcgcgtgtaagcatattaaaaaataaaagatttgtgttcacccagactcgagcatgcacacaagagcatttaattgaatggcactgctactagagatgcgtctcttcattggttaaaatattggttttttaatataattatagttttggtcagctcggttatggtttatttggtcaaccaaaattttgatcagtttttgaactttaaaacttgaacctttgaaccaaactgttagtaaatcgagctgacatcagttttggtcggtttttattgattttcaatttgtccttgcactctagttcttggtgaggttccatgtttctctttgggcttgttctcacagacttatttgtaagtatcctctaagtagcattttacatggaaactctttctctagaggggctttgtcgacttgcttttattgttgctcttgtgttctttaattttttttctcaatgaaagcaatttttagatcaaaaaatatatattttattgagtacagctcacttgtaatgtcttattgttgcctcttgcgtaaaggcgattatgaaacttgtcaccttaaggtgtgccctttgttaattgattcttgttattaattgtcattaatctggcaggactgattactttgttatcaagttgttaaggttagttatatgcttcaaatttatcttccatcgctccaaatttgacccaaaagctcatccagcatatttgttaggtatcctcctggaataaagggatataagctctatgatatgactaagaattctttctttgtatccaaaaatgtcctattctttgaagacttatttcccttccacaaccttggagacactacaccagtcatgatttcctggatgagtttgtgcttccatgtccgctgtttgttattcctgaagctatctcaagcaccacacctcaacataataatgtctcagaataatgcaactacttctactgatggtgttgatacaaactgttacgaggagcagaacacagaactgaatgacaatgaaatactgaatgatgctgcaatagaacatactgacaatgttgttataactgaagttgcaaatgaagccgaccgtagtagaagctgtgagcctactgcaaatgatagcagccgtgaacctgcacctgtcacactccatagatcatctcggcagttatgtctaccttcatatcttagggatttccatcgcaacatgattgggaagaaacatgtcacttcaacagccccctatttctttggcaaatatctttcttatgaatcttattcacctagacataaacactatttgcttaatgtgactgtttatgaacctaccttctgtcacccagctgtaaagtttcagaattggagagatgatatggtgaagaaataaatgcaatggaacgtaacaagacttggatagtgacttcatcgcccaaaagtcaacacatactaggaagcaaatgggtgtataaagtcaaatatcttcccggtggaactgttgatcggtacaaggtgcgccttattgcttaaggctattatcaacaagaaggcatggacttttttgacacatttccttccgtggcctttgtcacagtaaaggtatttctatccttagtgacctcctttaattggcaatttattcaaatggatattaccaatgcctttttaaatggagacttatttgaagagatttatatgttcttacccatgagatacaagacaactataataccaaataagggggagaagctcgtttgtcgattgaataagtcaatatatggcttcaaacaagcctttaaacaatggtttgtgaagttttcttctgtattgtctacacatggcttcatccagtcaaagtccgactaggctatattcgtggaagtggtgaaacctttgttgcattgttagtatagatggataacatattaccaattggaccttccccggatgagatcaatgttatcaaaaaagatcctcaaaagccattttaaagttaaggacttgggacaaaccaaatatttcctaggattagagttatctcgatccaaacaaggtttgtttctatcacaatgaaaatattcccttcaaatccttgaagacactgaataccttgctgcgaagcttgcttcattacctatggatccaaacatcaagctctcaaaagccaactaatactcatctgaatgctgctcatcacttgttgaaatatttaaaacgccagggcaaggcattttgattaagccaactcactagtttcatctcaaggcttatgttgacactgattggggggcatgccttgacactcgacaatccatttcaggctattgtattttcttagggaactcattagtctcatggaaatcgaagaagcaagtcactgtttcgagatcatttgcagaggcagaatatatagagccttggcatctgtaataagtgaacttatatggatttctcaacttctaattgatctacacgttcaacatatgttaccaacaactgtgttttgtgacaaccaagctgccgttgctattgcatcccatccaatcctaccttccatgatcagacgaagcacataaaaatcgattgccactttgtaagagacaagatcattgatggcttcttgaaagtattgtcaattcgattacccttacaactagctgacatgtttaccgagtcattatcggctgttttgtcaaaactttttgtcaagttgggtgtccttgatgtccatttccaactgaggagtattaaaatgatgccttgtaaataattgattcttgttattaattgtcgttaatcttgtaggattggtttctttgttatcaagtgattttttttttgaaaaggatacgagtctcaatattattagtataaataaagagacaaagctcaatgtacatgagggttatacaaagagcaataggggaaggaggattagcaggcacatccgagcatctcaagtaggttgacacccccttagcgcccttaacacatccaaaaagcgacaatacaagatcaaacaaaaaaccacaaatacaaagccaaaaaaaaatgataaaaagaatctgtccaaagcaaaatcataaataaaaggcagcatgctgagaacaaagaagaataagccttgattgattgaacaaaaagctgtttgaagcatggggctgatcaggaagtcctgatgatcaaggacttcaaagtggggaggctgtgaaggctggccaatataacacaatatcctacgtcaaagttctttttcattactttttctaaaaattctcaatctactctgtcaaaggccatttcaaggtctaatttagtgatccatcctttcttttttcggattctatagtcctccacagcttcgtttgctattaaaatagggtccaagatttgacgcccttccagaaggccacattatgatggagcaataatacttggcattactttctttaatctttctgcaagaacctttgcaaacaacttttaaattaatgttgaaactgatccagcagagaacgtgaaactgaccttccttctcttgaccatgaatgagaagtaactccattaagaaataaccccaatattcaatgtttattacccttgcactttgaaaacgttgttaagtacttgcactttaccaataatgaggtcaaatattgacatgttgaaaaaaaacgcatgtatttggatgttgaagtactttttaattttattggtttcatatctctatacaaactaacttcatatctcatatacaaactatgtcccctgttctttcttcaggatttg

SEQ ID NO: 7383 - DNA, 1377 bp, Cucumis sativus
  Intron number 3 from transcript Cucsa.165840.9 (locus Cucs a.165840) derived from phytozome v7.0 (chr-ID scaffold0115 3; pos 1140659 to 1142035)
aagagtaagtcctacatttacttatgctgaatacctctgtatttgtttctattggaagtagttcatgctttttgtgtgcacatcatgtgatttctctaggaacacttatgttttaaaatttgtagaatgggtaatacatggggtgtatccccatcacccgtttttgtgcatccctttttactactcataaaaaaaatattaaaatatttataaaaaaggaaaaagcataatttgccacttgacaagttatgattggaaattttggttgggtgcataaagacagatgatagcccaaaaaacacccaaactatttttcttttagaattgccttggcttctatctaaccaaagtttatacgaattttgaaatgtgcttttaattggttacatcacatgcactttttacccttgcaaaagtcagcctaaatgcatccccaactatcacttcttttccttctttttagtcaaggttaatggatcccaatcctgagaatcagacattaatgttggtttatcgtcaagtaaactatctccacttttttgtaatttcagcttattatctaccctctttccataatgaagttgtcttcagtaactatttcacaattaggattttcttttgtattctacttcatcaaccgattaaatggcttttgtttcccatcaaaatttatatattactagacgttggcttacacatggattaggcatgagtttgattgtcttagctgaaggaattgagattggcttacaaatggattagagacgagtttgattgtcttagccgaaggacttgagattgcctaatataaaccataaagtggaaatggatgttttctgtccttgagtcgcgcatgtctgagaagaaccattgcgtcctgtgcattgtgttagtcttttatgtgaaaatgaaagaatagaacaagatgatttgtggacctctgcattctggttgaagtagggccttcatcaatatactgaatttgcatatgctgatttagaggaaaatgacattattctttcaattgcaaatttagttacttgtcgaaagttttgagaatctgcaatgctgctctcaaagaaagtacattatcttaactttaaaagaattcgatatcctcctttcattgccatgtagaaatagttgggattggatagtatgttcatgtacataaactttctagattgttaccgaaattagtctaatttgaagcccgaagtaaacgatgaaggaaactttccttgagtttggttgtgactttgtgagtgcttatggatctcctaccaattttcattatatagctaattggaatgtttacacttgacagcttttcatgatgcagaatttattccagaaaatcagggagtatctgctgaa

SEQ ID NO: 7384 - DNA, 3069 bp, Cucumis sativus
  Intron number 3 from transcript Cucsa.005100.4 (locus Cucs a.005100) derived from phytozome v7.0 (chr-ID scaffold0005 5; pos 214578 to 217646 reverse strand)
gcccaggtaacatgaaatatttaatcaatttgatattcattaagttaaaagaaaatttgtagtaatgaaaaatgtatacaataaacgagagagtgagaaggtatctctcaacctaaagcaatcatgagttacaaatagctacctaatccacaacaatagtttatttttaggagaaacaatttcatttatgtaacattgaataatagtttacttttgttatttatttattcttttaatggagaaacaatatcattgatgtacatcgtcgatggttttgaggttgggagtaacattgtacccttttctcactttgattcattgatgatactgtatttcttttttccacaaaaggtggagtcctttctcagcgtgaacaacattttagcctttcttgaggccatattgaaacttaaaatcattagaaataaatgttggactttttagttttgatcctggaaagtaagtagttgggactttcgtgttggttgtgaggttgttctttttctctcatcccaccttggcctctcccttgtatataagttggggtcactctctctttggaacattgtcatagacaaggtgagaaagagacaggcttcatggaagatcttctctctaagggaagtaggacgacccttatttgcctggttttgagtgagatccctatcctcttcttgtctctcttatgagctctgtgttatgtgtgtaaaaatcttgagacgcttatgagagacctttggaatgggttgacaaggttaaaggagcacaggtgaggtggtggggaagccttggggtttgatttttaggattgatgattttaaggaattgtaaaaagccttgttagaaagaaattaatggttttattttataaggataggtctcttccatggattgatcgcgttcattctgcctgggtttaagcttcttcatgctgctccatttccaagtattttgcagatttttctattcaagatttttgtttgaactcaaatgcttttacttcttttccttagtctttttctattgcatcctttttagtagtttttttcttagtttctttgtgctttgagtgttagtttcttttccttatatcaatgaaaaatttcgtttctttgaacaaaataaaacaaagaacaaaacaaaatgctcatatagctataaaatttcctcttaagtccattaccctttggcatatgattatagcaaacaagcatgcttctaattcttatgagtggatgccaggtggagtcaaagacacttgcataatatttggaaaagaattttaaatgagctcccttgttcttctcaccttgttccttgctttgtaggtatctttgggaggataggtgagtggggatagaccttaatgctttacataatttttatctatgaaaaccactttgtggccaatgtcttgattaattacgcaagctcttccttttttttttggcacaattttggtgctttttgtctgtccaatagggaaattttagaggtcacaacttttatctttattctttgattgtggagctttagtttttaagttggagagggggggggtgtgattgtttttggagtcataagcctactgcaggcttttcttgtagtttgttcttttactgcttgttggactattctccatttagtgatgtcgtcttttacgttccaagaaggttaagttctttacccggcaggttatccacggaagagttaatggtcttgattggctgtcgagaaagttaccttctttggttggaccttttcattgtattctttgtcaaatggtggaggaagacttggatcatatcctttgcagttgtttgtttgcttggttaatgaaattgatttttttgttttttcctaccaagaaacaaaacttttcattgatgtagttaaaagaaactaatgtttaaaagatgtttactatttatttttaataagtgtttggattcctctagtgagctgaatataaaggcttcaaagagttgatcgaggaggttctcctccatccgctgtactaggtgagggggtggtttttgtggcatgttggggtttattctcttttgtggggtctttaggttgatgacaaattctatttgtaatgacttgataggtttcatttcatttactggagcccctttttcaagttgggctttttttttgggtgccttcgtattcatttattgggaaaatggaagttggttttctaaagaaaaagccaaatgaaacaatggagaaaaaatgaggagagaaataatttcctaaaatcggttaacagatggtattcaagaacattgatcctaacaagccatgaagcagccatctttgtgcaacaagaaaacgagaaaaagtatatggaaggagaggcctgcagttaagaagaaatttgtattggtgaaatggaaagaattttttttggaaaggaggtctctatcttcgatcactggtccattgccaacctcgtggtctctttctacaatgctttggttgacagtgaaccctccccacaatattaactattctctctcatctttgaagatctagaggtcttgtgtttgaatctttggatgagtttaatatgtaagattcttaatgattgatggatttaacttgaaaagttgagataacgagtggcatgtggttcccttaggttaaggtaaagcaaccttgataaggcatgtatttagtatcgcaatctgacatttgagtatgacaaatgttggcttggagacaccttaacagaacaagattccaaatcaaagtcagggtcatttgaccaagtccatgatgattgttgtaattttttttttttttagtttttgccattttccccctctctatacaagccattcttcttctttgggctttttggatggctttgggtcacgttttattttcctcattttttttaaggaacacaaacaatttcattgatgaaataaaattacaaaagggagactatccttcattataatatttttgtcacttttgttcagttttagttctaattctcacagtctcatgctttgtacaggatttctctttaaggagcccactcatccaaggcca

SEQ ID NO: 7385 - DNA, 6370 bp, Cucumis sativus
  Intron number 2 from transcript Cucsa.142290.1 (locus Cucs a.142290) derived from phytozome v7.0 (chr-ID scaffold0107 9; pos 569743 to 576112)
gcaaagctcaagtatgtagctgtaatttattggtttaattttgaaaagattattattactcagtcttctatctggtgaataaattgtcaattcttatatattaaaatgatattcgacttacttgaatggttcatggtaagatttttgtattcagctagggagaggagatagttttacgaggaccaagtagtccacttgttggttgtttaacaattagcatactactagtttattctagcaccgtcacaactttctagttttagaagccttttgaacaccttactgttttttgttttattagaagttagacaacaaagtatggatagggtcttagtaattgatgatctttatatccatgtacacatgcatgtttggatgattggagtttgaagtgtctaaagccttttgctctaatgtttcaaggagttgtctaattgacaactctattcgtttgtcctctttctggtaaaatgcttaagtaggtaaggtatgtcaatcagggcatggtccacaagctataagagccatgagaatttatcaagcaacaatttccttcatttcaccttgaggaaaagttgaaagttggtcaatattggtagagttagaaattcgggtagccagtatgattgttgtttagctatctcgtgaggtgtgtggattgagagaaacaacaaatattttagatgaactggtctttggaggaggtgtggtagggggtgatgtttagtgccttcgtatgggtgcatttttgttggactttttgtaattatcaacttagtatcattcttatggatcatagcttgttagatgacataatattaaatttaccttcacccatcaactttaacttttgagttaattagtgttttgagatgatattagagcagttgtctaagaggtcatatgttcaaaactttgttgtgtatccttccccttttgagttaattagtgttttgagatgatattagagcggttgtctaagaggtcatatgttcaaaactttgttgtgtatccttccccccaattgatattgatttccacatgttgggtcttctaaatatctcaaacccgcagatttcctttgggaaggtatggatgaaagaaaaggcagaggttctcatctcattaggtggggggtgattgagaaacctttgtctttagggggtcttgaattggaagctgtaacaagcccttttagccaaatggctttggcgtttttccattgagcccaattctttatggcgtatgtttattagaagtaaacatggtcctcactctttcaagtggctggataagggagttaaaggcatttactggattctgtggaaagatgtcttgtaagagctctccgatcttcttccgtgggttctgtgtgtggtaggggaggaaagagagacatatttatgggaagatctttgggtgggggaagaccacttcgtgggttattcccttgtttgtatcacttgtctttgaaaaatcattttgtggctgttttttgtatggaatgggaactcttgttctttctcctttgggttttgtcgtgctcttttcgataaggaaatgtcggacgtggtggctctcatttcccttcttgagagccattctttccgtctcggtaggagagatgtgagggtttggagtcctcctttggagggattctcatgtaagtctttcttttagtgtttggttaactttacccccacgagtgaatcagtcttttctttgatttggaggattaaggtccctagaaagtttaggttcttttcttggccggttcttcacggcctcctcaatacattggatagggtgtctatgattttgcctttgttaattggtcctttctgttatattatgtgctgtaaggtggaggaagacttggatcaccttctttggcattgtgagttggcgagtcgtgtttgggatgattttcttcagacttttggcttgtcgtatgctcgtcatagagatgttagagggatgatcgaggagttccacctcaatccgccttgtggggaaagaggcctgtttctttcacgtacttgtgtttatgccatcttttgggttttgtgggatgagaggaatatgagggtgtttagtggagttgaaagggggagtgaggagatttggtcggttactcgatatcatatttctatctgggcttcaatttcaaagactttttgtaattatcttcttgacatgattttgtatagttgggcccccttcctgtagtaagggtcccctgttttgtgtgggcttggttttttgtggacccgtgtattctttcattttttctcgatgaaagctgtttatttcaataaaaaaacaatatttcaaacccgaaaatgagggaaaatattagatgatgtaatattaaatttaccttttgattatgaacttaaacttttggatcaattggtgatttaacaaaacttttgggttagtgggtgatttaacatggtatcagagcaagtgatccatgttcaaacatttgcaataatctttcccctccaattaatatcgatatgcacttttgtattatttagggtatgcaatcatcggctatgcactttccagatgagatgagtcacatgtgtcatgcacttttgtatcaattagggtatgcaatccctatggagaaaaaagtatgctgattggatgaaatttgcaccctcttattaatgattcattccgccctttttgtatagccttaggtattcaaccttacggatgctttttgtagttcttccactcttcatgtttcacctgtcccttcactccctcgggactatccagacaacctaaaaagaaatttagctctttcggccgacttttagaccttttgatagggtgactatccacgtgtcccaaagtgacgtccattgggtatacttgagagagaagattggaattcaacatctccttatacatggggtcatggactctttgtttgtttaagatcttctttcgacatgaaatgatttatttagcttgctgtggaatcacatgggtaataagtaaatatagctgatgatttttgcatgtaaaggtatgtagattgagaacaaacttcttaagaataaaacccatttgaaaacttttaaaatttgttgagaacaccaaagccaggtgttaaagacgacttgcagttcaaacctcctacctttgaagaattccctatttatgaatgatggtgcaaagcaatgcttggcaaagaagctgaccattaatatgaaagaaaagatggatagttacctctctgatcatatgcccttacaaacatagagccaaagtcgcaccaaaaaatgttttggaatctacccaactgttcattgcaaagttacatttcataatacatgatataaatttccaatatcgtggcacctatttctcatttctctcagcaacaagtggttattctttaagcatttggaatgccatactactttccaacattgtagttcttttactcatgttattcgtcctttcagaaatgagaagaagaccctctggcgtcatgtaagagaacctaatgaaccttcactgaaaccatgaattctttcaactcctttatgagctcgatcctcatttagctttatacttgtgaaaaccttcacatctataactgattatagcttgggcattctatcttcaatctggaaagcttttttgtaattctttcgacacaacgtcctccctttttgtattattttgtttcattgatgaaatgtttatttcctctaggggaaaaaaaaagggcattttagccttcctaagcttggtgaagaaatgattgttggagcaaaaagctgtcaaatcatataagcaaaagaagatttagctaataaacaacttgaaaggtttaagggttaatgcatgtttatcttgaatgacgagtatcacgttggatgaaaatccaaagtttccatatcgaacccgggcataaaaattatggggaaggaaaatggtgaggattttgagtagtaatttaatgattttcctttaaggaggtaacaattcttgaaaaacaaagatatacaactttatacggactttgagtatgcttttagtttctgtcacaattttctgggagataacataccattttgtaaaaagaaatgttgctgttatttcactgtgggaattaaacacacttgatcgaaaaatacataaatgaaaacaacatgagctcagctcaactgacacttgtttgtacctgaggactgtgttcaaatcccccattcccatgttgtattacaataccttttcaaaaaaaaaaacataaatggagaaaaagagggcacgtgggggagaaccttttgtttactatatttttgcgtttatacctagttttgaacaaaaagttgtgaactctttgttgtctttcctgatcctccagatccttctttttaaatgttttaaatttttaaattttttgatgacctttgtcagatagaaagatgttttttctttcttcattgcaagatgtccaggtttgccgagggagaaggcacattttgtatttgcttccctgactgttcaagaccatccttgtgccagcccttccttcatattttgtttttcccttctccttcattataaaattccaaagaaggttaaggttcttgtgcgtggtaggttttagatggagagtgaataccttggaccatatctaaagacattcttggttcctcctccatttgtcctttttgagaagggtcaatttttatggctcattggaaggtgtgctattttgtgagatcttggggtgagtggaataatttcgtgtttggagggttggaaaggggttcaagtgatgtttggtttcttgttagatttcatgtttccctctaagttttgattccgaagagcttttattactattttaggttctattttgtatggttgaaaatattcttttagttaggttgttttttttgtatgcatgtgtaatctttcatttttctcaacaaaagttatatataaaaagaagcattcttctttcattatgtttctgcaactatgcatggaggcatgaagagggccttcatcatttgttgtgggtgccaatctgcttggtttctttgggatcgttggtgattctcatttggtatttgtggtgcttaggtaggggtagtagcccattgttggggaggctgtgttttcaaggtgaccccaggcacacttctatggtaagaggcgaggtgaactggggctgttgcgccttgaaggtagctagggtgagctccttcaaccaggcgttctgcctaatgtcaccttgatgtgccttcgccatatgatgaggctagtgcttgtctgtattttgtccctttttcttttccttttttttaatatacttgtaacaaaagagtccggtgaaggacaaatgatggaagagaagtaaagagaaaacaaagaataaaaagaaagatgaagattggaagtagagatgatggaaggtgacaagtttacaaactgcttatgaacccccttttcaggaaaagggaaaagtcttgtggcaaactaacttctttagttgttttgtggggtatttgcttatgaatccccctttcaggaagagggaaaagtcttgtggcaaattaacttcttttgttgttttgtggagtacttggttggaaagaaacaagaaaatttttagggaggttgagcgattaaatgaggaggtctgggaggtgactaggtcttctactgcctgctcttgggctttggttgctaactctttttatttattttttgttattatgacattattctcgttcgtatggattaaagtccttctatgtaatttgttctgggctccatttgcttggcctttttttaattattttttattgctcttgtattctttcaatattcttaataaaagctcaattttttactctagagagagacccttcaagaaaaaagcagagtcgggcaagtaccactcaactggtctcgttttgttacttttattattatcttgaatagtcttgtttagtttcataaaaagaaaagaaattatattttcatactttcacctttgtctctcttattctacttttcgatctctccttctctcctctccattgtttgtttacctgttatttttctttttgaaaaggaaacgagtctctttacctgtcaattggtaaatgggaaaatgttgtaatgatggaagttcaacagatgttggaacttcactattgcaatatgtcataccagtaggatgttgttttaagtgctttcttgcatcatctgtagggcagtaatcttttctttaaaaatttttctcatacatttatcttgtcatcaccatgtgtttgttccttggacaggggctgtcgctattcttcttcttttggcggtcgca

SEQ ID NO: 7386 - DNA, 3042 bp, Cucumis sativus
  Intron number 2 from transcript Cucsa.330280.1 (locus Cucs a.330280) derived from phytozome v7.0 (chr-ID scaffold0321 0; pos 1132 to 4173 reverse strand)
ctctgagatacactgatttccctcgagaaacctccgtaagcaattgaaacatatgtatattctttatgcttaaatatcatgctttgttcaagctactctttttgttattactacttttttgatacaaaacggatgattattcattcaaaaaaagcggagccgaacaacctaacgggccaagggacaaggagtccctcctaatacaaaattacaaaaaagccttcaaatgtaaattaatgtggaaggtggagcagatacaaaaaaacttgtgttggctaccccagttagaagtcgtaaactggaagaagttagaaataataaaaagaattgtacttatccaagtgaattctagcatttatttccttacaagcttccaaataagctacaaaaagccttcgttgtatttgaccacaacagtcctttgtcttccaaactccaaaagagctcaccttccaccgttctagagccaaaggttaacatcactgcaaaccaaataagttaccagaacagttccacactctctagctgaagatacaacaaagcgaaagggagagagtgtttcctcactccctttgttgagaacacacaaattgggggagatatttacgtggggataatggatatcttctttgcaccttgttataagtattaatactgcagagaacacacctacaagaataattcagaggcttgtcagattggattctaagatttgtagtttggccaactcaggtggtggattctttattcacatacctttggggccttcagagaagggtggtctctctttcttaggaatgctaaagagatttaaggaacaaggagtcttttgttcgtcaaactaggcagacaccggtttttaagcctcaatatctaagcaaggctattccatcttctttcatcctgaaagaccagaatcctacttatgtggagacagtgcaggtaaagagcgattgtcgcgattgtaattcctttgttcttcatacaagaaaacagagcatgtattatgaaggaataaaaatgataggcacactctattttaggtatggaaaaacagaacatgaattcattttgggttaaaaaagaatgatgaagttcttgtggaagatttcaataatctctggattatttcaagactgtttgtgtttagcgactccgactcgaagaagataacaaaattgttggaagttttttttcaaatacaagtatttatcaatcctctgtttgcaggcaatacgctgattaaaattgatcagggtgatttgggagaattgatcgagtccctatgtaaatgacatgtttttggtccctttcgcttgttcaaaaaatgggacaaatttcgtcatagttgcccttgctatgaatggatatggacgttggttttctataaaaaaaaatcttcctctggactactggagcagatgcacttttgaagccattggatcttactttggaggtcttgaaaatattgtttctgatgaaaattggttattattggcattggatgattatcaaaaaattggtttgagtgaattttttcatctctatcttcatgttcattttaaaactagagggcgagtttttttgggagtgattggatatgatgcaataggattgggatagttttgtacattcaaattaatcctagttaatcctaactttcaagaagcttacattttagttacccatttaggttttagtttcctcttagttatccttttaggattttttttaattttctatgaatggtgagtcccctcttgtattagacaacttttgataaataataaagattttgatttggttcttggtgaaagtttcttttatctctttaggctacatacatcacataaggagtgaaaataattgaacacaaggcaaactaatgagtaataacacaagtcaaagcaatcaaaatcttgtaaatgatggtaaaaagatcaatgtacaagaaccataaaaggtttgcctatgttagaccaccagtcctctagacgtataaaaggaggggcaagaaaggaaatccatgtaataatactatgagagagaacattggagaggaaggaaatacctaagcgtcccactaggttgttggtttaaatagggaatgttttgggattgatcattgagcttttcttttggtaaaaagctgctgtaagcttctagggaagaggattccagccttctcgaatgaaggagcggttgtgttcatctttaagactttttgttatgtattttgctttccatttgtgttcatctttagactctattttggctggtagaaccccggttgatattgcgatatatttaagcagagtgctgtctttgttttaccattgttgggaactttccgtgtttcaggttgaaaagtcttaacagcctagtggtaaaaaaagaggagacaaagtctcaataaatggctaaatgagttcaattcatgtagccacctatctaggaattaatttcctacaagtttccttcgcacccaaatgttgtagagtcaggtaagttgtctcgtgagattaggcaaggtgttttgtaagtcagtccgaacactcatggatatcacaagaaaaaaaagatcaatgggaaagcatagcaaaaccgaaccacattccactccactcctagctaagatacataaaagaaatctcatgataaagtcatgcatgcatcacattatgtaataccatacgtttttgccatataaacgagttctttttcctatcaagaatgcatttacatgtctatcattagttgctctaatatagttctgcactataatcaaactgttaaacttttgtaattagccaggaataagaaagtgcaagccaatgcaaactagtccctgccactaactcaactgcaatacatgaacattaaattcctcatgcagtcatgctcaatagattagaggcgatacacaagtttatagattcaagcaatccatgcttaagaaaaagtgtttgatagcgtactgatcttaattttatttaattacactctgttgtttttttggtaatctctaacttatattttagg

SEQ ID NO: 7387 - DNA, 1166 bp, Cucumis sativus
  Intron number 9 from transcript Cucsa.333870.3 (locus Cucs a.333870) derived from phytozome v7.0 (chr-ID scaffold0329 0; pos 19366 to 20531)
ttcagattttttgaaagctactttagcttcacgtggtactccactgaaaccctataattcctctctactttaaaagcatcatttttatactattctctgtaatagttgctccatatccattttttcccggtagtatattggaattaagtttggattatatcttaattagttttcacatttcaatattattgcctgcaacttcatttggtgactgatacaggacaactcaaaatcttgtgcctttggctgtcgtgagggagacttattgcaatcatggctaaaagtattatgaagaataactactgtatgctgtggcaataatgcataaaagtcatataatgggcatgcaagaagaatgaacattgagagagagaggttataggcatcaacaattaatacttcaatatgattcatctttgatgaatttaattttgattagttgacatacttattttattttataaaggctagatatgtgttatcaatgagagcattgctcaattggtaacttaagcatatggcttgggccaagaggttagaggcttgaatctctcacctctaaatcttgctgtgtcgaggaaaaagaaaaacactttctgttctcttgagaattgtgaaataagactaccaaagcaaatggaaaatctacatgcattatgattttaactttggaaactttataccttttccgctctctaaagataagagataggtgggtacaaaaactttggtgggtctccgaggtcctgttattcagtataacttgttagtttattggctctttcaatttagttatcatacactagcatagcttccttcagctttgtctggagttgttttctagtaacgatgggagttcaatttatgtagatgcattttgttggatgggggatataaagatggaaatatacttaattaaaaaaagatttcactgcttttgcaggcttcctgaatgaaaaaaggttttatctcgatatatttactgtttttcatcttgatttggacccccttagaaaccaaatatgctccatgacatccatcagtcaaaagttcactgtttacaaaaaaaccaactagcaaaatcattctcttccatttgagtgtggcttttcttatattagcttgttgcaggaaatctaaccgcaacgaagaaagaggacttgagt

SEQ ID NO: 7388 - DNA, 1130 bp, Cucumis sativus
  Intron number 2 from transcript Cucsa.079800.1 (locus Cucs a.079800) derived from phytozome v7.0 (chr-ID scaffold0079 3; pos 2652630 to 2653759)
tcgccttactccctatcaggtcgcccagcttgccagtaagtttattcccattttttcaaccttgttattttcctctctttactcccttcttcttttttttcttttcaagtttgatgtttaacaatttgctctactttctaatcttcctaacaattcagtccatctacttccaaatttgtaattatttaatccaaaaagtctcctccaacataatggtcaatcttgatcaacctaatactaattataataaacttaactcttaattagttgatttcattcgatcttaatataaattttcgtgataaaggttaaattgtgaagtaccaaactaaattgatatttattaaagtttgtggactaaattgttgcgaagtataattaaattgttcaaagtagatacactgaattattacacactataaagctggcaaaagttacgagttcacttcatgttcgcgataatgtaagcaaaaaatatacaacttctcgttttatgagatttcatttgagcatcttgatttctatattttcaaggttggatatggggacttcttatctttgatttcaactttgctttgttggttaaatttagttcgatttattgtttagatagttgaatttttttttgtatctttgctttgttttgattattagtatcatccttttattcaagtttagagttggattctattaaatttaattgactaaggcaacaaaactgatagaaaatgtagttttattttccttcctacctatgacttggtctaatgatcttttcaaataccttaactgatcttcttagttctttttcattgactatgttgttgaagttgtttattgattatccaatagtttctgacttaaatattagatatcctataaaatcttcaatagaaaacattgtaagatcagattgttgtccagtatgattgagggtatatgcttgggtttggatgtgattttagtagaaatgatttattaagattgattttcatataatcgtttagatgtttgattcttctcttctaaagtgattttcatacaatgataaaagattgtgattctgaaactaaagagtgttttatttcggtacagaacaagaaggagttctacaagttgttccaagccgt

SEQ ID NO: 7389 - DNA, 6690 bp, Cucumis sativus
  Intron number 12 from transcript Cucsa.341740.1 (locus Cuc sa.341740) derived from phytozome v7.0 (chr-ID scaffold033 56; pos 4147748 to 4154437 reverse strand)
tgtggaagtgcctatcagctgtggaggagtttgaggtaagaaacatgcagcaattcctgcaaaagactaacacacttgatttgatgcacaccatgcacgatactttgcaaaagttttggcctctcagttccttcgtttccatatttgtttgttggacaaactacaaaaaatgggcactatagattgggtactctagattggatactttagattggatgatgtgttcatcttcgaattgtgggattcggttacattttcgattcttctttatttgtttgatatatttagatattgccgaacgcattagatatgtttagaactatacatcagaaaatgattggatatttaaaaaccatcaagcaccaggagcatagtggattcagctggataatggaaaagacgaaattctgtagaaagatagaggtgtgaaagagtccttgtgaatgggaatatttctggtagcagaagtggttaatggttttccttcgtcaaattagacctttccttggtcacaagtcacaaccctataaaccccacccgttttgggatctcagagtcggcggtgatttgaaacttcttcattcttcaacatagcatttcaaagttcataaattatttatgcttatggatatatccatctcagggtttcgttataattatgtttttgttagaaataaggggctctgttgatagcttatagcccaagttagtattttattttaccctaagtttattttctttttttcatatgaggatttgctaaagctataaagttgtcttctctttcattgtgtgtgaaaataataaaatgtgactctctatcatggttttttctccctgttctagggttttccacataaacctagtgttctctttttcaccatttttaacatggtatcagagctttgcgacgaaccctagtcaacatttagcgaaaaccaactaatgcaagataaccttagttttgcaccaacctagcttccatcgcagttgccaatggggtctttgaccaccaccacctccagagtcgttgatttttccaccatcaacattgccactactgtccaagccgtcgtgattgtcatcttcagtctttgaaaatctgtccaattctagcaccgttacaactctttgatggaaaccttaattgaaacatacacggtgaaactgagattagtgagttgtccacctatcacagaggtaaatcccctgtcgcggcaatgagcttcttataacttcctcatcttacttcgcctagttatgaacatcaaggttcaattggtttatccctggtcatggtataacaacagttggctaatctttaaacaagttttcagcaacaaaccgccgctctcgaggcagccttaggtgtttccgcaaacttaaattccagaacaatgaattttgacattcatttcggtctaccgatgcatctagagaatctggtaacctctttctgcaaactatttgtcaggctctatggaaaattccacagggttaattgtgggggaaaagttgaatggctagaattatttcttcttgtcttagtccattaaaatgggccttgagggggcgtcacaataccaagacctagactaggagatcctcaagagcgcatttggaaaaggaaaggactccctgcttcgatcactactgattaatagtatgaaaccacatataggaaaatcgttataatatgctgtgactgcttgagatatcctagacacagtccaataattatattctaaaaggcagaatttgtctcgtctttatactcttatgtaaacaggctcacgagtgcaaacaggggacgatggatgtcacttcatactttaacaaattgtcctagatctagctggcgatggatatgtgttatgaaattatttgtgttggaatgccttgaatcgttatgtgacgttacgaatgacctagtacaggtgtcacagttggctctaggatttaaagaagtgcaatatatatactctctaacttagtgacatcaaattgtattaaaagacgttatctctaataatatttgtttactctctgcttgtggacgtagctaacacactgttagtgaaccacatatatttacttgttgatctttacattcttcatattacgtaattgttgattccgtaacaatttggaattgtttgtgtggaggtgttcagtattttaagattgaggaggttgatcgtgcttatgatttcctagttggtttgaactccaagttcgatatagtgcaaggccgtatactaggacataggcctataccttctcttatggaagtgtgttctcagccaggtgctataaacagcacgactgtatctgctactaattctattgctttcagtgggaaattatctgattctgatagttacaagcaaaatgagaaacaagccccggtgtgtgaacattgcaagagatggtggcatacgaaagaacaatgctgaaagttgcatggtagaccgccaaatggcagaagacgtccttcaaatgacaagcccaactctggttggactcttaggaatgaactggcgagtgctccctagtcaccgtcttaggtgaattgctaaagtgatcctggtgttgcctcctcaatggggctgttgttcaattaggtacctctcaattcttaagtctcctcagcataaatggcgagaaaccatggatacttaattcaaaggctacagatcatttgactagatcctatgataattttctaccatatccttcaagtgccggtaatgaaaagatttgaattgcaaatgggtcatttgctcctattgcgggtaagggtcatatttctcccttgggtggttcaactttacaaaatatgctatatttacccaaaatattttaaaatttgctacctattagtaagatagctagagatttgaattgtcaagttgccttccctctagataatgttttctttcaggacttgggctcggggaagatgattgacactgcttggcataatagcagactctatgtccttgacgatgatacttcttctaggagttgttataagactagtttgttgtcttcttatttttcaacttgagaaaaatattgtatattgtgacattttcgccttggtcacccaaatttccaatgtatgaaatatttatttcctcatttatttaataaagttgatgtctcttctatcttgtgatgtgtgcattcgtgcaaaaaagcatagggtcacctttccatctcaaccttataaaccttctcagcagtcagcccttcacccttgttcatagtgatgtttggggtcccacgagtattaccacctctttgggcaaacgttggtttgtaacctttattgatgatcatacccatctcacatgagtttttctcctcactgataaatggtcgtgagttgtttaataacaccctttgtgattttctgtcttctaaagacattgtccaacaatactcctcaacagaacgaggtggctgaaaggaaaaattgtcacctcctcaaggttgcatggtctatcatgctgtctacttcgcttccatcatacttgtggaggggtgcagttctcagttttcactgcaactcatcttatcaatcgaatgccatttagtgtcctccaacctaaacctctcttgaatgcctcaaggagtcataacctaccacgcgacttatttctaatgcctttctttgggtggactgcctttgtccataatcatggtcctagtcaaactagggttacccctcgtgctcataaatgtgtcttcgctgggtatccccttcaccaacaaggttataaatgcttccactcttctttccgaaagtacttcatttccatggatgtaacatttcatgagaggatcaagcgttcttccttattagtcatgttcaggaggagagtacaagtgaagagactaacgagttcacatcttcaatccctactaaccgtcttgaggcccatgacactgctctacccactgaaaaaatcccttggataacttactacaggaagaatctcataaaggaagtggtgtcccctactactccatcgtctttggtccatggagctaaatcaacacaagctcgaggtactactggtcctgataataccaacttgtatttttagaatgatattattggtttggctgagaggactaatacgttagttccaaagaataacgaggtttcaagcagtgagacatcgatagaaacacaagagggtgaggctcttccttaggctggaaaagattataaaaatccccttacatatgaggaatctgacaaatcaagggattatgatatctctcttgacacgtccattgctttgagaaaggacaccaggccctgcaccaagtatcccatgtacaactttctatcgtacaataatctgtcttctgggcattcactgccagccttgatacaacaataccttgagtggaagactgtcgttatagaagaaatgggagctcttgaaaagaataatatacgggacctttatgctcttcttaaagggcataaacagttggggtgcattgggtagcattgggtattcactctaaagtataaatcatatggaactctagataggtacaaggtcagacttgtagtgaaagagtttactcgaacttatgggattgattattttgggactttctcctttgtagcgaagttaaacacactttgagtccttcttgttgcaattaataaagactagtctttccatcaacgtggtgtgaaaaatgcatttttgaatggtgaattagaagatgtttatataagccatccccaagttttgagctcagtttgataatcgggtatgtaaactcaggaagtctctgtatggtttgaccagtctctaagagcgtggttcaataggtttactacatttgttaagtcccgaggtttcactcagggacactctgatcacacgtcgtttacataaaggtcaatatcggggaaaattgttctaattgtgtatgtagatgatattctcttgtcaagaaatgataaggctaagatcactaggctaaaaataaaatagttgatgagtttgagatcaaagatcgagggaatctaaagtatttctttggaatggagacgacaaaattaagagaggatttttgtatcacaacgaaaatacaccattgacctattaaaagaaagaggtttgactggatgtagacccgcaaccgctcctattgaattcaatgcaaaattgagagattttgttcacaaagttcctattggcaaggagtggtattggagtctagtgtgggaaagctgatttacttatatcatactagaccaaatatttcccatgttttcaatgttagttagtttatgcgtgctccctacaaagaacatatggaagttgggaatcgcatgagatatttaaaaagctctttgggcaaaggtctgatgttcagtaaaactgacagaaaatgcattgaggcttataccgactctgattaggcatgatcaattattgatagaaaatctacgtctcagtattgtacgtttgcgtgggtaacctagttacttggaagtaagaagtgaagtgttgttgctagaaccagcattgaagctaaatacggagctatgagttcaggaatctataaagcaatctagttgaagaaagttttgtctgatcttcactaagtcaatgttttacctatgaagctctattgtgataataaagcagctataagcatagccaataatcatgtacaacaagatagaacgagacatgcggagtttggcacactttataagagagaaattggtcaaggtaagcatccatatattccatcttgtcaacaagttggtgatgtactcactaaagggtttcttaagccaagtttttactcatgtgttagcaggttgggtctaattgatgtctacgaggcaacttgagggggagtgttggaaataaggggctttgtcgatactttatagccctgaggacattttagtattttattttaccccaagtttatttcctttttttttgtattagggcatgctaaagcctataaagttgtcttcttttgtaactttcattgtgtgtgtagagatactacaagtttcaaactaaaaataccaaacaaatggcaaaacagggcactctgatatcttttatttatatataagccaaaagatggttacagcagtcacaatatgataataacaaagaaaagacacaagaaaacatacctagcctccttatagcaagctgaatattccctcaggctacagcagcctttcctcccaaaagatgactaaatttaacctagctacccaatccccaaaaagatatatttatatccctgcccctcattcctccccgtgggcctcacttgcacgatctatcctgatcattccctcatcatttgttgcctgggtttttacctttctgcccctccttttgtatgtatggacaatagggggccttacaatgtgaaaataataaaaaagtgactatcttggttttttctccctgttctacgtttttcacacaaacctagtgttctttttttcaccgtttaacagttttcgtcactactatatataaaaacttctattgtagaacctgtggttattatctccctgtatatagtagggtgtgcatttttttattttgatcaagtttgtttttgttgctttcagaaaaagtatttggagctaactaagggtgctgcgga

SEQ ID NO: 7390 - DNA, 1786 bp, Cucumis sativus
  Intron number 7 from transcript Cucsa.212910.2 (locus Cucs a.212910) derived from phytozome v7.0 (chr-ID scaffold0154 3; pos 706962 to 708747)
cagtgttcagttccttccttggagaccctgggaaggtaaactcaaaacattgtaactttcacctccacttattctcccgtgatcattcactttagatcatcagtggtccagcctgcactctgatcgtttagatatgataacttatcttggaatatatatcgtttctgatttttacaggagcaatatcacttattttattaatcagtatatggcagcaaactgtttataagtggctaaacacattgaactacgagttattattaccttaagatttagtttggattctcagtatgacgaggctttatctcattgcagtaaaagaaacatgaaagttggaaatattaaagtttcaaggtttctgtctgtataatacaaatgcttgagtctcaatcttgactgcgatataccctgcttgttggcatatttaattgattattgtaaaaagcagcttcctacagtatttaatctggatttggattttggtgtgatccatgattcggtcaagagaagacttcttattctttcacagtttgcccatcaatttgaatatggctttaggatcctacgtcctgaatatgtttcaaaattttctgggatattatagacaaatacttaacagaaagaaccaattctaaagttacaagttaccataggctagaaagtcaggatttattgtaagtgttgtttcgcatgcatatttacttggatgacctctagacattgaagagggtactaatttgagagaataaaaaagttctatttattgtggatttatgatattattcttatgctgactgtcactcttagacattcaggacaatgaaaagttaggactgttggtggttaacgtgtcacaagtcaggatgtacttcttagacccccaatattacacacatataagagaaggggcagagccaggaattgacatgacttttggcaattcagggagcaaagagagagaaagcatcaccagggcccactgtgggatttggtttatatatatatatatatatatcgtgagtgtccgggctagcttacacacacctcaactaatttcacgggaaaacccgtctgaccctacaacatttgggtgtcaaggaaacctgtaggaaattaattcctagataggtggccaccgtggatcgaacacatgatctcttagttagcttttgacctttttaccactaggccaacccatggtggttgtgggatttggggaatgtttttggggatttccgttttaggtttttatgttgttttttaggtgaaagcttccatacccttcattaggagaagtttccagccttctctaaggagctgggtgttgatcttgttttttgctactgtttttttggattatatctctgttttgtgttatattctgagtattatcatcaatatattatagcagagtgctgcctctgttttgtcttgttggggtttttctgcttttcaggttaagaatcttaagatacttcaaagtgtatagtagtctgctttgttcataaaagagtataaagaatctttagtttctttgctaattgggggtcacccacaactttcgtttccttgctaattgttgttcttgatgctatatatgcaccatttatgttttcaagttgtcccagttgttccatgtttcctttttttaaaaaaaagaagaaaaaaagaaaaaaaagttgtcccatgtttagataattggaagcctcaccttttctatctgacttctgttccacaattccggcattatgcagttattacaggaggacttgactcaaagctcatc

SEQ ID NO: 7391 - DNA, 6685 bp, Cucumis sativus
  Intron number 4 from transcript Cucsa.178510.1 (locus Cucs a.178510) derived from phytozome v7.0 (chr-ID scaffold0122 7; pos 796556 to 803240 reverse strand)
taaaagattttgtatttgtacacggtgagtgtatattgaaaattccttggttttctatcatactgatcctactttattcttactcacgtcttattttttttaagctattattatattgtctcgattctttgtgtcctatagcattttaattatggcaaccattatgagaattttaataattttgatgacattgatcattcttcatttgtatgcattgttcataaagtttctctttgaaagaatatatagtttatttgggataaatggtgtatcaagaggctctagaaccatcatgggttagcctagtggtaaaaaaggagacatagtctcaatgactaactaagaggtcatgagttcaatcaatggtggctacctacctaggaattaatttcctacgagttttcttgacacccaaatattgtagggtcagacgggttgacccataagattagtcgatgtgcgcttaagttgatccagacactcacggatataaaaaaacaaagagaccctagttttgcattatgctcatgacctaccttttctaattaataagggaattttagaattccttttcacacccagagttgtctcattaaaaggattggattacaaaattctaaaatctaatatctaaacattttctaaaatataatatctatgggtagaaaatgtttagaaaaattctaaaatataatgtttagaaaaattctaaaatgttttagatttcacagccagatctaaacattttctaaaatctaaaatttaaaaggagctatgaaaaaaataataaaatttaaatataatgttagatactatctatatctaaactcttatctaaaatccaaaaatttaaaactgatttccaacatactaatttttcccgtgcttgattttctcaaagatcattctccacatttgaaatttgattagtgattctagtgacactgatgatgtttctaaggcagtttgggatggaataagaaagcaacaatattgaaaaagggcccaactatccaatcaaactcatttttccaagaaattgacgtatgagagttggatgaattaaagaattatcaagaatcattaagaatggatttttatagcccaagaagaacgtccaagactggctgattcaagaaaatcattggatgagtcatatactccctacgaacttgaaacatattcaagcagtagtgctgaagcagagtttagagctctagctcttggtatttgtgaaggaatatggataaaaagattactagaagaactaaatgtctcttaaaagatacctatacgtgtatattgtgtcaacaaagctgctatttctatagtccctaatccaattttatatgataagaccttgaaattgataaacattctataaaggagaaacttcagaacaagttgccaatgtgttgactaaagggctaccaaaagtatagttcgagagaatgatatccaagctggcaatggaagatatatttaaatcagcttgagggggagtgttggatgtaaataagatttaattgtaaaattatctacgattttattttattttatttttttctctttataattctttccttttttatgcaattagcctatctcctatataagaaggcttttgtatctaacaataatgtaggaataaaaaatattctattccatttaatttgaagggaaaatacagaagagcttgaagctaacaaccaaataactccaagctaacaaccaacaaaaccggctgaacaaaatgaccaaccaggacttacttttagagattttggttgaatggaataagagggatttcacaacaatcttacagtttggtcaaactgcgtagattcagctgcctcttaggctcgacatggtgctcccaatccaatgtttccacaaattactccatacaggatatttgcttaattgaaatgctttcatctcttccatctaattatgacatttgtcatctaagttatatttattgttttttatttgtagtttctggaaacttgtatctcttctcattagaagaatttcctttatggatatgacgagggtgctatggttgtgtcaacctagttgaaatatcttggtgcgcttgttgatcccttcaacctagattgcttttaattttacgtttcattgtaatttgagcatcattagactctttttgttttatcaataaaaacctctgtttttgtttaaaaaaaaacatcaacataattaaaaagaaagcccagaaccctacatcaaatattcatacccatcaaacaaaacccatgatctaaaggaaatgtaatatcctctccacatcgttatgattatttagcaatagaaatctctttgatgtgtctgcttgcaaattataattcgacatcttttcatattccccttgcttctttattaaacaagagcaaacaagggaacatgcttgatttaagaactttttgactagaagtctcagactagaatcccttgaacctcttgtgttccatgagtttttggtgcaaagtttatatttacattttcatgtgcggggttctattcttttggttagagttgaggcctaggaagcatggacacttcattttagatgaagtgtgtccaacattgacacttgcatgacatgcgtctgacacacaaaattgtatatctgatttttttgttatctttttaaatctgacactcggggacacgcttgagacacactctgaacgaccaactttcttcttgctggatgactactgctcaactcctcctcggatgacggctgctcatctcctttccagatgaccattgttcatcattcatgtcggctttctctttctgctgctttcaaaccccaccaatattcctcctttctcaaactcagacctccatgccaatgactatggtttctcttgcatttctgtttttttttcttttatgtgtttgtgggtcttaataggaaggggaagggcagaattagggttaggattttttttcttttaaatgtgccactgggcctcatttacatctgttttatgatgtggccgtgggttgtttttcttagatgggatcctcatttttttctttcttttaaatgcctttttccttttctttattaatatttacaaaaaagattatttttaataattaaaatacctttgcaagcaagtttccaagtagaactagattacagggggaggttttctggatagttgagcaaggtaagttctctcccctctctcctccctcctctctcccctctccgagagccgagtttctcagcagacctcttttttaattctcaaagcacaacagggaggttgttagttgcaaaattgatcagtcacactattgcatttggaaagaggaagatgtttgctttattgaagatgtagaagctggcagaagcatctctctttctgatagtcaacttagatggactcattgagtaattgttgacttactcagaattttggtggacaaccatattaggaaactcggggacattgacagaggaagagtgagaattttgaagtttcaagctaagtctagatggattctaagttgcgatcaatgaccatactcagggggtcttttcaatattagagtgtgcttaggaaaagatcgcaaggttggaaattgttctgtacgatgctgggaaaatttgtcgaaaaattggattacgctagatggtattctgataatatctccaagattccttcttcgaatatgagaggaaaaataagttacgttggaatgacaatctagtctgtctaatttctctgctccaaggtccaaaaccaaggaaatcggttagattcctagttaaaatgggaagcttcaagtgcccaaccattctcccctccaaaacagaagcaacggttgattaagaaccatgaagttgtaattttgaaattctatggattataagacgcttggaggctgattcttaagaggctggaagttctttccaaacgattttttttataaattttctttatgatgagaatgccctcattagcattgaccaaggatcaatatttgacttcatccgtgaggaaggtaaatggcaggcctggggaattttcacttcaaattcgaaagatgggataacctcaaacatagccggctgcttgttaaaaaaggctatggaagttggctcaagattaaaaacctccctttggattactggtgtagaagtacctttgaggttactagggatcactttggaagtctcacggatataacctctgaaactctgaacttaaccaacgtaagtgaagcccggattcaagttaagtagaacttatgtggttttgtgccgtccacgattgaagttactgaccttaaagggagaaatatctacctccattttggagattttgaattcctaaatcctaccgatccctccaacaatatttggactgccctactaaaatttaaattaaatggggtttgtgatcttaaagttccccctttggatccgtcccatcaagcactccatttttgataaaagcccggatcttatggaagtatacaactctaaagtttaggtccctgaatgcttcattaggtcaataaatgtagattctacatttgagctttcattttttctaaatccaccatcactaacacaaaggcttctattctgcaaggctccccttgcaaagctgattattctttcaagaaccagcttgatatttcctctccattcagtgttagtagtgaagaatcagccggtgctctcagtgcgtgtgaccttaaattagactcagaaattgaagaggtggatcttaatgctctgtttaatgatgaagacttccctccaaataaagttcccctgtatctgccaaaggatttgttgccaatagttaatgattgtggaattattggcttaaattagtagttcagccctctcatgttgttagtccaatattattccaatatagtaagagaaatcagaaagagaagttgaaagtttttgggtagttttgatgtatctttggaagatctcgttgtggactggccttgtttgggatgatcttggggtggaatggctttgctcaggatgaccttggggtggaatggcttttctttgtttgaaaaaaaaaggaagatatgatttaaagttcagtgttttaatcttgaaggctttgatagttttattggtttgcttgaatcaattcctaaagttgaggtatgtgttgaagaaaagttttgctcatggttcgtatggtaaagtattgctagcttttaatggtaactgccaaaaagtatttagttcagtaggagagaatgtttatgtttcgtgcaactcatatttggaagtcttcattgccagaaactatggtttgagattatattgttcatcatgaatcgtgttatggtaaaaaaaggcgttggaatctattagagtggctttacaagagaaatattttggtgaatattatttaatacttctacacgcctgggggatgtgttttcaactagaatatcaaactttgtatttgaagattcaatgtggggtgttgaggtgttgcaaaaggaggtacaaccttttttgtaaaatttcctaaaacactggggtttccttttgataggtgggtagagaaacttgttaactagggtgcttctttctttcttttttgttgcttccagaaataccctgtggaatattagattctggggaagaagtagaagttagactacgagaaaatctgggctggaatgtagcttttggagacctggtatggccaaaaggccatgtgtcagtcaaacgaatggcttgtagtttcactgttgggtagtggaagccaaaccattagaaagcaaaatttgtctcagtcgtttaaatgccttcttctgaattttggtccttctttagtcgcttcgggtttttctctcatgagggggacaggtgaagccactttgttctgatatttggaaagattttttgatgcctcttctgattttggactactttggcatgatagctttgagattgccaatttcatctttttgctagtctctagattgaagattcaaatgttttccttttgagaaagttattttgttatgctttgtatttagatctcttcttggtgctgttttagcttcaatttcttttgttggatttcgcttttttagcttgtttctttgcgattgtttgttttggtcgttttcccttgtaatggccgagatcatcttgggcagtttgtttggatgtttttgtcttttcttattttgctcttgcattagtctcattttccattattaatgaagaggtttgtctctgtttaaaaaaaaaacaaaatattaattatttttagtacttaatagaaaactagtattttaaattaataaaaacattatttttaatgacagtatcattaaacatatacatatatataaagaatgataataacgtccccaatgtgtcatgttctacttctttagaaattggggtaccgccttatcgtgttgcgtgttggtgtccgtgcttcctaggttgaggctgatgattttgatacattttcacattataacttttcacttgtttagtgattttttaaattttattttatttttaaaatatagctccggttttcatttaaagattaaatcttgaatggttttttttcttgtttgatgtttttgacggaagatttctccccttttaggttatattgaacctgtg

SEQ ID NO: 7392 - DNA, 873 bp, Cucumis sativus
  Intron number 2 from transcript Cucsa.101180.1 (locus Cucs a.101180) derived from phytozome v7.0 (chr-ID scaffold0092 7; pos 446942 to 447814)
atcgtcttacttcctctcaccatttattttgcaaggtaagtaaatactccatattattactcctaaatccttttgttttatttttttatggtttgatttacaagtgtgggttgaaacaacgaccaaaatatctatcttaaaccaatgtcgcgtttaggaaagtaatcaattatcaatcgtaaggactcacacgaagtcttgttttgggagaaaccaaaaccagtgatcactcccaagtgaacacacaattgagattattatttgatttccaacatctctacagcagttattttttctgtttttaccttgtattagatttatgcttcatataaatttaacccatctcataactcatctttgtagcttcaagaaaataaactccttcccgtcgatgtaggccatagtttgcccaaccacgtacatctttgtcttcctcttcttcttcccttttacatttctgcctttgctgtgtaatttcttcttttttttcttgctgaaaatcgccatggaagatggaaggttttagtcctaccaaacaaacaaagagaaagtgaacaactttacctgtgtgctgtaaacagaaaataaagaaagaagaaaagagagagggtgtaaacgtgtgaggagtagcaaaggctttttctctttgttacatgagagtattattgagggagagtgcgatagaagtgtttcatattaactaagaaagaatcgagagacatattttcatcgacatgcaaccaatctttgaagtgaaattaaagttaaatcataaaatacttatgctatgagttaacaaaaaagaaagagatctaaccaatttgtttgtttcttcttctttttctttccatggagtattatcgcagaaaggag

SEQ ID NO: 7393 - DNA, 1142 bp, Cucumis sativus
  Intron number 3 from transcript Cucsa.122310.4 (locus Cucs a.122310) derived from phytozome v7.0 (chr-ID scaffold0099 9; pos 588194 to 589335 reverse strand)
ttatcgtattctctacaagaagcgcacccgtcgcagtaagatatacttcttctgattttggtggttattattgttattattattttgttcatgaatatgtcgtctgtcaattgaacattctgttaaagatgattggaattttgaatctcatcaaataagttgtcttagattttcatatgtttgattataaatcttatatggaacaagaaacatagatgagctatttggtatgagtagatattgaagaagtgtcacacatgcgggtcaaactctgagactggcggctttggctggttttgcatataggcatggttgggaggttttaaaatggttgtaatcactttatcatcttcgtagatcactccaaaacatgttttgctcaaccaaaatcaacttgactgtttgaaagtcacatttaaaagaattaaatcaaaaggtaaattgatcttgaactataaaagacttgttttggagtgattttgagctcaccaaaactgactttaactctatcaaaatcatcttcttgtgtcgagaactctatatccacttcactactttgcacgagttgaatgatcggctacgttttcacttatttttttctgtttgaaaatcatttgatccactctataacatccatactcaatgctgttttcttcctggttaaatcttatttaccttctttgtaattcatttgaagattctgagtaatgggtaatctaaaacaactattttattgacttagtttgttctgaagtttatagattgcacatatatccaactgttaattggcaggatggttgtagtttgggtaatatactgtcacaacaggatgtatttcagcagaatctattatacttgacctaagtcgataattgactgaaaaatttgtttcttggggtatccttgtaatcttatatgacttggaatgctctcttactataagtcttgagattaagtttagattctctctttatggatgttattggagtctattctcttagtttagttttttcaatatttttgttatatgggtcaatttgcattactttctgtgtccttgatatttatttgcttcttccaaatttgaagtccaatccaattcttgcctattactgcagttgttcagtacgaggcccgctgaa

SEQ ID NO: 7394 - DNA, 1242 bp, Cucumis sativus
  Intron number 4 from transcript Cucsa.286130.1 (locus Cucs a.286130) derived from phytozome v7.0 (chr-ID scaffold0265 3; pos 2283243 to 2284484 reverse strand)
aaattcgtcgtcttccgaaacctgtcattgctgtacaatttctccattttcttttttctttttgttataaaaccaatcataattgaatcaactttaagaattttcaaaaatgtttaactacaaacaagttgcaatcatatttaaaaaaattgtatgcaagagtgtaaaaatggtaaaaaataaaaagtgttaacttgattacccttattgtaaatatgatataacaaaaattaaatagggaataaagagaaaacaagtcaaacctttttattatgaataccaaattgtgatgatgtaaatgtaagtacgaatttagagattatagagaatataaagaaaaaggatacgaacttgataactatggatattgatatccatttagatcatttatacaaattattgaaatatgttattgatattgattttcaatattaatattaatacaaatatgagtatgaatttagagataaatggtaaatgacataaactacaaaaaatgatgtggttttcgtataataattataaaaggactttggttgaaactcatctagaaaaaagagattagaagcacattttgatcttaagttacgaccaattgtaacaaattttcttattccaattgattagttacctatgcctaaacatggcctatggtctctttgtttaataaatacttctattcttttaaattttatgatattacttttttacttttcttaaatcttaaaaaactatagttaatttatgaaatttaaataaaactatttatgaaatttaaataaaataagttttgaatgacggcattttaaaaatatggaaatggacactaccgtagcgttccaagttacaagatgtgttattctaagtcttaatacgaaaatgttgtaaatataataattaaatttaaaacattaacccacgtagcaacatttaaaacaaaatttataaatataataaaatttgtcaaaacctattatttataaatcattcaaataatagtatattgtatttgaatattgtagatgaatgtatatagtgaaagaagtctaatactacataattaattattatttttaaaatggctacttattaccattattttttaaaaatcatattccaattataagaatcaaatggaattaaaactttaaatctaactgaatattagataaaaaaaaattggaggaaaagtagcagttttaaattttaattttgattgtattattatttaggtggcaggtt

SEQ ID NO: 7395 - DNA, 890 bp, Cucumis sativus
  Intron number 5 from transcript Cucsa.260920.1 (locus Cucs a.260920) derived from phytozome v7.0 (chr-ID scaffold0224 4; pos 32211 to 33100)
aacatttctttctccaccatcttcaccaagagcaggtgcgtaaacctaaaccaaacctgctgattaataaccaatggtacttttttttttttagtttttttagtttttgagatttaagctttgtattttgttaataattttgtaacgatgttttgaaaaattaagcaaagctcttagagctagaaattttctaacaaatggtttaaaaaaactttttaaagtttgacttagaaatcaaacatttctttagaaaaaaaaaaggtgaaagcaattgtcaggtaactgcaagcaaacaagccataatatatgcatgtacagttttcaaggaaaatcttatttcagtcttgatttattcacttgcaaaagaatttaatggataaaattacatgtctcacatcatatttatctaaacagaatataataaagagtttgaattgatacacttatgaacctttaggttgtaaattgatgtagctttgtagtttccacctgctaagccttaggttttgatttctaaatattgttttacagtctctcggtattttattattgtactttaagccttaatgtcattttcttctttttaaaaaaataccacatagttgagagttataaatgaatattttcccaattatttacttttccaccttgcactatttactgtccctaaaagtaaaatattatagttcgtctgctcacattctcaccaatgacaagcaccgagacatttcttgcaaaacgtaggcggcaaaaaaggaaaaatgatgacaatattttgaaacacccattttttatttttttaaaaaagaagatactgcatcattggcttctaatttctcattgtatggtcatcaggtgggagcaaacctcttcttgaatcagaagatttg

SEQ ID NO: 7396 - DNA, 2682 bp, Cucumis sativus
  Intron number 15 from transcript Cucsa.308990.3 (locus Cuc sa.308990) derived from phytozome v7.0 (chr-ID scaffold029 78; pos 983864 to 986545)
gtttctctaacgtattttgtaagtcatcccttcgttcatatgatttgagagcctttttcagcctgaatgtggtccgtgtcatcatatccttttatccagcccatgatttaaggtctcaatttctcactaaatgcttaatggattgtttaaaagaaggagaaaaaaattgatagttcttttttcttcaatatctttgcatatttttttgttatagcctatggaccatccgattaatttgcttggggcagagaaaaactttatccttacactcattcatccatcctgggcttttttatttaaataaaattttatccttgcactcacccatccatcatccatccttgaatccttatccaatttttttttttaaaaaaacaagttttaaaatactacttttattttagttttcaaaacttagcatgtatcctgaaaacattgttagaaatgtagatgataaaacatagaaactcatatcaaatatcaaatagtgttttggggattttaaaagttatgcctatgaacactatgccagttgctatgaggttctttattttgttatttactctttataaatgttcttcaaaattccaattatgttgtgacaattttatgaatctggaactttgtgtcctcatatacatacaagtgctacttgagctaagtttttgttagtttagtatcatgttgtcacgtcatgacaattggaaggaaaaataataacttttagaatttgtagttgactgaaaattcaaatctttcaaagaccaaagaccgagctagtcgatgtggataacgatatttacgatattgttgatactaattatgatattgaatagagcactctctgctagtctttcatagtgaaatataatagcctcaatgtttatcattaaacactttaaaaatacaaacttaaaaacaaatgacaagaaacaattatactcattcatatattccttcttcgtttaatgtactcatcgttcagttcattgattctatattcttattcaattcctcgagctttttcatcctccatttctcactctgccccaacagctgataagatcatgaccatatgcacaaatggataatttaagaaaatatttttgttgccaataaaatataggaaaatttacaaatgattttatagaattatatacctccattagtgtagcgagcagctgagctttctcattgcttttttcgttgaatatatcctggacttccttgtattctttttcctgttagaaaaaaaaaaaaaatacaacttctatcttcctttaatacctgaaacttgcgttataaaatcaatagaaatctagctttgaaaaaattagacaaatgaagacgaaatcttgataagatgaatcaaaagaattattttcattgaggaagaagcagcaccttcttttggcagatctgtcccagagatttcagttctctcttgactgtgtcaattctttttcgcacattaccaacttccttacccattggatctcccattacctccagctccttgatcatccacaacattggttatgttccatgtatttttttaaaaaaatgcatatttctttctacattggagattttatttcatatccgagaactcaaaattcaattctatgataattgttgttttttttaattagggttgaaattttaatttagttctcgtatcttttaatgtgttcagttcatgttcacttaaaatgtttaaatttagttcatgactattgattaatctaacaattagtctacatggttagtttttttttaaaaaaaatcccttttcagtcttccataaattttggaaagagtacccaaatgaaaagtgtaattatagttttacagaatctcatgaaaattaacacgaacttggatgttcaaactaaactataaatacattaatctagattctaatgtttccctatctttttctttgtggatagctcttggtgtttccccataatcttttttatccactttgtaaaaagttagtttcatccatttccacttaatgtgtgttgaatttaaaatgaagaagattgaaattttataatgaactgagaaaaggaggagacagaattttggtgataattccgaaattccgagttctttttttccactccgttacagttttattccaggaacaaattttgttgatcctattgatttcaagtcgtctttttttttttcttttcaaaatcatgaaccttttgtcatacataagactaattcttttgtttcttcataaataaattaactcaaatcaatataagaatttacattataattctgcgatcaaaagaggctaaaaccttgtactctgtttacatgcgtttcgtgaaagattaattataaaacttacttcccaaatttgtgccaaccgtttggcttcttcctctgcacgggttaactgaagttcaaccttctcttttacttccattttcttcctctcaatctcctcttctctagcttgcaatgtagatacggtgagcttagacaccgtttcatcttcgttccgatcattacttccttccaatagaactctatcctcgtttcctccgcctccgttcttactcgtcataattttctgttttcttataaatttcgtctgctaatcaatgatctttcttttccacagctcctcggaaagcaagcctatttcttctttataca

SEQ ID NO: 7397 - DNA, 2315 bp, Cucumis sativus
  Intron number 9 from transcript Cucsa.365640.1 (locus Cucs a.365640) derived from phytozome v7.0 (chr-ID scaffold0361 1; pos 3475108 to 3477422 reverse strand)
gagagcaggtcagtttgttaaattgaatcgatatacttgcatttgaatgttatttcagttcttttattctttcgatgagaaataatttgcatgttagttctctttttacttcagtttatgatggcttttttggtgctttaaagttgcaaatatgatatatatagaaagcaactgctgtgaattggatggaagccagatactataatcaccaataaacttatcaaagtgcccttccaatagagaatcatcatggaagaacagtctattattcagttttttgtcaatagaagttatttggttgaagcctttcagtgagtgtagtatttttttggtgttggatcatcatttttcacttacagtgggtgtttaatagcttggttaaggtcgtcggttcttggtctagttgggcattttagaaggtttttctcaattatttcctttgggaaggtgtcgatgaaggaaaaggcaaagattctcatctcattaggtgggagatgattgagaaacttttgtctttagggagtcttgaaattggttacctgagaaaccgtaacaaagcccttttagccaaatgtctttggtgttttttcactgagcacaattctttgtgggggtaggtaggattattgaaagtaaacatggtactcaatcctttgggtggttggataagggggttaaaggcatttattggatttgtggaaagatgtctcaaaagagctccctgattcttccgtgagttcagtgtgcggtgggggaaggaagggaggcgtatttgtgagaagacctttaggtgcaggaaagactgctctgtaggttattccctcgtttgtatcacttatcttctttgaaaaatcattttgtggctgctttttggttaggaataggaattcttgttctttcttctttgggttccgatgtgctcttttcgatagggaagcatcgaacatggcgattctcatttcccttcttgagatcattctttctgctttgggagaagagatggagggtttgactcctttggagcgattcttgtgtaaatctttcctcagtgtctgattagcattacccctgcaggagagtcggtcttttcttcggtttagagaatcaaggtccctagaaaggtcaggtgctttccttggcaggttcttcacggttgcctcaatacgttggattggctgtctaggattttgccttcattagttggtcctttctattgcattctgtgtcggaaggtggagaaagacttggatcaccttcttgagcgttgtgagttggcaagtcgcattttggatgattttcttcaaattttttgcttgtcgtatcgtcatagagatgttagagggatgaatcgaggagttcatcctcaatccgccttgtggggaaaggggccagtttctttggcgtgcttgtgtttgtgccatcttgtgggttttataggatgagaggaataggagggtgttttgaaggggggagtggggagatttggtcagttacgcggtatcattttctctttgggctttgatttcgaaaactttttgtaactaatacttgacatgattttgtatagttgggtccccttcctgtagtaggggtcccttgttttttgacggcttggttttttgtgtgctcgtgtttattttcatcttttctcaatgaaatacttttatgtcaataaaaaaaaaaaaaaaattttcaactattttgttcacttgcaaagatagattaccttgaggagtttcgctttggaagaattctttgagcctttcaagactaattggtttcttggtttttcagtttgagatcacttatagttttgtcttttcttgttttatttggattgttttagttttctacgtagatattctgctttgttgtgtcctcttatatctatctttttgtatcttgagaattagtttcatttcatcatctcaatgaaaagtgaaaaggaaaccatttacccgggaaatgtaaatattttaagaaatcgttattgttatgcattttgacatattgaaccttatcttccattgctcttttagtctagcatcttagctgtacattacttttttgattaatccacattttttgaaccacatactgcaaaggttgtcaatattcttttcttagccttatattaatattgcaacttaaatattttgtttgtctaaactagatttttgatactgcgggtttttagttgccttctttcctactaaaagatgtaaagggttattaatgcaagggtttttctgttgctgatactcctgtttattgctttagtttaaaggatcctcgccatctgcttgctggaataa

SEQ ID NO: 7398 - DNA, 5332 bp, Cucumis sativus
  Intron number 5 from transcript Cucsa.207380.1 (locus Cucs a.207380) derived from phytozome v7.0 (chr-ID scaffold0144 3; pos 211578 to 216909)
gatcaggatgtaagtctgtccactgtaactacttttcttgagaagcatttttttctttttcattaatttttggttgatagtttggaatacacgtgatctatatttggaatttgggttgtttatctatctgcatagacttgtggatgattgacttttttttattatttatttatttatgttgatagaaacaattgagtttataaaaaacaaatgaaagaattgaaggacgtacaaaaaatcaagggtataaccaagtgcatagaaatccctctaaggaaagaggttccaactaaatataaagtaacctgaagaaaaagagaaacgtggaacctcacgaaggactaaatttcacttgggtccttctctatacctctaaacatccaggcttttactaccgttggcttttaaaaggcaggctaggattttgtgtatagtgcagttcaaacacttttggtggaagtttggttggaaagaattcataggacgtttgaggaaaaaacaaccaatctcaatatttttgtagcaatgtaaaatcatctccttttggtagggttttctctgttacttcatttggagggaagggggtattctcgttctcctgctgtgagggtgtgatctctttttcttcattaatgtatcttcttcaggtttctaattaaacgaaaagaaaacttgtatacctttgcctccatattttccagataggcttcctttctggctttctttctttctacattaacttaaattggagtgcattaattcttccagcttggttttggatattttgtttttattcaactgtttgtttgttttctctcttggttatatttcccttgtattagactctttaatagtcatgaccgagtgaagtttttttttttcatttttaattatggatatgatgagggtgtcaacttagttgagatgtctagatgcgcaaatcgatcccttgacttttagaaagctcttgtataatctgttagatctttaatattgcacatgtacaaagaaagggcaagaaaggaattacacacaaaaatgcttccaagaatgctgctgaagaggaggaattcacctgagggcctcacaatgatgtgggtatattgaaagtagaaacaaagaatacacaaattttcatggaaacccgagtacgggagaaaaaccacaatatttttcttattattttctgataaattttacaataggtacaatgtgggagaataaatagaatacacaagggaataaaaaagaaaaaaaaaggaattagggtaagtatttccatagtcttttcataaatacctcaaggaccaagcccactaattctaacactccccctcaagttgggacgtaaatatcaatgaggcccaacttgctaacacaaaagtcgaagtttggtttgagacgcccctggtgagaacatcagcaacctgttggctcgaagggatgtacgaaatgtagatgctctcaatgtcaagtctttctttgatgaaatgccgatcaatctcaacatgtttagttctatcatgttgaatggggttgttagcaatactaatagcaactttattattacagaaaagcttcaatggtaactcacattcttgatgaagatcaaacgtgactttttggagccaaattttctcacatattcccgaactcatggctcgacattcaacctcagtgctgcttctggccacaacactttgcttcttactccaagttacaagattgcccgaaacaaaggtacaataaccggaggtagactttctgtcaacaaccgattctgcccagtccgagccagtgtatacctcaatggtctttctgtctgtctttttaaacatcaaccctttaccaggtgttgttttcaagtatctcaattccattgacagcttacatgtgttcctcatagagagcttgcataaattggctgacaacactcacaacaaaggaattatcaggatgagtatggggtaggtaaattaatttacctacaaggcactgatattgttctttatcaattggaacttgatcattagattttccaaatccttgatttcaaactcaaaccccatcttcttctttagttgaacgatctcatcagtatcatccccagatagcacaatgttattgacatagacaatcagtactgcaattttccctaccttgcagactttggtgaacaaggtgtgatcaacgtgcccttggttgtacccctaagacttgatgcaagtgaaaaatctgtcaaaccacgctcttggtgattgtttcaacttgtataaggacttccaaagcttgcagacctgataattaaattgagtttcaaatcctggaggcagactcgtgtacacttcctctttaagattcccattcaagaatgcattcttaacatcaagttgatatacaaggccaatctttattcactgcaatagacaacaaaactttaatagtgttcaactttgcaacaggagaaaaagtctcagaatagtcaatcccataggtctgagtgaaccgttttgcgactagcctggccatgtgagacaaatataatcatcaataaaggtcagagaccattgtttccctgaagagatggtaatacttgaggggccccaaacatcactatgaataagggcgaagggctgagagggtttataaggtgagacggaaagatggccctatgctgttttgcatgagtgcacatcacaagagaaagaagagatatcaactttattaaataaatgaggaaataaatattttgtatattggaaatttgggtgaccaaggcgaaaatgccaagcatacgatctttttctgaagttggaaataagaagacaacaaactagtcctataacaattcctagagtgagcatcgtcatcaaggagatagagtcctctatcgtgcaaggcaatgtcaaccatcttatctgagttcaagtcctgaaagagaacattatctggtgaaggaatcttgatagtccaaacctctagttatcttactaataggtagtaaattgtaagataagtacatgcaacacattttgtaaagttagaccatcaaagggagaaatatgactcttgcttgcaataggagcaaaggacctatttgcaatccaaatcttttcattaccagcattcgaaaaatatgataaaaaactatcataggattcaatcaaatgatctgtagcccctgaatcaagtatccatggtttcttaccatttatactgaggagacttgagcattgagaagtacatgattgaacaacaacctcaaaggaggagagactagagtcactttgacaattcacctaaggttgtgactggggaacactcatcaattcactcataagtgcccgatgagggttggacttgtcatttggaggacgtcttctgccaattggtcgtctgccatgtaatttccagcacttttctttcgtatgccaaggtttcttacaatgttctcacactggggtctgtttctcattttgcttgtccaatcagaaccaaataatttcacactgaaagtagcaaaatcaatagcatatacagtcacgatttttatagcattgactctgtcttcctctagatgcaccttagaacacacttccatcaaaaaaggtataggcctctgtcccaatattaagccttgcacggtatcgaacttggagttcaaactagctaggaaatcataaacacgatcgacttcctcaatcttggaatattggacatctccatacagacaatcctagataatttcacaacacaggtccatctcttgctagattaaggacaatttgttgaagtatgaattgaaatccaccatcccagtttgcactcatgagcctgtttatgcagagtgtaaagacgagacacattttgtcttttaaaatataatttctaaactgcatccttaatatctcgactctcatgcagtcgtaacatacaactatagttttcatatctggggttcaatactactaattagccgtgatcgaagtagagagttttcttctctcgaaatgtgctattgaggatcctctagtctagatcttgatatctcacgaattagatactcaacccttaaggaccatttacatggatcgagactagaagaaacaattctgacaattcaacttttctcctacaaataacccggtgaaattttccatagagccatacaaatagtttgcagtaattaaagtagggacaaaggttactctggatatatcggtagtttggaggaaatgtcagaattcactgtactagaatttaggagtgtggaagcacctagggctaacccaagagtagcgacttgttgccgaaaatttgtctggagattagtcaactgttgttgtaccattattggggatgaaccacccaaaccttgatgttcataactaggtgatgcatgatgaggaagacccggttgctgcgagaagcttgttgttgcggcaggcaatttacctttgtggtaggtggacaactcacaaatcttggtttcatggtgcatgtttcggctagggttttcatcaaagggttgtggcggcactagaattggacggatatgcaaggattgaagacaatgatcaaatggcagcttggaaagcagtgatagtgacgacatcaacaattccggtggctgaaaaattggcagttttgacagtggaggcaattgtgactgaagcaagactagtgcagaatggcaattttatcttgcactggttgttttttgccaatggcaagattagggtttcgtcattactcactgataccatgttaaacagtagaaaagagaacacaaggtttacgtggaaacccgtagaatatggagaaaaaaccatgacaaagaatttctttgattattttcgcgcataatgaaagttacaacagaagacaaccttataggctctagcaagcccttgtacagaaaaagaaatgaagttccaacaataataggttaatggaagttcataaacttggccttccgagtatcttgtctatgttgagtttcatgattcggaacatgattttcatgattgggaattattgttgattaggcccttttgccatttcaattctcagctgaaagcttgttatttctatatttccacattgatatgttagagacttgtgatatcctggaattgtgttgatttcacatcattttgcacagttccttgcaagttttattagatttggtggaatcgcttgtactttgaatttctcgagagcatttattgcctactgaaatctaattttcttaaatttcttttttgattataaccttcttgaaattttttcattcttcattttgattagattcttgtggagattttaaacc

SEQ ID NO: 7399 - DNA, 10023 bp, Cucumis sativus
  Intron number 14 from transcript Cucsa.011640.1 (locus Cuc sa.011640) derived from phytozome v7.0 (chr-ID scaffold001 54; pos 909676 to 919698 reverse strand)
gaatattgcacgataagtttactggaaaatcacgggtccattctcttcttttctccccatattttgtttcctctattgttttgttatatttatatatgtgatgtatttaattttacgtgaaattacgttaggaaccaaggtagttatgggatgcctttgtcccacgttggttagaatgagatgatcaatgtggtacttaagtagcttgactctcccaccccaatagcgggtttttggggtgtggttctctaaggtgcttaagtactaaacaaattattgtttttgtatatattttttgaattgcatactgatgtaattattatcaattgaaaagagaaatatattacttgatgtatagttcttatcaattgcatactgggatatttttggtaattcagtatgtctgcttataattttgatagaaaattgtcaagaattggttgtctgtatgcttgaaacgacatgtgtctttgtttgtttttaaacagagacaagcctcttaaattattattcataaaagagccttaagctcaaagaacaagagtattatactaagaagaagagaaaagagaaaaattcagtctacagctacaacaaaagctaaaaaacatattccaaacagagggatcaggattcaaaatactaaggagatcaggtgttcttcaaatgcagaattcaaagatttctccatacaggacatctgcctcaattggactaccttcatctgatgagattcaatgtagtttccctcgattgccagttcagaattagtgcttctgtagtttggatgggctttaatatgtattttttccattatgtttttacttttcagccttgcttttgtctaccgtaggtagcttctattgttatttaggttgttactttggtcttttcatgaccttactattgtttttgttctttgtattttggatatgatgagggttctatggggtgtcaacctagttgagatgttcgggtgcacctactgatcctctctctcccccatttcttggcttccctattattctcattgtatagctctcttatactttgagtttattaatagtaaagaagcttgtctcctttaaaaaaaaacagaggagatcaggcaaaacaaaaccataaccgtagaaatctaaatacaaagcataatggaaaattctctcataaaggattcatttgaaactaaaaacttgcaaaaagatgcaaccggctgcctcgaatttgccttgccatattattccagattccagaggaattttgataaaatcttccactatttcagcatcagtgtgaaggatttacttgccacccacataaaggaaaatccaagagagactaaagttggtccaacattgagaaggaatacattaaatgactaaagaattaaattagaataatttcacaatcaacaattattgattttaaatgatctggtattttgcaagactggagacaagaacgtgacttagaagaaatttgggtgcaaccaacttcccaaaaatttgtattagcctctaaaaacagcttggagctgctgaacaagctgatgaaagagaatgggcactattttcctcaagcaaattgggtacttgatcttaaaaaatcttggcttttaaggaacttttgccaaaatcttctttgattttttctttcgaataaagtacttcggaaagggcttgaggtaatgtgggaagatcttaacatatttctttcttttcaaatttgctctggagcttgactttgtcgaggaataaagagaagacgaggaaggggaaactgaagatgaagagttgaaaggaggggcttccgttgaaatgggaaccacattgtctttctttaggaaaatatcagccgaattaatttgagattttaacttcttgttcaaaggattggaggaaagaggatcactaaaagctgggatgctgactggttaaggtggctttccagctgtaaaagaaggcacaactggtattttctcttcattaaaagtgcctctttagcttcctctgtcttgttcctttcaaaactaaagttcttattctctctcctccttaagtgtggctcttcgaatccaatcgtgtccacattgctttccttggagtctaaatttaaattcatggttgcttcaggggaggtattctgtgccagtgaggctaaattccggcaagctccccagatccaaagcttcaaaaggatttcttgtatttgaaggaaagttttggactgatcttagatattccaccccctccgggaagaatgaatcatcaacaactccttcatctttcaaagcttggtttaatctctgccagtcaaatgggtttgaaaaatcctcaaatgataaaccgcccttagttaatggaagtggctcaattggttcaaaatcaccaaagtgtaagaaaaattccctcgattgaagtctgctatttctaatgtagctggtacaaaaccacattgatttctttttacttgaatctttgcttcggaaacatttagtaggtctgtttcataagcgatattttccaggtgatacgaatcaagaaatctgaattgaatcaaatgaagaagttgaagagatgcaatgcttgaaagttgaagagttattttggcaacccaaaagtcataatattaaatgtttaagaattatgtatgtgttttcatttattacggtagttgaaagtgcataaaattaaatgttttgacctttcatttcatattttaattagtataaatagagttgtaattttcacatttaaaagaagaattgggatgaatgaaatatgaaaattctagaatgcacgaattttgtttttgtgtgttcttgagataggatgcacgaatatctggagcattcaagtgagaattgatctgtcttgcttgtggaatgctttgaagattgagagttgatgggagtttctaacattgttcgatccttggtttgttagatcatctaagcaatatgtatctagcctatcttaggggttgaaatcaaattggttttgcggcgactgaggttaggttctttgagtcttgttgtttaacatggttcttagatccaatgcccatgggttttttatcaccagacctccacaataatctcctataactttaaacgtctgattgctccattaatcaagaggttttttttttaaattttaattcatcctccatagccttcaataactgatggtttgctatgttttcttttgctccatttcttaaactataaatgaaaaggacccattacttgccataactcttctcttccgacgaactcttctagagatccttcaaccaatttaatcaaaacattcttggcaaacaatggattattgattattttttgaaaaagatcctccaaggtttttctaatttccttccaatcatcaaacgctaataatcttgaaataatccatagattatcaaagtcttcttttaaaactttcggatttttaatcatccagtgctgagttgcactctgaatttctaaggttagaacaagggaagaagtgctctgttttaccaattcctgaacagaaggttcattaagcattaccttttcagcataacttgtccctagtgactcggaaggaagctgcaaggaggtctagagatgttttcaccaaatcgaataatcatgcttcatcaagaatctttccaacattttgcaaatgaattttcaaccctgttgagagacatcagaataaatatggatgaaggatagtattttggtcctcttccaagctacacacctcgtaacctaacctacttttgacctaaatgttaaaagccttgtacttccagaaccatcaaaatcgtttcgaagaagaaaaccattctctgggccacgtaagaattctgaaatctccttcaagaaccatctgaattgagtgtttgataatgtcaagatcttccgagcttctatgtcttctttatggaagtattctttgtcgaaccaaatatagtaaagggcgttcgctactttgcatctttctacttccattatcaccaaaaccggactgtcacttaaacaaggatggacaagaagaataagctctaggggactttactgaagaagaagaatgagaaacgctggaggaggaaaaggggtcggagtgtggttagggacgaaaggaaggaagggaggggagaggagaggagagaggaaatgtcatcttttgatgtcatcgtagtaaagataaacaacgacaggtctctttgtgaattcccaaaatgcttgtcttaatcataatgcttttatcttttctttctaatttgcattcttttgtactttgagttttgtctgttttcattttatcgatgaaatgttttgcttttcataaaagaaaaagaattcgaaattgctgatatttgggcagaatgttggaagtatctacttggggttcagtttggtggggtgtttgatttcttaatttcctcttggccttccttgagtcatattttttttttttaaaaggaaacgggtctcactattattaatataaataaagagacaaagctcaatctacatgaggattatacaaagagcaaaggggatcaacagacgcatccgggcatctcaactaggttgacatccccttaacgccctcaacgcaaccaaaaagcaacaatacaatatcaaaacaaaaaaccacaaaaacaaagctaaacaataagataaaaagaatttgattaaagcaaaaacaaaaacaaaggcagcaggctgagaacaaagaagaataagccttgattgattgagcaaaaactgtttgaagcagagggctgatccggaagtcctgatcatcaaggacttcaaactggggatactgtaaaggctggccaatataacacaatatcctatgtcgaagatcttcttttgcaatacattttctagaaattccaatccactctgttaaagaccttttcaaggtctaatttaaagatccatcttttcttttttcagattctatagtcctccacagtttcgtttgctattaaaataggatccaagatttggctctcttccagaaagccacattgtaatggagcagtaatacttagcattactttctttaatctttatgcgagaacctttgcaaaaaaattataaattaatgttgaaactaatccagcagagaacgtgaaactgaccttctttctcttgaccatgtgaatttaccgttggaaaacgaaatttctagcagctttgccactctaatgagtttattaatttttctcattccctttgttaatcttcctactggaaatctctcttgaacttttcgaatgatgttgaaatcagcacccaaacaccaggctcctgtacagaggtctgaaagaacatacaactccggacaaatttggtttctatctcaataatgtgtgggaccgtagaagtttgaaatccaacatgtttttctattgattgttctgtattttactgaaagagaatagtctcgtttcagaacttcaataatcgacaacttagattcatcccacataatcagcaaaactcctaatctgccactagcttcaaacaaaagcccagcctattccttttgaactccatactgccttcattacaattggcaatctcttctcttttggtctcctgaaacaaaactctatttggattagctttcgtcaaaagatttttaaaagccaattgtttcgaaaggcccatgaatcctctagtgttccaagatataatctccctctttgctacctctgccttatatcaattcaatttcacatgctgccaagaatggaaccaactctttgggggggggggggggggggggaagggatacttgctgacctgcacaaaatttttttgtctggggaggaaaacaatttaataaaatctgggccgagagagtcactgtgctcttgtttctctgtctctgattgaattatttcttcctcaactggttcaaattctgcactacttacactgatgactgattcaacttccataaaatcatctcctggagcaataaattaatttcttttagcattaggccctttttattttatcaatggaaaatcttattttcttttcaaaaaataaatagggctgttttcaaatatagcaagttagggcatattgtacttttaggggaatcaagtgtttatatgtcgtaaaattccttatcctttttaagtttgatgttttgtgtttacttcctggttatatatttatctttgttgtgttgttttggctatatttttggaatttctaatgtctgtaaggtttgcttttatctatttagattgtatttgttttttgaaaaggagacggtctctttattaatataataataatgagacaaaagctcatagtacaagagaattatacaatgaacatatgtaaccattgatcagggtgtgcacctgagcatctcaactaggttgacacccccttagcaccctcatcatatccaaacaagctaaagaccaaaacaaagaagtaatgtccaaaggcaaaacaaaaccaaaagaagtacaaagaaatacaaatacaaataaaagactagcagacatccatcaactcgcgctaagacaaaacttgagatctttggagaaggaacaccacgaggacgctaagagatgacgactccatcgaggttttatgtgtagaagcttgcttggtaaaaaaactctaggatcttcccaaacacaattcgtgatcgaaatccattttccaaattagattaacgaatcgacgtagacttcggtaatcccataaaattttctagctttaatacaaaggaatgaaaaaaaaatttccaacaggagctgacgaccactaacattggttgattataactccttctttccagtgagactaaagccccttaagaatctgaagctcactcgctacttcaaccttcaagttttcttgaaactgaagcgaactactttctgctatatatctaatcaacttcttctttcacatggcatactgtctgctggaaatcggcttagcacacaaaattacctccaaaaagatcaaggctccaaaataaactctgctaaagaaataagttccagccaaatacacaatcactctatgatcatacagaccataatcattaagtatccagaaatctttatacagatggttcataatcatcaaattacaatagaactccataagcatttgaagagtctggatcaaaactgcaattttttggtacttgtagcaaaaccataacctcccgtcagcttaatttgcttactaactaccaatttttcactttttttattttttatttttttatattaatcaactcctagctcccttttattccaaaaatacttttgaagcactatcacattcaagactactttcaatgctgaagataaagtttaaagaactcaaaggaaagaaataccgcaagcttcaatgatttcatgcaagagttgtgggatttcttctttgaatttctggtgagaaggttgttcttcttctacaccttcctccacaaacaattcgtggacattgctgattatgtttttcaaaatctcataatcctcaacctcttctccttctttaatctcttctaattcctcactattgacacttgggactgattcaacatttgagtcttgatcttcaagactgctattttcatctggattagcaatcccatattgcaccttacttgtattttgctcacacttttctatagagttaaatgtacctcgcctggtattgcaaccagtagcttggactggagagctggaaacttccaaaagatctggatttgcttcagtgaaagaagacttgaaagaatgatgaccctggtaatgcttctcttgagccttgaatgaacaagctccaagagtctcgaaattgaaaagagcagtccaaacattgttgaaggaagtttttttccttataaaatgcttcaagtagaactttggggggcaagaaacccttgtagctatgttaaaccgagctgacaagggaggagaagaacttacttctttgtcgactgactttctggcgttgctgttatcaataggaaaagcagctgctttttttttaattttatttttagagatgggtgacctttgctctccactttttgacttttcacatgccttattttcaaaattggagatggatttcttgtacctttgagcattaatttctttttatttacttaataaaaagtcttggtgtcctttcccaaaagaagttggtgtaccattatttttatttggttgaattatttatttatgtaaccattgatgcattattagatgttatgaactgatagttaccatttaccacctaaacagtgtcattttaagttcaaagggatataactttgtgtagtttgtataccaccaagaggcccttatgctgcacaggagcccaaaaagaataaagagagctgaacttatcatctaacaccctagtatttctttcatccagcgatgccacaagagagcatgggttgcacaactccacaaaatttttcctttttccgcaaaagctgccccaatacaaaccctctatcttcattaatcgacctgcaatgggagacaaccatccaacccaaaggtctaaaaaatccaattccaccctttggacgaaaacttgtagtgtaaaaaaaggatatctaaacttaccctcctgtggtaaagcgggcacatggaaggggaaagattccaattagggaactttctttcaagcttttcctaggttttgagactttataggcaagggaccaaaggacaaacttgtttctctaggaatttttcggtttccaaataagattgaccaaagaaagattaactttagtctttagcagcccctttggtcaactttaggaaagtagacttggtagaaaactggcccgaagcatccaacttcactgtaagctgtctcttgctctattcagttcacctcccaaccagtctgcagttgagcaagagcaatataattgtaaatttctctatcaaacaatctccatctcaaccccagatcccaagcttgattagaatcaacccaacaatctgccaccacaacattcttttttgaggaaataatgagatgtcacagtacaaggaagcaagaggctgggctgcacactacctatcctcccaaaactttttgcatcttccatcacccacctcaaaatgaacgaaggtacagaaatgttctttttgttttagaatgccattccataatctgaagctgcctctgtctttaggctttatagaactccacccgtgctcctccatgccttaaataactctaattactttcctctacaaggcgtttttttcatgacaaaatctccaaagccacctcatcaagagagcagatttcctgcaagcacttgcaacaaattgaagatagacagtgtggacaaatctcgaagggtgtttgtggtagatcaatttagtaaaatgactcatttcttggcttgggacaaatctcgaagggtgattaactttgaaaaagggaaccttgtaataattcacatatgcaaagctagattacctgcaagcatttgcaacaaattaaaaataaacagtggggcttttcaaagtattacacaattggcattctaaatggtcatcctcgaggatgagtttaattttagaagggtggaatatggtctaccgagagtaagaaagagtattaattgtaatagaaagagagttatttgtattagaaagagggttagttaagaaagttagttagaagggtagtcttataaatacaacacttcttctctcatttaggaacgataatgatttgataaaaaattagacttttggattacaccacttcttaattttggacttgagcctatgtattctattccattgttaagtgtattcacatgtccatgtgcatttgtaggagtattttagttgagttgtagcacccttactagattgtaaactgatggcatggtttcttgtattaattatgggtttcaaccatactgattgattgagctctttatttgtagggactagcatacgttgatttctctg

SEQ ID NO: 7400 - DNA, 2370 bp, Cucumis sativus
  Intron number 7 from transcript Cucsa.169130.1 (locus Cucs a.169130) derived from phytozome v7.0 (chr-ID scaffold0116 3; pos 107525 to 109894 reverse strand)
gaattatcatcacaatatttgcagcgtggttacaggtaggatactatttcttttctttatgttcattatttgtttttagttggccttctaaataattgtcatcttctaaactactaaggttttttttagtctttaatctgtttctatattttgtactggaatcctcttttgtaattgtctattgctatcttctgagagatggagagataaaatgaggtttgtgtggtagttcgattttgtatgaagcacactatcattctaataaaagattcataaatttgattcttggatgattactctttgaggctattgaggctacatcagtttgttaacagagcagttgtctaggccaactttgattgtagttggtggaagactggaaactcttggtgacatagatcgcaagagggggctttgggtgttgtgcttgttgccaaacaacccacatatattcaggggaatcttttaaaatcaagattagaaagaagaaaattgaagaaaggattaggaatcgagcaaaatgactactttgatcctgtagcattgaagaaaataaagaaaagagtaggaacccaatgttcattgggaaaactcactcaaagttcagatcaactatcaattcaaaaacgaatcatgggtgaatgagttcaaaaaaaaaaattaaaactctacaaataaaagaatcttggttggaatcttttcaaatagaaaatcatgacttgaagaaaattgaaacatttcgagcagagaagacgtgattgaagaaacgtagcatgggtgaatgagttcaaaaaaaattaaaactctaatttcgaactttcagtcgattgcatggaagctggaagggaataaaaatttaatgcctcaaacgtggaacttttgcaacatgatctgagggaagaatgaagatgatgaagttggttgaaggtgatggtaggcaccgttaaagcttttccgatgaatgtggtgttgtttgcaactggttgccaagtgtgcattacagctacgatttctttagcaaagaagagatgaatgtccgtgcaatttttcaggccttgaagctgacctacccgacctggatgaaactcaccttttcatatttttagcccaatccaacatgtgacccaactccaattgctgtaggttcgacccattccttgtctggtttgattcataagtttttcctaaccagccaatttggaatccatttcttgtgaatctttattattagaatgacaaaaggagaaatactcatatttgtagagttcataatgagtagagggtaaaacggaaattaacctagattaacccaattcttcctatatcgtatgggttttggtaaatttaattatatcaacacttcaacactctccctcacttgtaggcttgaaatttctaaatgtgagatgatatataattacattcgtcttcatccagcggcggaagctgaaaatcctagagcttcgatactatattaaatcacctattgacctaaaagcttaagctaatgggtgaatgtgaatttaattatatatcatctaacactgtaaaacacaacaagtagaaattaattggggagtaaatgatattatagggatttgaacatgttaaatcaccaattgaccgagcttaagctgatgggtcataaatttaattatatcaactctaacctaaccaatcaactaaaaagctacgatattactagagatcaattagagaacttcctactctcatagcctgtgacgtaggcactttaccattagccgagggtctttctttattttgattactattttctttaattgactgggtggagttttattttttatttttttgtcaaatcaagatttgttttcttgattctttagttttaggtggcataatgcatgtaaattggccgttcatttcagtaggcttgcagattttaaatagcagcccttatttttcaagggttacctaaaattttatcttcaatctgcaagcctactgaaatgaacagccaatttacatcttcaatgaaccttcatttcacatggtaagtgtgaaagtgttgtaatattaaattttgccttcacttataaacttaagcttttaggtcatttagtgatttaatattaagtttaatcttttatcaacacttctataaatacctctagcctttgtttttaacggataaagcttgtaagaagaggtcaattgccccaacagtagagggagagctttatggtatcttcacatgcatttcactggacgcctattctgttttatttttgtttctctattttaccactactactaccatttattttatttattccattttcattcctttcatttataatttgtttattttcttgtgcagtggaggtg

SEQ ID NO: 7401 - DNA, 5171 bp, Cucumis sativus
  Intron number 2 from transcript Cucsa.350660.1 (locus Cucs a.350660) derived from phytozome v7.0 (chr-ID scaffold0350 4; pos 145928 to 151098 reverse strand)
gtggagacttcggcggcgactgtggagacttgaaagtgtttatatttaggctttcttacctcttaaaattattgaaaggtttgaatttattttgtaaattgctacttgaaactaatgttttgtctcaaatgcttatgaagaattcaatagagctttttgggtatgccaaattttgttttttgagattgtatgcgtatttcgtagtagctaaatttggaattgacggtatattatctgcttgaaatttatttcttggaagacacttattagtggtttggcattcttttcgaacgaagatttatgtgtgttgcagtgacacgttgttacaattaagtaattgacttctaatatggttacctatggtgggctatttcaaattttcaactatgcatcttccctacactaaatggctgaggattctattgtatgtggtgaagtgttgtttgattgattgagatttttgtttgattgattaaaagctttatttgtttacaaaagttttgaaaggaaatgatttcaaagcttgacatgtgacttgcttattgagtatttttgtacccatttttgcttttccaaaatgattttagatgacagctcaggtgatagttttgaaagaagctttgcagtggtgatttgtatcttaggatttgatggtttgattaagaaattgtttgtaattacttggttcctctgatttgtgtaataagttgtaaaggtataatagttatgcttatgcattattgttttaatagctgtattggaaaatacgggctgttactggtaaattgttaattcagattgcgtttgttaatgattcaggacacttttggaaggatttctgagggatctatttagacggccatagactgtgcagttgctaaaagcagtggatagaaggaaatatatctgcaacattttgcagtttttatccttctctagaccacaaaggaaaagaaaataccgacccacttccatgaattgtttgttactcgctgtgaataatcccaccaagctcaataaattaaagctcaaactagtcagatttgcctccactgcaattgctcaactaaactcatgtattttttcacacagtgatgatgaacaaagtacctcctccttcaacacatctttgaatgttcaatgtaaaccatcaaaggtggtccaagtcctagaaagtctccgaagggagcccaaaattgccttttcctttttttgtgaattggaggaacggggatttcaacataacatctctacttacgcagctcttattaggattttgtgctcttggggtttggggagaaagcttgaaactctgtttttgaatctcattggatccaaaaaagtggaatttgatgtcttagatttgattgaatcacttaatcaagggtgtgtggtggatgcctcatttattcgagtatatgatgccttaatcaaggcttatgtcagtgttaacttgtttgatagtgttgtggatttactcttccgattaggaaggaagggatttgttccacatatttttacttgtaattatctcttgaaccggcttattgagcatgggaaaatgaatatggctctagttgtgtatgagcagttgaagaggtttggttgccaacctaacgattacacttatgctactgtaataaaagggctttgtaaaataggtaaaatggaaaaagctatagacatttttgaggagatgagtggatatgggatggttcctaatgcctttgcttgtgctgcatatattgaagcgttgtgtacccatgattgttcaacttcagggtatcagttgctacaagcatggagagcggaactattcccaatagacacgtatgcttatactgtagtcattcgtgggttttgtgatgagatgaaaatagatgaggcagaatctgtctttcttgatatggaaaattatggagtagttccagatgcacaaacatacggtgtgttgatcaatggctattgcaagaagttgaatttgcaaaaagctttgtctcttcacagtctcatgctgtcaaaaggtataaaatcaaattgtgtgattgtcagctttatccttcaatgcttccttaggatgcaaatgtattcagaagtagtgaaccaatttaaagtatttcagggaaagggggtatttttggacaatgttgtatacaatattgttgttcatgccctatgtgaactagggaaattggaggaagctattgagttgttagaagaaatgacaagtagacagatccagatggatgtcatgcattatacaacaatgattaaaggtctttttgctcaaggaaaaattcatgaagcaatgatgatgtttgaaaatttgaagaaaaatggtgttgagcctgactccatcacttatagtgtgcttgctgctggattttctagaaatggtcttgtatctaaggtccaagaccttctagactacatggaggaacatggtttgagaaaagaccctaagatgcccgacctgataattgaaaatttatgcataggaggaaaagtgaaagaagcaactgaaattttcaatagtttagaagtaaagacggtagataactatgctgccatgattaatgggtattgtgcagccagtgatacgaaatctgcttataaactttttgttaatttgtccaaggaaggaatttttattagaagaagttctctcgttaggctagttagcaggctttgcatggaaaattctagctttagagctattgaggtgatgaaacaacttccagttatgaatgtggaggctaaagaaattgtttacaataaagtcatagcttccctatgccgggtaaaaaatatgaagatggcccaatgtttatttgattgtttagttcgtgctggcttgattcccgatcttatcacttacacaatgatgataaatggttattgcaagattaattacttgagagaagcttatgaacttctgtgtgatatgaggaatcgaggaagggaacctgatatttttgtctatacagttttgcttgatggtggatttaaaaccagtttacaaaagtgctcctctgtagaaatagctttgacgtcttcaatttttaatgaaatgaaggacatgaagatcactccagacgttgtttactacactgtattgattgatgggtattgtaaaatgaacaaccttaatgatgcttttgtcctctttgaggaaatggttgatcaaggaatagaggctgatgcagtgacttatactgccctactgtccagctgttgtagaaatggatataaggagaaggctcaaaccctctgttatgaaatgacgtctaagggaattcttcctcctaataatttctcatatctgttgcaacacgatactttagaaaccaagaaaatttaactttgcaagctctttactgaataacagtgagtagcatgagtccttgaatttttcaaatgaagtattatgcttagtccttgtacacaatgctgttctctttcttttcttttcattcgcttgcgtcctgcctctctcctccttttgaattttacaagttctttgtactctgcaggtcatggattctccacaactgaaatctacttgagcaatatagtgaactctgccttgacctgatgatgaaatagtcaagtgtgtggaattgctgcagtaatggggttggaaggaaattaaaatatacaaaatccaggttcatacttaattattttacttgacctcacgactcatctttaaaattactttcttataatccaagtcaaatattactgggaatgacaagaacttatttgaagcaatatatttgtaagggcttatttgaagtagttagttagttaaacttgtcaatgatattggtaattgggtttctatgcatctttttatgccttttgtggtgccagtaaccataattgagcatcagttaaaagttaagtctcttaaacggtaatcttatggctttgccttgcagtttctgtgaagggaagtcagtctcctctgttgcaaacatggtgcagatgttatccagagctgtaagtttctaatgtttttagttcctactaatcatcaatgtttacaacctaataattccaacgatcctaatctctgattctgtgcattacactttccttttttttttaaaaaaaagaatggtaaaaacttggaacttttgatgttctggaaatggggggatgatcttgataaagggttgagaagttacaggtgttttctatggtgaccgcctgtccaagattaatgtcctacggtttttttacactcaaatgttataggattagatgagttgtcttgtgagattagtcaaagtgtgtgtaagttggtcctgacactcatggatattagagaaaaaaaattcatctcgttttgacttaccatattgctggttttgatcatcaacattaccataaaactgcaaggttttcacattagagtcttgacacaaggctgaatttacagctgctgaataacatgcggagtagcatttcctttttttcggagcattatcttggttccacgtagatgaaaggtgttgttgaggcgcagcaggcgctcgcttaaggctagagcgaggccagtgttttgaaaggaacacttcaggcacgcctaggtgctaggtgcaacattggcgcttcattatacccacggctaaaattgatttaatacaagtgcagatttcttcatcttcaaaaaaccatatgtacgtctcctcctcttttttttcttcttctccttctccttctcctaagacaaaaaataaaggcttcgtgccctaaaaaaaacatgacacctcctcatctcctcttccaaaaataaattattcctcttctttagaaaatagaggctaatttaattccaattcttcgaaaaaaaaaaagagaaatcttttctaacggaaacctttaaggcttcaacttcatctcttctttttgctgaaaactctccaaaacagtagtgttcaacgttccatcttcatcaaatttttggtatgttccaactcctaacttttgtgatcaatttcttaagagtttctaattagtttaattttctaactatttagatggctgaggacagttcaagaaaagatctagcatggaaatatgctcgattgcaaaatgagcgagatgttaatacgttattgtatggtttttgtttaaaagcaactaaaggaggagtttttaga

SEQ ID NO: 7402 - DNA, 370 bp, Cucumis sativus
  Intron number 7 from transcript Cucsa.132970.1 (locus Cucs a.132970) derived from phytozome v7.0 (chr-ID scaffold0103 7; pos 784241 to 784610)
aggtgagttacattttttgaaagattattctgtatacatcattataaaaatatatattttttccttattgtgcaaaataaatctaccaataaaactagaaatagtgtatatatttcctttaaatgtaaattgagtacttttcttttttaaacaaattaatttgtgttgaatttgtatatttacatggagacattttgaagtgcaatagttttttctttttatgatcatttgttatttttcttgaacataaaagaacaattggcaataataaatttcaagaaattataaatgaataatgtaacataatttatccatttatcctcgaatatttgtatgatttaaagagattatttccaaattgcagggtgta

SEQ ID NO: 7403 - DNA, 4073 bp, Cucumis sativus
  Intron number 2 from transcript Cucsa.098500.1 (locus Cucs a.098500) derived from phytozome v7.0 (chr-ID scaffold0092 3; pos 483184 to 487256)
gagcttggagtttgctaacaggtgattaaaatacaacctttccttttttattctaaacatagtaaaattttatagattcgaataaatatctattatatctaatacactctatttcgttgtatttaacccggaaaaagggacgtatcgcaccctctacattgttcatcaatttgctatattttctggtttgaaaaatagattttgaaatgatatccaaatttttaaaaaaccattaatattttgacaaatattaattaacgaacttatgtgcaagaatatattagtgtcagtatgttatatatacacactttctttttctgtttttgggggagtaggtcaacattagacaccgagcacctggacgagcccacaataataataaacaataacaactcaaatctgtgtataaattctatctctgcccaacatcagatatggcacaaaattaaataaacaagtgtcatcattggtagtcttcacactacatggactacgcaccctatctttcgaacctttttttcttttcttttcttttctttttttctaaaatagtagtagtagtaataataataataatgtttcttttggttgcaaatattttagttctcttttctgtggcaggtacaagaaccatggagtcccaaaactttaattttataatcatttagttgatgtattcttgtatttataacaaattgaattctaaacattgttacgtaacaatttagtttttcttaaaatacttttgaattttttttagagatttaatacgtgttttgaaaatttacctttttagtaaaattttaaagtatagacgtgtttgttacagagtttataaaatatactcttttaatttttttaggttttaaactataatttcttagttgtactttgcacatgaccaataatttttaaatttgattctttcaatttaaaatgtcattaatatttgaaataataataataaattatttgtgagatattttaaacccattttaaaaaaagaaattacaataggtgactagtttagcaataataattaaggatataacaacatggtctatcagtgatagacttatatcattgatataattggacaaattttgctatatttgcaattttttttaaattgtgccatatacttaattaatttgaatttaattgctaaatttgtaactatctattttaaaaaactaatgaattagaagaatatattttaaaaatcaaagatttaaacgactaaaattataacttcttttgatcttacgtgttaataaaaaaatattgttgatattattctttggatagattaaattactacaaacactaaaattcaaatacaaaattgttaaccatttcagagttaaaagtcaatttcttacaaatttaaaaataccacattcttataccattgaagtttgcatgacttaaattctttaaaaaatcggagcatgaatactttgtgtttaataaaatgttcttttcatcaatagacattttcattatattattaaattcaaacttcaacattcttataaatttgaaagtagatggaaatttagcaatggaaattatttttgaaaaattcccttttcttttatacatattagaaggtttattcattactgttactgtttaggtctataggaaaaaaaagtgtgaatgcatgaaggagaagtgtcctacaaacacatattgttataaatactgaaaggagggtcaaggtcacatgttaaggttccactccctaaaccaatatagaaaacacaccaatctcattctttgtcataaagctaacattatgattataacttttagatattaaacgacatactatgccccccaatggttacatcatatctcttaatgcccttatgctttttcaactttatattatattttttatgattttcatcttcattgatcttggattgcaaaatatgatcagatggttcaaaataattggtcaaaactatggccccacctccaattatggtgcttctattaccaaatcatttgcttctctctttttccaattcctctgttttggagcacaaaatgcctcattaatcatatgttatttgtttctttatatatatcttgaaataactaatcatatgttgttgtttttcttattattgttaccctttataagtttttgtaagttaagtgtgcattgcttcttttgtttattcaatctaatagtttcggtttaattgttttttttatctttaatttatgcatcttataatataaatttattgatttgatcttttatttaaattgattggaatgacatattttttcaaggtttaagttagcttcacaataagtgattttgaaatagttgggaaaatgttgtttttttttaagaaattcaatttttctctccgaataccaatgaaaaaattaatttaaagtgtgattggggttgaatcttgaatggttttagatatttaatttaaaagttgtattttagagatgctataagttagctaacgttgaaactaatggtatttactttactatgcaaataaatatatgtggattagaatgaaaaaaaataatcaaaacacaagaatccacaaataaaaattcaaaatgggaggactaaagtgataattttacttgttatttcctttttttcatctctttgacaattgataaactccaaatttaagagtggatagctaaggaagatgtgatattaaatgccaaaaatgttcattactttttttttcttttctattaagccttattttattccccttaatccattccaaaaagcacctccatccaacatcatgcatcccaacaaaattattctctctttctcttcattgacacattgaaaatgaaaaccaagcaaaggagacaaaaaaaattgacatactccttgagaaaaaaaaagaaattgcatgaaaatatggagagaggttaagattttgagcagaggattctggtctattcctatttttcaagattctgtatttgattttgaggtaatgggaaaaaagagaagcttacatccaaagctccacaggctttttcttctctctcttcagctttgcttttttatttaatttctctccaaggcaaagaagaaaagcatctcccccaatcacacacttcccactttcttcctcttcattgtaagtataaactcttttcttgccttataatttaactgctcttcctttacactatatattatttcttaatgtctttcactctattttcatatttctttctaaaaacttgtttaaagtttggaatctgtcttcccccatttcaagcatttttcttttggtcaaatgggatatgggttgttcttgttttaagtttcttatccatctcataatcttcttttacattcttccattattttatgctaaaaaatcttccttaaacttgttcactttggctttgttttgcatttatgcattgtgaagatgtttctgttcacctttcctcaaactgggttctccagaaagtttgtgtttctttccttaaaataactgttggtgtttcatctctttcagctttgatggttctatccttttcttcgttaacaatacattctttcatttgtttttgagttctctcctctgtctagtgtgagggttttgattttgatcattttatttttttaaacttctgtttttccaaaagccattctttcttttgggtttctcagttgccttcaattgtctccctttcttgccttctggttttcagattctctaaaaataagtgatcactgtcaattctttcattatttttagctggattaaaatttaaaaccaggctttcaattttttactcccattccttgaaactaagtgattctttcttacccaacataacctcttaattgaagaggaaagttgttttcttttttcagtttgtttaagcattcattcttcattcttggagtgttgaaggaaaataatttcccttttcctaaatcctcatttggtttataccctcttcagaaaaggcttcattttcctaagcctggtaacaaaatgagttttttaacaggatcccccaaaaaatcttggcagcctatc

SEQ ID NO: 7404 - DNA, 2786 bp, Cucumis sativus
  Intron number 1 from transcript Cucsa.364080.1 (locus Cucs a.364080) derived from phytozome v7.0 (chr-ID scaffold0361 1; pos 1640637 to 1643422 reverse strand)
gagccgaaattttcattgacggagagcctaaggtaaaggttcacaactctattcggttcgatttgaaaatttcatttatctggggttttgttaaatgaggatggaaaaaagtatatacagagatatgcgtgttgccttaccgtccgatttttttatttgtatttttgctgctgtcagctgtgggtgttattctgctgtttgtttaatcatgtgtattataaatatacacttgaattttctttgattggaattgaggtttaggaattgaaggttttatgtttaagaatcataagataccatgtaacatgcttttatgaattttataattgatggtatgtgggtgtaaatttgggcgatcgctctctaagcctatccttcatctggccttttactcaaagttggcttgaaatgaacaataagaatggattgattattggaaatttatttctcaaaaatggcaaatgaaacaatgcgaggagagttcctagattcgtggaggtatagcttattggttattgcacaaggttgtatctgatgagtatggacttcacttcaatgtttgggatgctagttaggttcctaatagcacaaactcctcgaaagctattctccaatgtttttcacttcaatatttggtatcttccacttattcaatcctagtatattttaccattcacctacttaggaggagatttttcacaattcactttctagaacagccttattcaatttggagaatctcgaccttccttgtattaactttcttgcattctctttttccactaagatttggtaccttaatatcgttaaggaggtgaaattgttttcttttctggcccaattatccttggggaagttccacaccgttgatggctttaaggggctggccacttttgtgcctgtgttgttgtggtgcgttatttgcagaaggcagtggagtatgtgaactgtattattgtcaggagtatgttaaatagtagctcatttgtggagaatttcttccgaacactccgctgtggtgttggctcccgcgctctgttggagttgtcatggtatgatggagaaaattgtcttacatttgctgttttaggacaaatatcatcttcttgattttttgctattctcaggaacatttggctgttaacctagaggatattttagcgtatccaaggatcttagaaatctttttatgttgtagctaacttttaatgattcattggacccatgagtaagtttagaatgactttctatcagcagttttgaaaaggaaaataaattagttggcttcttctagtagttaaaataatgtctagaattttgggagtacttttgatcgtgtagccaaaacattacattctattatatatatatagtcatttgtacatttgactatgagttttatttttaatttataaccgtgggtgtttaggcacctatgtttgaaagttgacccccaatacttttctgatttctcttgcaatcgtcaaatacaaacagcctcgaaatgatccacaattcatcaaagttttcttggaatacctctgtgttcttgcacacccagtatctctgccgggttgacctagtggtccatattatataaataaaaaatggcttagaggaaataggtacaagctatggtggccacctacttgagattcaatatcctgcatgttaccttgattaccaaatatagtgggatttgacaattttcttgttagattggtcaaattgcatgttagaaatcctaacattcaataactatctcatatttttcatgttaagctgacatgacaactagttagcagtgcaacatggctatatcctatgttggggacatgctgagtatacagtagttttgctgagtatacagtaggtagagtacttcaattctgtgtgtatcctatgttttaagtgtttaacacatggcctcgtgggcatccggctatttgtcttgtgactcttgcctctaggctaacctcgtgatagcacaggctcagctttatttaatttattatgagaatcttattcttttctacatgataagacgtgtctctttggcaatgatcaagaagtccaattgcgaggttacacggcaagatcccagtttttaaagacttcaatattcttgaattgccccaatatttttttccatacatgtccccaccctcaatcttttcttgactgctatctgtatgtattatgtgtctatattatttatcgacaaaaagattgtatttcatggacgagatgaaactacaagaaataagagcaccctacaacaagagttggatgaatactttcaaaattaagtgagtcaaaggagactccaacgtattttatactctcatttccttttgccatcatttgatttatttgggcagaatcgaacacgcaggtttttgctgagtatacagtagttttggggacatgactctgttcgactttttcctcttggctatatcttagtcctgttccatgctcctttgttaattattaattgacttttaacagctcaaggcaactgcattaacacggagcaaaaatctagttatttttgttctttgccttttgatggctcctcttcttcatcagtttgctaatttccattcatttcaattccaattaacactgtaagtttattagcaaactgatggagatatgcaccaattttgtttgaagctgtttatattcattcttttacatcagattcaactaaatggctaacttcatatgttcatctctttacttcaggattccctgatcaaaccagtaaccaggatcatttt

SEQ ID NO: 7405 - DNA, 1091 bp, Cucumis sativus
  Intron number 4 from transcript Cucsa.164630.1 (locus Cucs a.164630) derived from phytozome v7.0 (chr-ID scaffold0115 3; pos 35154 to 36244 reverse strand)
agaccactttactagtaagtgatatagatttgtcatttaaaatatacaggataatattgtatggtgaataatacttcctgatagcacctaccaatggccattatatatttgacaactagaagagaataatggagaattggaattagagatgggagattctctttcttttttctcgaagcaataaattactgttaaattgtaatggtgtttagtaggtagattaaatattattcatactatatctattctttgaatttttaagatattaacttaagactcttctacttctgttagtaagaaaacgttcttctttgaaaatatatcagaggcttttaaagtcaactttcttgcgtcaatttctattgaaaattttcttccgtcgatttcctgacttgcaatctatctgttaaagcatcaaagaatttttttccctttttcttaaataaataaattcttattttatcttgcatagaagggcaagggcaggggccttaaatttcttaccaatgttttcctctgcgtaggaaagagtagtccaatttgtcctcctaccttctgctttctgtacttttacaggtatttagtaaatattcaaagaaatatacatgtttacaatgaattttgtgaactcactttttctatgtcgagaaaaaatcacttcatggacctctaaacaatacaactcttaattgctaaactaatactctgatcaaacaggttttcgactcttgaagatgctctacattttgagtcctataataaatctttttattacatggccacttgttttgctgtcattataacttgtctcggtgttggtttttgaaagagaaaggttttaggtgtaattatttatatttgtgattcaagtcccttggaagttgggctggtgaacaccagggtttcttgcctagtgctcactcctagagagtgaagactgggtcacaaatgtgaagatgttactttttcctgccggacactatattataagttcagttcattttgtgtgtactacctggatttattagttaaaattatcttattttaattggacaggttctacagagaattcaaacagttgtgaggttaac

SEQ ID NO: 7406 - DNA, 2522 bp, Cucumis sativus
  Intron number 1 from transcript Cucsa.157150.1 (locus Cucs a.157150) derived from phytozome v7.0 (chr-ID scaffold0114 1; pos 198102 to 200623 reverse strand)
aggagctccttgcagtaactgggagtcaacatcgggtatgtcttagtaccatgcattttcactttgagttccgagtgatgaaatttgctaaaagtttatgaactcggatgctatttccatatgatttatcccatttgtcaggaacgtccatgaccgaatttatttagttttattttttttgctgataagtttatacttcacaaaattccgaactctatgtcaaagcatatggcaagaattctttcttattttccgaaggagggaaactggaaaacaaaatttgcgtattccattaaagttgagaaatatattcaaagactaaagagacctccattgaaagagaactaaaatgttcacattgacattggtaaaagcttagtcaaaagcgtgactgtttattagctctaaacctaatggaaattcatcccaaaaactgaaattatagttatcttgttgaatttttagatgttggtgatggtgttgtctttttggattaatggcttggtggtgttatctttctgaattgataaacaatgatgctacactcaattgcttataggatagatatagctccctgtcgtttatctttttgaattgatagacaatgatgttattacactctgaagctaataggatagatttagtcaagatatttggtctttggttcgatttggggatgaggacatagtgagatttggtctttggttagatttcacgtgcttgttgcttcaatttcgaagaacttttgtaactattccacaggcaatattttacttagttggtccccttttttcaatggggttgttttgttgggctggtttttgtttgtaggtccttgtatgtcccttttttctcaatgaaagttgttttcataaaaaatagcacagatttagttaagagattagcttgtaagggggcaatctgtagataggtttgaaaagttggggggggggggggggggaggggtggtctttctttctgcatctgctcttttgtgattgcggccaaattttgtgtcaggtgagaaaaacaatagaatttcagggatttggggagatcttgggaggaggtttggttacttgttaggttcttgttctcctggaatcctaccaagaatttacaataaatcatggggtttaaggctttatgatgtattgcactatgaattttgatattcagatgtattttgtattgggatacgatgaggccgctatgttaaggttgtgtcaacctagttgagattgctgattcttcattctctaagatctctatgagcaatagtctcttttcattacatcagtgaaaagttttgttatctttttagaaacaataccaaagaatacaagcctccattaaaagagaagtcaattattcatattgctgagtccgaaggaataagctagaaattaaactaacgtaattaaagtagcaccaactggggtgtatatagatcctggttttacgtactttctacaaaactaaccaaaaaaagaattgtctttggattctagctacctcaaatttctttgtgggagattattttctatttttatccaggattatgatatttatttgctggataaaatctctaaattttttatgattgttcatttgaaaactttaagaaaaatagagcttttattgaagattgtaggaaaaagaaaagttttaaatagtaatcgcaagtctcttccttaaaaattagaggttcttaatttttcagttttttttttatgattatttaaatatactttttagtaggaatttagactcaaggcacatgcttcatgaaaggagccttgattctttgaggtgaggtgctaaagctgtgtcattggcctaggcgcgtcctgtaatgggctttttagaacatggttgtacttgtaactatgaagcatagacactccattttaggagagtatctgtgttcttataaaaaaaaagacgagtatctgtgtcgtacacattccgaacatgtgttcgacatgtagatttctgtgtcctattttcattagtttatttttagttttagacatgtggagaattgcctaggccacttcctagacacacttgggaaatgtttttaagtgaaaattgtccaaccttttatgttggacccaaatttaaatcccaaaccaagtatatgttaatctaagaagaaaaggtaaagttcatttctacaaacaaaaattaaagaaacataaacttaaactctgcaaatctgtttctttgtccattcattattgtttatcctgcatgttttattcaccattatatttatagaatttactgttgaagaaaaaaaattaaaaaaagaaataaaagagaagacagtaggttcattccttattttcttcccccaatagcataaagggatgttagtctaatttggcacgaggtgttgcaaaagtttcttgacaacttaatttatctcccaattttctgggggtaattaacttggattgtttttttctctcatgcttaacctacattatattgttctctaaatatttgtaggtggc

SEQ ID NO: 7407 - DNA, 1225 bp, Cucumis sativus
  Intron number 1 from transcript Cucsa.377890.1 (locus Cucs a.377890) derived from phytozome v7.0 (chr-ID scaffold0380 6; pos 367197 to 368421)
agctcactagagaccatatcaaagccttaatcgtaagttttcgctccaatatatatatttgtattaaatcttcatccacatatcaatacttttattatatcgttcaaaaaattacaaaacatacaaaaataagcatcaaaatacaatctatattgatttatgttaaatcatagacatgctttgctttcaaaatagcaaaatcttccctcactaattttattttcttttatatatttttcataaatatatgttgaaattaccatccatattttaaaccttatataataacggaaaaaaaagaaaaataattttaaaatatgtaaaactataaatttatcttttaattttctattgctggttcgatctttaaaatttgaaacacaatttttaatttatattcttgaattttcaatctaggaataaagtagattgtctaacaaggttagagttcttaaaacttttaagatcgtgtttaattggtatttcatcccttctacattttttaatataaaaaaacttactacatatacatgtaaaattgaaagtgagtagtaaaattttgttttatatcatacaaattagtaaatttataaaataaaaattcaagtatgtattatgacttagtaaacactagttttttttaaaaaatacttaaagttattttatgttgggtcttaaatgagaaatatttgaaataaattatttgcattgccatttaatattttctactaaaattaaatgaaaagaatatatacgttttctttctttttggaaagagtataaaattatattttgattagggttaaaaattaaaaagtttcctaaatttgaaaaaaaattactcgtttagagaagggaaaaaagagagaaagaaacagaatgatgagtcataatagtatactaatatagaaattaaattctatggttgaatatggactacaaataacctatgcttcctttgacctattgattttaatacaactatgattcatctgttcattttgaagtaaaaagagaacaaaaaatgtctaattatttctttatatttatctatacattaaaacttagatattatccttaatattttttaaaaatatagattcacacttcttaatcaaaatttgaaatccataaattgtagaaataataaaaataatataaaaataatatctactatatatatatatatatttgtatgatttaaaaatagtgtttgttttttagg

SEQ ID NO: 7408 - DNA, 2037 bp, Cucumis sativus
  Intron number 6 from transcript Cucsa.205540.1 (locus Cucs a.205540) derived from phytozome v7.0 (chr-ID scaffold0141 6; pos 609573 to 611609)
attgggttagtcacactcatgaaatgattcattttcatatttatcatttgtttgaatgtatccactgtgaaggttgcctagctgtattcccagaacttgaccttccttagttcatcgtgcattagatgggtaacccaaaaatgcctccctctttttgagtgaataatacctcaagaaaagatgagatttctggtgacagacaaatgtaaagggtgtggaagaatcataatacttcatatcatttccatctaaagccatatcattggaaaggctctgattctgttgaactctatgtttatcttagaacctctacaggttaccaactaatatattatataccagttatggttaatctgataatagtgggctccacctcataaccaaattacaatgagagaagtaattcatgtatcttataaatactgcgaggtatattaattcttctaatatgggtacacaaaatgcatctcaagatggtgtctctttgagttcaccgttgttgggtcagattcatattatagggttgagtccatctccaaaaccaatggcagtcgaaggagtaactcataaatcatacaaatatcatgaggtctattttatctttttgatttgggttcataacatgattagtgtttggctttgtattatacttacatcctaatgttggtatgagtctcatcttttcagttactttcgaaatatatttattgggaatctcgccttttttactaggttttgagtgaaggttgcctaggttgagcagtttttaccacctgattacctttttgtgggaaaaaaatgggtgagtggaaatatagagccatccaaaagtatttacaacactatcaagggttttgattcagccattttgaaaagatttacttttctaaaatataaattaattccttgaaccatgaaggaacaatctagcatttgtagaatttatcttgttaaaagtgtcttaaattttctttattagtttatcattacgttgataggaatgctatcaggatcttattagagtattaaggatacatcagtaatttgctaggggtctgttattcttgttggttgtaaaatactggggagagaaatgaagaagataaccattattgtggtgaatgaattagaatttgagagagatctcaagaggggagggttcaaatttctcaattacttggcttattttgtaagtttctttaccttttatactacaatacattacggtcctattttagtttctatcatacttttctttattttggttaaatagaattttaacttcaatgaaacacatttaaaaacttgatgtagaaatcctgtgtcacttgcgggatccaattctgaaaattgttgacaggagaaaataactgacctttttacttggaattgttactgcaactcttggtagatgaacactcaactgtatttggaatttgaggaccatttatgcagacttgtattttcattgagaatttattgtcgatcaatgtttcttcttaagaaaacaattaattgctgcctgatatattgaaacttgcctaacataaactatttccttgaagaaaacattgcaagactgcagttttctttggtgtgcttagaggaggtttaatcctggctaggttttatgtcttgtgagcatttgcgtcattatattttttaaaattcttctttaggcccgatacttttttttttggactggagcctttcttgtaggttagtttctggtttattttctctcaatgaaagtttgagtttcctgatttaaaaagtgtggcccttagttgttacacatcttatagtcaataagcttggcttacaactatttggatatcagatatgcattgtctttttggaaatgtatgtttactaaataggttgatcttttgctttcatcttgaatacatttcatttctcatttcttgttcgaatgattttcatgccagaaatacctactcctccagcgaccaagttaacagaaacttaagtgaacaaaatatatctttacccctcttttttccatttggcagttga

SEQ ID NO: 7409 - DNA, 2952 bp, Cucumis sativus
  Intron number 8 from transcript Cucsa.365040.1 (locus Cucs a.365040) derived from phytozome v7.0 (chr-ID scaffold0361 1; pos 2516971 to 2519922 reverse strand)
attgtcagaagcaattctctgcatacagaatccatgtctggttggttaataattgaagaaaattaatttgacattttttaacattccagggtatttgcatgtttgtatttgtgttatggttatgtcctaatgctgcccacggcatatttatatatttttataagagatgcaagtaaaacattaaaagagaggctacaagatcaaaggggcaggataggaactcttcaaaaaattgtactgcacaaaaacacataagacatcggtataacagattgatgttaaatagttttgttatggcacttagtatagaaattgcaaatgcttggacttagaaaaaaattacaccgtccataaggtggcccaccatcttctagcctcttactattttatcattgagatggtatagccaatatcaccaatttgctacaatcaactagtaaacccttaggcttattatttgaaatcttactataaagtactgtgacaaaaggaagatcaaaaagtgagaattaactactagggttgacctaagggttaagttgacagaattaactgagttatggtttcaaacatcaatatgaaagttggtctggatatctaacgatattgagaaaaacaaaaggaaagaagagaaataggaagccgatgcctcctgttgcaattcagaaacccgccaaagttttaatttgaaaggatggtgagagttagtgttttgaatgatgctcttaagagcatgtacagagaagagggggaaacagcaggtcatgatcaggccttctccgaaagtgattatcacgtttcttttggttatgcagaagctattggtgaatttgagtttgtagatgatcaaagatctggaaaaattgttgttgaactaaactgtaggctgaacaaatgtggggttattagtctttagtttgatgtgggtgttaaggaaattaaaggttggattgctaggttgctcccttcctgacagtttggattcattgtgctgtgctgacatctgctggaattatggatcatgaagaggctagaaggaagaatgttggaggcaaagtccttggtttcttctattgaacatggttttgagcatccattatgaagttttgacctaggtttcaaatagtattacattttctctcggtaaagaaagatcattatcctgtattgaaagaaaaaaagaagaggggaaataaaggaaattgtgacaagataattaacaaaataatatttttgagtaatcatagggagcctcactgaaataatttttttttttaatattaacatttatcagcttgataaaggtgtgagagttgatctagctgttggctaacattttggtagtagtgaagattggatattcatcaagcttggtgctttgtgatgccaaacagtcaaccaaatataaacatggacagtatggtagcatgtttcaaaactagagatgacataagaatgcattattaaaagttggaagtatgacttgttatagacaattggaaagttctcactgcttctggtgagggtgcaggggggagtgaattttcaaggtcttttatttttactttttcccctttactttatatatttgacttatagtttatgcaaggaaactgctgcctcaatattctttatgctactagttggggcctaattttcgaggtcctagttttgcccacttgttcttttatgttttaaacttctttatggttcctcttgtaacttttttgaaccagaaacaagcctctttatttataataataaatgagactaaagctcaaagtacaagagaattatactaagaataaaaagaaccaaggatgaatacaatctaagacaaacaaaaactatacttaggcaacctaaaaacgaattcgaacagaaaattaacgagctaatcaaagccactcaaagacaatacgtttgtagaaaagctaaatacaaagccaaacttaaaatctctcaaaaggagcccatttgaatctaaaatcttgcatgcccaaatcttcaagatgaaaggagaaagagaaacgccaggaagatacaaccagctgcctcaaaactatcttaccaaatgcaatccaatacccacaggaactcaaagaactcttccaaaccacagaatttgttcctaaaagaaatccctagtagttactcccatttggcaagccagacaacgaaaacaaaatacaaaaaaccaatattaagcaagctaccacaatcagtgaggctttacttgagaaatcatggaaaggcagaagttggtccagcaactggggggactttattcaacagctgagattcaaactagagtccacaatcggcaactattgactttagatgatccggtaattgaaacgctaacttccgaaattggtttaacagatttctatcctctagattctttaatcaaaactgcaatatccatgtggatcccgtggattttctttttgttaaagagagaatttccttttcaggacagtgtacagtttataaatgtcatgttgtaatggccttgaagtaacagatctttatatttttaccaggatgcaacaaattgatcaatttttttttaaacttgtattgccacataagacatgcagttgaggatgctgctaagatggtatttgttatgtatggcaaacttggctaataaaagatgtattgtattgatgtctctaatgtgttaatgggaactgtatcttgtatgcctaattgattgagtccggttatcaatttgcacttgcatagcacaagaaacattcaacataaaaaattctgaaaagcatgtagcataaacatttcaatacggtttaaaatgcatggaatgtacatttgatgttaaatattctatacaggcatttaagagggaaaaaatggtagtccgatttcattatttccacatttgtagttgtagatataatgatgctctgttgacttggcaggaactgg

SEQ ID NO: 7410 - DNA, 903 bp, Cucumis sativus
  Intron number 2 from transcript Cucsa.089510.1 (locus Cucs a.089510) derived from phytozome v7.0 (chr-ID scaffold0089 4; pos 927396 to 928298)
aattcaagctgtggtacagaagatactcttttctggttagtattaatttaaatgacaccttatttcatgtttagatgaaatggctttaatttagtagttttgaaaatatgctttatgtaacaaatatttttaattgtttttttggttctactgcattcaaaagtgggaaattataaatattttactctatattttgaaatttttttaatcactttaaagttgtttgttgattagaggaatacttaagtgtattttaagattcattcatcagatgagtatatcttatttttaaggaggtgtatgtcaacctaattcgttgagaagtctggacgtacatatttgtctcatgttaaaataaatcttttcttttcgattacacccataaaagagaaaattgaaatatttttaaaagaggtaaaataaatttgtgaaggaaccatttataaataggacaatttgatgaatatactatctcctctagagtttcttgaaagggggagttttttaaagggttgcttttattaactttttaaaagaaaattctagttaatcaaattaaaaccattcaagaaacggtgccaaactcttctagataactaaactctttcaaaaaccaaaagtgattgtagacaatttgaatttgttttattaaaataaattcaaaacatttgatacacctcaaaaacctaataaattaaataaatcagtttagcgaagtaacttttttttatatttgttaataagttagcgactcatctggctgtatttgattttctgatatgaaaattcccattttgattccacagaattataagcgacttcctgatcaaactttttcacattgatttattttcttaaacttgtgtagatttatcagcaactggggtttcatattcagattca

SEQ ID NO: 7411 - DNA, 5207 bp, Cucumis sativus
  Intron number 9 from transcript Cucsa.291810.4 (locus Cucs a.291810) derived from phytozome v7.0 (chr-ID scaffold0276 6; pos 412682 to 417888)
caagaaagcttatcaaggtctatcctaaaacctcaataacctatttctttttactcaactatttttaatgtgatttttaatcgatttactttttattgaacatgaaacaacaaaaaatattttgtcgtttgacaaaatctattaatgataggtgttgataaatatttgtatttaataaataaatagtatacatgattttggtagaaatgtggaactttttttattgaaagaagtatcaataaaaatgtgggtgttttttatgtacacattgatttttgtagagtttctttgacatcaaaagttgttggatcagacatgttgtcccttgaagttgttcgcacacttgtgaataaacaaaaaagactgattttttaaaaaaactaaaagacaaagaaaaatactagtatacaaatgtcgtttttattgaaaaataatatatgtttgattttttttttttttttaagaataggtgtgtttgattacattaattggtttagaaaatactaatgaaaccattaaatttcaaccaataatatgatattgtccactttgagtatacaccttcatggttttgcttttggtaccatcccaaaaaaaggcttcatatatatccaataatatgatattgtccactttgggtatacaccctgatggctttgcttttggtaccatccccaaaggcctcatatatcaatagagatatagttgtttagtatacacccttatagctttactttcgggaccatcccaaaaaatctcatatcaatggagatatagttgtcatcacttatatacccacaatcatccatttatctaatcaatgtgggactttgatcgcattacaatcctccccacgaacaagttcacattacaatccccccctcccccctccacaaatagtcatccatccgccaagctctatctaagtgaactcctcttcttggagcacactgtacatccaataaagtctaaccacgaatctcatcatgacctacgtttgaggctttcgaggctctattacatctttgttcgacacctaaggatcatactagcatggttaagttagaggcatgactctgataccacttgataggacaacaaacctcctaaatatcttcacaatgacatgatattgtccacctttgggtatatacccttatggctttagttttagtaccatctcaaaaggcctcataccaacaaagttagttgtcctcacttatatacccaagatttacttatctaacctatatgggactctggtcgcattacatctttaattcttctatgaaattaatatttacgttaaaggtccttttgttttaactagtttttcaaagagaaatacactttactccacaacttgcacaagttgctgctattacaaccactagaatcgtccagatcagtaaagtgaattttatcaaacaccttatgttcatctttcatacaactacaacctcagtacacttcaatcaactttatacccttcaacactcaatccacccttctttcaacttcaaccaacttcaaattacaacataaaattcaacaaagaagtaaaatcaccataatcgacattagcaccttggccaataaactccagagcatcaattaccttaccatctttgcataaagccaataaatctattacgacagaagactatatgttggtgcaagtactgaaacatgcagtgaaacaacttaaatggaacttggtcgcctggtgtgaacgcctagactaaacatgtaaacaagtgaacacttggatgttgaacgcttaacatcaaaacaaaaacttcttagacgtaaggttgagttatggatcacactcgctttaagatattttgtggctttgtccagagtgcaaacagttcataattgtctcgtcgtccttagtaggggtgttcacggttcgatttgattcggtttcaagctaaaactacaccgaaccgcaaaatgcaaaaaaaatctcatactaaattgaaccgaaccacacgtttgtgtccaaccgaatcaaaacttaactgcatatacgattcggtttcggtttggtttaaatctcatagaatcttagaccaccaaagcattgagttcgataatttatctttttgttttaaattccaaaaaatctcgggccaccaaagaatcaagttttataaaatttccttttctattttagatctcagtggatctcgggtcaacatatttaattgagctttagaaacaaaacttttatgaacgtttctttaaattcatttaatttttttaattgaagcggttcgatttgattttaaaatcgatttaaaacattaaatcgaaccgcataagaaacgatttcaacataacacaactcgtaccgaaccgcaagtaatcgattttggttcagtttcaattcggttcgactcagttttcaaatattttattaacacccctagtctttaggataaaacaattagaaacttgatcaaagttgcaccagaatcgattgaaaccaacctacactctgaatgacattacttagaaaaaaaatagagataagttttgagagagaattttgtaagagatgtatttttaggatatactgaaatgagaagagtggagaactatatacagaggtgagttttgtaacacctcaacaattataatagcattaacgatcgagataatgcctcaatgtctcaaagactcatcgaattgctgaatgcctcaaagacttatgatggcagcggcgcacatggagatatcaataaatccacacttgtctatctcctcaacctcttcaaaacatggataacctaagcaaaactaatttttataataatatgcataagcaaaggtatctatcaacttgaacctttatgttgcgtatatgatttggaatatagtagagtaactcttagctttgaactctagctttaacaacgtctctccacacaacattattcaagtgtagttcaaaaaagctcgtgctttaacacctagcacgcgtctatctcagtttagtgcattctctagagagttttcttaaaattccataggaagttgtcctcatttccacatccacaaaggtgagtctatcacgagtactcctgtagttaggtactccgcttgacatcaattatagaactcattaagaacaaagttcaaccttttcatttgctttaggatatatcatgttactttcttaagaagaatgaaactcctaattttctgacatgagtctctccatatgatcactcttaatcagttcataccctttgaacttgtttcttgggatctccagtacaagttaggtttacctcacgagtgattcattttctatgggcttcaatcccatttttttagaggtttcaaaaatcttctcttttgctagtccttttgtcaaatgatctgttaagttttcatcagcctatacatgatccactataattgcaccagtagcgagaaacactctaatggtattttctttatgacgtatttggtttggttcacgaatggttaagttccttcctcttcttagtgtcacaaattgtcactaatcctctcgtgatcctccatttggtttggcattttagtactactggggagggatcccctcagccttccagaaatatcattgacaatctgccccattttggacctccaaattgcagatgataatgacttagctttgtaaaaaagtatcattccttctacatctactctcaaatgaggtttttcattgatggtgatgataaagaggtagtgtgtgcttggttctgtggaggtggatggttgtgtgacctattgttatggtgtccttggtgatagccagatgcttcaccttctccaccatggccaccctgtcgtccttatttctgcgaactcgatcctctccatctgaagttagggtgattccttcaaccaagattgtaattgttggagtatgggtcatgcctgatgaatgcggaagttttagtgttttgtgggcatgaatctgtggtgtgagggccactgaatcccacgcatccaatatcctttatttgttttaccacatgacctgatcctcttgcggccgcattaactttcgttaacgccatgaattgcaatagattgttcgtggcggtcatttgtccttgcaacatcaccactaagttcttatcaaaaccttcgtcattacctcacctcgttttgtgtggcaagagccaaaatcgttacctccccattcttcttgattgttggacatcgcgtccagtgtcaccttttttttgggtgtatgtccttgtcagcatatcctacttgcgaacacaacatcaacaatctattgtataaacttgatcattattgtttcacacaccacacccgtctgaccatatggacgatggtgatgctagtataaagatatcaacaaatccacatttgtctatctcctcactccctttaaaacatgggtaccccttgaggcctagaagagactatcagtgcataagggtgaccatttgaagattttgatgacaaaaaattgaatcgagatgcttcaagatttgaaattggtagtgataatagagtttctagtgcgacaagtgcttgaatgatgggagaggaaagaagagagggagagatggaaaagaagagaggagaggaatatatatatatgtgtatataatttatccaactcattaggccatgccaacctctatagtcagctaaatttaattgttttattaccgagagaattagggactaaaattgctaatttaaaatattaggaaccaaatgtatctatttttttaaaaaaaattaggaaccaaaaagtagttttatcttttttttatcattattaatttcaaaccaaagcaccttcaaccacaaacaagataccactattacaaaatatgtattatcaactttgaagtcaaaaattcgattacccataagataatatgtttaacttatgtgcataaataattatttaggtatattttttaaaaataaaagttatattattttgcaggattagaattgttgttcatcatcagatatcaacaagtgatgtgcagtacactttaaagtgcatgaaggtggtgatgaataatacgaatccctatttgttacttttaagtgatgtcattctttaaacttaattatttattataatctcacaaacaccctctccattttgtcctctttgcagcaatttctctgtggagttccacttcaaaaat

SEQ ID NO: 7412 - DNA, 1626 bp, Cucumis sativus
  Intron number 11 from transcript Cucsa.283210.1 (locus Cuc sa.283210) derived from phytozome v7.0 (chr-ID scaffold026 53; pos 422880 to 424505 reverse strand)
ttccttcttggatatccaaggtttctgctcaacaagtaaggttatattctcttaaactaaagatatggggtttcttccttggatgttaagcatatacgtggagccatatgagatgtgattttcattttatttttggtttgaacgcttctctatgcacaattgagatataccatacattttactcatgcatttttttttaaattttcctttgttggagggtttttacttattattgtttttttctttagacaagttcatctagtcttcagatgcctgagcattgtttcaaattgctctaccaggctgcagtataatgttaaatttaaaaccataggaaggttgattacatattggtagatattattagtatcttccatggtaggatctgaattacagaaggcgttattctcctgctttctgcttttaatttttcttaaacgaagtatcaaacaaaatatcaagatgattcttttcgtaaacctttaaacttgggaaaaagcagggaagcatgtaggatgtttaatatgctattcaatccacataagtcctatttgatcttagttcattccttgatagtttctgtaaaatgatgtggaggttacctatcaacagtcaactatagtaaaatttaggaaaattgcaattgatgaccattttaggaataataattaaggatatagcaacattttaaaaaaattacaaatatagcaaaactatcactgatagacttgtatcgttgatagacttcgtatggtctggtctattagtgatagaccaatatttgcaacatggtctattggtgatagatttatatcattggtagaatttgacaaattttcctatatttgcaaattttttaaaatattgctatatacttaattattttgaatccaattgctaaatttgcaactatccctaaaatttatgagcatttcttctggttttctccatttgatacttcaaaactttcctgtttttttttgttggagtttctgtgagcttattaagttagttgaggatgaaatatgaactgtcatggcttaattggaaagctagcaatcagataaaatcccctggctacaatgacttgtggatacatgccttcatggtttacaatgacctgattgtacctatatgctttaacatggatgacttaatgagaaccgagtataatggaataaaagggtgatgtaagaacaaatgttgtaacatggaataatgagatatgaaatgtatttcaactccttggggctggaaatagttagttttgttgtggcctaacactagtaattggaagcactcgttaatagtagagttatgattcttgtatattaggtcaagagcttcatattttctccaatacttcatttgtgatatatgcatacaatctgcaattgaatacttcattttggagtggggttttctttgtttcttatttcctcgtttgaaatacattcgatttctttttctaaaaatttaccgtggacgacaacgtgaactgcgtgtgtgcacacaggtttattgatactttcaatatttcagaactattataccccattaattttgattgttttaatttcttgccttgtagagaagaggaagggctggccgtgttcaaccaggaga

SEQ ID NO: 7413 - DNA, 756 bp, Cucumis sativus
  Intron number 17 from transcript Cucsa.364990.1 (locus Cuc sa.364990) derived from phytozome v7.0 (chr-ID scaffold036 11; pos 2482292 to 2483047)
ccaatctctcagaggttttgattctcataacacttcatgataacttttatacatggcattttttcccacgagaaaccattttcattgtgaaatatcaaagtttaacaagagacactggagaacagccagaaaaaacttcaaggaattaaaaaactccatggaaaataactaagaatgtgaggcttcatgtaaacatgcggaagtccaagtctatgatgcattggaatttctttttcaatttaaagtagtgaagatcttatgactatgaaattggatgaaatctgcagaatgttttgcgagttttcaagattttagttatagtgcttggttggaagtagtttcatttttaaattattactgaaaagccaggctttcatggaaaatgataaaaaaaaaaagcccaacaaactagttaaaaatggtcacggaaactcaaataaaaacatttgaattggtaaaaagtaggatgaattgaaaaatatgagggaatatgtgcagcattccaaccaggccagagctcaaataaaaacatttgagttggtattaattaaaaatggagatacgttacaaaaaactgccgcaatgaaactccatgagaaatcaattaatctttctcctaggtgccagtgaggaggacttcaggactctaattacttgttattgttgatttttaatcagtagttttctaaaaattgtgttaatgaactattttctcttttaggccgagctatcaagtattagagagcagctcttaca

SEQ ID NO: 7414 - DNA, 2368 bp, Cucumis sativus
  Intron number 4 from transcript Cucsa.152030.1 (locus Cucs a.152030) derived from phytozome v7.0 (chr-ID scaffold0111 9; pos 325779 to 328146)
ggtatctcccttctccatactgtagtgatggcacaatgtattcattcactttcctatttaatttgatttggtctttaggttgcatactttatgaattgtcatttattatgttattagactctgacatgagcgtgtgggccgtggttggatagaatagaaaccagaggtgaaagagaaattgagttgtgagcaggagcatggaatttgggaaattatgtgtgtttgttgtttgttgtttgttagtatatatatgtatgtatgcatggatgtatattagtttaggaacaatttctttgaagttccttgtgttaatataacttcctcttaatttttctttttggataaactttgtctttagagttaggtctttgtggttggttgttccttttgttgctactttttgcacttttatatccctaaatgggagtcttcagttttgttagaaggaaaaaaataataataagaagaaaaataaggggaaaaaaggaaaaaaaagagaaaaaaaggaaaaagatctcttagatttgaccaaaagaagttttcattgtgtggagaaaagttacttattgtttccccttttgcactgagtttgtggaatttgaatgagaacaaggctatgcacaagagcttaaaagttttagggttttcaagataattaagccattcttaggatttaggaatgtaacaacactgcatgactgtcacaacaaccattgatgttttcgagctctctatttgctataagtacttgataacccaaaactccatctaacttctgaaaagtgcaaccagaaagcttttgcatataccctcatgccacaactttaaagacctgagaagtttctgtgaggtccttaaaatcaatacctctcaatctcctaatgaactcagtttaaaatcttgtttattttggacaggttttttttacatttttttccctttcttcttctctttctctcccttaaagaatcacataatgttagaaacatccttcaaatcataataaatttcctgacaaacctcttcttcttctagtcttcaatcttctcaagtccccacacaaaatcatgatatgttttcgagaaaatcgccttctctggttgggctgttttgttggattctttgtcgaatggtggtggaagatttagatcttatcctttggggttgtttgtttgctctgtcagtttgaagttgttctttttttcttcttctccatccacaatattgggaaatgggtaggttcttctggtgtttttttttgagaaacatgtgaataatttcattgatggaatgaaattactgaagggcacataagccgtgagtgattacataatgctatgccactgtgtaataagagaagtttgtaatctcgatagtattgggtgaaaccaagcaaacaaagtatacaagaggtgatcaaagtagcgggtgaagtccgattccttatgtttgaaagtacgatggttccgctcattccaaatgagccaaaagaaggctttgatgatgaagcactagaaggtttcttttttgtttttgaaggggtggccaataagaagcatattcaatagagtgagaggattgtttgggaagagcatttggtagttgaaacatgtgagaatcttcttccaaaaggactgagcaggctgaggtttatgctttattgttggggtctttggagggagagaaacaataagacgtttggaggagttgagaggtgtactagtggcgtctggtctctcgataggttcaatgtttctctttgcgcattagtggtgaattctttttgtaatttcgttaattcttattcttattgattggaatgtctttctctaatcggacttttgcattgttggtttttcatgcccacctattctttcattttttttcttaataaaagttggtttttattaaaataataatatcgataataaataaattaaaagtgaaccgctggttcacaaccatcagctttatgtcttgtcttatactcttataggaatgaaccttactggcttgcttttaaaaaatgataaaagaattttccttttcctgttctttttttaaattgttctcttttgttcatttcctttcagctatggcatatggtgggataaattttttcttcattattatttagttggatttgtacttaagtcttgtgtatcttttctcctaagtgttttcatgtacatcatacaggctgcataattaactgaagttcccctgccccctcccaaaaaaaacaaaaaaaatgaagcataatttcttcaaccatttaatattatccaccagccaatttaaattgtagtcatttctgagatgtttttgtgtgtgtttattttaggtatttgaatacaagaaactgttg

SEQ ID NO: 7415 - DNA, 3800 bp, Cucumis sativus
  Intron number 2 from transcript Cucsa.372010.2 (locus Cucs a.372010) derived from phytozome v7.0 (chr-ID scaffold0370 3; pos 39656 to 43455 reverse strand)
tttatgtaagtgcttcatttttattctttttcaccatcccggttaaggttgttgagaatggagttggtaggaacggaagcatgctttctctcatctttaaaatgtgtgattgtcttcattatcatgctaatctttaatttatctgtgactgtattgatattttcttacagctataatattttaatttttttcttgatacacatttgttagactaatgatctgaagatacaaactccacagaggagaaattaaaataaaaaaatttaaaaggagtacaagggaacattaaagcattatagtttagcaaatatcatgtaagaaaaatcaacacaagattttgatgtaactcaaatgacagttgtgaatacaagaagataagttgatgtaattcaagttggacgtaatttctcaaaatgaattctctgccttttctcagctggagaatggctatttattgatgaattgtatgtggtagttacaatcagttttggtagtttggggtataactaatcagttttaaacagctgattagtttcaactaacaacagaatataacagactaactatctaactgtcttgacaacaaactaactatcttattacatcataagtactctatttatagtcgaaaagaaaactaatcctaatcctaattaataaaagaatctagtcctaatttgctaattggatagcgtgtccgtgttcgacacatttcggacatttggacattctgtcacttggtagacacctattcgacgcttgctagtccaacaaatgtattagacatgcatagaacacttgttgagtaaactaaaaagacacatatatgacaataagaatgacttttgagcatggaataatcaagttaagtcttttaagcatataaatgcatcaattcatttactatgaattttcttttactataaaaatgacatatattctaaaaatgaatattttaataaacgtgtcctagattttaaaatatggtgtgtcgtcgtgtccatgtttcttagatcaataatatctcaattctgtgattcctgccaattgttcctagaactaatgtggtaaaaaagaacactgttgtcaaagaatatgcaaatttctcataaaatgaataaaagctcattttgtaagtgatgaaagtccaattgtggttggatttttatttctttagtcagtttaggtatggagtattaacttaattagattaattttaggtgatattattccggagatattattatgatattatttccttagtgtatatcttgtcttctctgattattgaatgagcagtttcgcaggattagagcaagattctctcgaaagaaaagactaggaccaagaaccaaaaccaaaggaccaagaacaagaaaagtagaaagagataaaaaaagaattcaagaatttctaggagtgaaggtagaaagtggaagtgggaaatccacaacaaagtcaagagtaggatgtaataccttaagtttaagaggggggcatgaatgatctggtatcacattctgaatgagagggattctaaggacatgaaaataaggttaagaaaagcttaaaagaattaagagttaatacctataccaacaaggtgcatcttccttttcggtggctcaattagaggaactccaaagttaagcgtgctcagttcggaacaagtctatgttaggtgacctcttggaaattttcctaggatgcatgtgagtgagaacacaacatgcggaaagggcttgtgttggtttgtgggaacgactttcactctaataagcctttaagacaaataagagtggtgttgccaggtcgcagggtatgtggaggaatgttgaggactaggaccaagagcagaaagtggaagtgagagattcattagtctgctaataagtggttttgagggagattaagatctaagccagttataggaataagtggaatgagaaaggaataagttgaatgatattgctttctagcctttgtatttctttgttggataatcattgaaaggtttttcccatgtggttttgctgccttttttctattttctcagttaagtaagccacagtctgattcttttccatatttttctgattttgttgataaagaatttgttcataatctagtggtaaggatctaattttcatcatcttcaacattcattgccaatttcttattggtcttttgcccatcaactttctatatcgctagaatcactataatcaaatttcaaatgtggataatgataggttctttgagaaaatcgagcacgggtgaaattattgtgttggaattctttgtctaaatcacttgaattagaattccaatacttttttttggagtaaatttgactttcttgcctatatcgactgctgtctttttcttcgtcgtcttccttgagcggtaatagtccatttttttgcaaaaccttgataaatcctttttctttttttggaattttaaggattctcccttattagatgtgtgttgttcggcaacgagtgcaactcacagagctctcgcttgtgattggcatcacgaagagttgttttggtcttccaccgatggcaatcattgttggcccggacgactgctctgataccaatttgatgtaactcaaatgagagaaattaattaatttttaaaagttgtgaatacaagaagataagtactctatttataattggaaagcaaactaatcctgatcctaattaataaaagaatctaatcctaatcctaactattaaaagaaactaatcctaatcctaataggttaaaaatttgaccataatattctatacctactacattagatttagaaagagaagattgggaggaagtcttcaattttgaggactcaacatgatttgagccaaggaagacacttgttatgaaaaatcctttgatgatttctctccaataccctccctgccttcccctttccgatgtctctagctacctgttatcaggtgaaaagattgttgttatcagctctctgattgaggtgcgataggaatggaagtggcaagctgcaatgttcttcagttgtattattgcatttggttagaagatgataacttccatgttgaagatgtggaagctgaaagttctttatcagtatttgaagcacaacggagctggttcctggaagcattatcaaagttatcaagaggtccgaaagatggattctttcagaaataggggtagttagaccgaggaagactgaacttgtcgaagttcagggcaaaaaatggatgggtgctatggtatgtcttttggccactgttaggtggacactccatcattcgagtgtgctcgggagaagataaacatggatggatggcctttcacaaaatgctggagagtttcctttcaaaagtagagtatataaaatggtactcacatgaaattggcacgactcttaatccaacacaagctaagagtacaagattcactagaagacttgcgtctagagagagactaggttaaagtttatgttaactgcctaggtatcttttcatttgtgaattaacgattctgttctttaactttgggattaagtggatattttgaaaatttagagattggggacattcatgaaaactcaaggaccaaaagggtactatttccaaatatttttctaaacatgtgcctgctaatttctgggttcatttttttgaataatattcttgccttgtctatgtaacatatcatatttttttctcaatagtatttattcattttttttgtttgggaaaatgtctacttttgtagggaaactcttggtgaagctagta

SEQ ID NO: 7416 - DNA, 3722 bp, Cucumis sativus
  Intron number 1 from transcript Cucsa.291660.1 (locus Cucs a.291660) derived from phytozome v7.0 (chr-ID scaffold0276 6; pos 211299 to 215020)
gcgtcccaagactgcccaagaacccaactctgcaggtttctgctctcctcctgaatctcttcgatttgtttttgttcattattagttttgagattttgaggggttgtttgatttcgtagtttttttttaatttttttgggcgctgtgctcttttggtccctttttgaactttacacttaccagacaattcatttgaactcgattcttctttttggattttttattctcgaatctcgtttatagttattagaagtagaaaggacaaaggaataggaattggggataggatttgaaaatgaaaggatgaaaggtgagatttaagaattacttactgagaattattgtatgaattttcatttggtcttgaacattgaattataggttgaatacagttgtgtcctgcaattgtagatggtgacggtcatatctattagtctataaagtttaaaaagttgtaattacgttcttgaaatttgaattctgattctgtatgccccctatgattaatacctgaataattataacaatgatgtgaaatggctattatattaagcacctttaggttgatttaattggtagaaaaatgacagagggtagagaactaaaaagagtagagtggtctatgaggtatcaaagttgttccttgcactcagaaagacctaacgagatgggagactggggaaaatactctccctgttggataatcaacttctcaaacagagcaagagtttaacaaaccctaatgagaaacaaaacaaaaaccctgcacataacccctgcatagtctcctcttcccctccctacgtaacaacttttacatgcccctacccaattgacgtgggagaagttcctatcttacacatcctctcatatgtatgtcaataggaggtattacaataccctcgaagttgaaactcaccttatcttcaagatggaatgtaggtgtttggttcttcttgaattccacagattcccacatggcctccctgtcttgatggagttttcatttgactaaacaatccactttctttttctctcattccacctcattctcataatccttatggtgtcgttagtagcttggaaccctctgtataagatgggtaatgagactgaattattgtgctatgttcattgcctttcttcaactgataatagtccctcgtttacgaaggtgtgaactattaggaataagagagagaaggcataaggagaaggatttaatatgtgaggggtcaaagttgttttacaagattgtaacatatgattgtctgggaatggggatgcaattcgttggacaaaggttttcgacttttcatcgttttgtcatattgttttgtagttcttttgagtgtagaggagaaggggaagatttcgaattctcttgcctttttttccctaaatagtgaatacaattactatcagtcatcagatacatggcagttgttcttgttgtgtttggtagtttcggatggtaattccaccctatttcttgcttccccaatcctttccaacactggataaaggccacaaaactaaggacaaagtttttcaaacctttttatagcttgggaatggtgacgatattgataggggtatagcttgaggaagaatacttggaggaatgagataagctaccatatgtggactaagttgggcctctattgaattcaatttgatttttatgttgataggatccccaatgcaaaactcaatatctctacgtttttggtcagcaaacttcttcatgcaactttgagctacattctattgttatttcaaagctagcaaggccacatcttaatcaatcaattgttgtccaaggagctatttgtgcctgatggttatatattccgcaaccacttcataattagaggtttttgtaaacagcaaccttaactgttccacccacttctgatgaatgtagttgtgggtagctccacagtcaataagaacaatcacttccttatcttgcaccatcccctataatttcatagtacctggagcatgttcgatcatattgcccactcagcattgttccccacttcgagtgagatagcttctgttgggtagcgttctatgtttctggtttactgggaatgggtagcgtttcaacttgttttatgctttcaggcttacttttcctgaagaataacttttacttgggtttttcccatgggtgggcactgagggggttattttctacagccaaatccatgtcgaagttctggttgtcaacaatatggacctctttcaagatctcttcaagccttaatagaagttttggttacctccacctcccacacttttttctttcttttttctttttctttctttttggtgaaaaggaaacaaaaacttcaggtaactaaatgaaaagtgactaatggtcaaagtatacaacaataacgacaaaacaacgtaagtaccttagtaaaagtcgagcccattggtaatcaactaaatgccccattcttagaccttcaccttcagtgttggagctaagtcattgaggaacgtactcattaacacatcatctgcactcaggaagatccaacaacacagaaatcagggggaaatattgttcttatgccattgataatcaacttctcaaatagagcaagaggttaatgaacactaatgaaagaagcagagcaaacaattattgacaaaacgaagaagaacaataacttccgatagattcacgagcgtcagtttcctatccttcaaccaagcttcctttgtcaaaatttccacacacatttgacattcctctgccactaaacccttgagaaactttgaattggttcctttctccctccatacatcatcaatgttgcacgaccaaactgtcatgggtgaagttccctttcttgcccctcctctcatatgtatgtttaataggtcttacatctagttaacaaatgaaagggaaaattacctttttagtcctcaagttttgaagaatatgtgagttttaaaaatatacttttttagtccccaagtttatagaaataggtttatgtgatctctaagttttcaaaatgtacatttctggtccttgagttttttaaaacaggttcaaaaggtccttaaagtaaattttgtttgatttttaaaaataattatatgatatttaaaattagaaaaaattagtgttaagagcaatatgatttttaaaaattattcttctaatataagtgtcatataattattttaaataatagtataaagttatttgagggatttttaaacctatttttaagaattcaatgactaaaaaggtacattttgaaactcaaggacaaaattagcctattcttataagtctgggttctagaaaggtacatttttaaaactcaatgaccaaacgtacatattcttcagaacttgaggactaaaagggtaaattttttctaaaatgaaatttatgccacttatcttgtccgttatttaccacatttggattaaattagttaatgtttgtgcaatagacaaggatgtcaggatttgtttcacagtcaggactgcatagaatcccagattcacaattctaatgttaataacaaaaacatgatcggaactttttaagattagaaactgaatagacactatttatatttaaccttgattctatatttttgtaataactctggtagaagatgacatatggagtttggttttcagctacagcaccggcaccaggaaaacgtttaaggttc

SEQ ID NO: 7417 - DNA, 1432 bp, Cucumis sativus
  Intron number 1 from transcript Cucsa.128360.1 (locus Cucs a.128360) derived from phytozome v7.0 (chr-ID scaffold0102 4; pos 392992 to 394423)
tcatcctcatattcttcttctcgtcacacttccctgtaagtttcttctcattctgtgattttgtttttgtgccagaagtaatcaacaccgggtaatttgagctagttgtggactgagtgtatatttttcttctgttttggttataagcatcttttttgtagagttcaaatttaaataatacgtaatgcttagctgattaggtagtatggcgatttttactgcattttggactgattttgtttattgcggtttctacctccatgacggtgtggcaagaagagtagttttgagtagtttaactagagcaattggttgaagttcagaggcttcatcttatgatgttgatgtattcaagtgccgtgaagagtagtcttggagtagtttggtattctatttacaccgcaactgtgtaaaacgaagctaaaaaagtattgatcgttcaattcaacacccaaattctagatttttggactaacttgtttattaccaggaataggatcttcgcctaaggaaataagcagaaatcaaactcacaaacatttttttctataaaaaaaaactgataaagaattaaagtcatttaattgcagctatgatggaggataagaatttgttcaacgagaaagccttggaccgaaccaaaccaacaatatcttctccaccttatcttaaaactacaacaatttctctccgaggttcaaagcattgattttcattgtcttcaaacatttggtttccttcttgcccacggctaaaatgtgcttgaaggattttttttttaattatggaagggaagcaccactctcttcgaatcgttgtaaaaccttgatcctaatttcccgagaggtcgaaaaaagatgtcattgatcgtcatgagtattacacaaaacaacagttttgatcttttctttggactcaatataagtgtgagtttcttttaaaattagttgtcagcctcttttcctgatatgctggttgtaggcctaggatatataagcttggaaattagttactgaaaagtaaaattggttctctgtgaattcctcttgaacatgatcctactatgaatgtaccatcatccgcttgaagggaatattctgagctaaacagtattttacaattagccatctgagaagtgaatatatctggggcctctacttagttgttaatggtaactattcaatatgaatgccggagtattttatttcacagatcttctaactcaatatcatataatcctaaatagaaaatagaaaaaatctaggcttcctgaattttgggaattggtgatgtaatttagataatagaattacatatatgtatgcatgtatgtatgtatgtatgattgtgtatatttgttttattgttggtgcatgatcaattattctgttgtgcagggtctggtgagtcacgaacactaaagaaagatata

SEQ ID NO: 7418 - DNA, 9197 bp, Cucumis sativus
  Intron number 10 from transcript Cucsa.159350.1 (locus Cuc sa.159350) derived from phytozome v7.0 (chr-ID scaffold011 43; pos 1523 to 10719 reverse strand)
cataccaatttttagttgggttcctatttttcgtaagacatcaaatctactatcaatgaaaattttctatattgtataaacaccttcagcatttctaactatgaatatccattctccctctcttctctctaattctctattaccagtttttatagtgagttctggttagctttgtgctttaatactatatgcaagattctagttcagcttgactgttagctctttcgattgcattgatattgttctgtgtgtttctaggtctttatgggtggtcttgttcacactaccgtttgcatatcgggcataaatgtgtagtttgtttgttttgtttttgttttccctccgataattttttaaaaaaaatgaaataatgcatacaattttaattcattcgcttgtgaatgtcctcaatgtagaggtagttggtagacacggttgttctatcatatcttcaacctactgatgatatggttcccttttgttcaagtaacgagtctttccttaacctgaatcagatgttatcatttttggaggctatcttgggtcttaggattaataggggaaaatatcaaattttgggtcctaattggaaccgtcttaaggtggaaaggtaggcttccttggtggggtatgatgctggtacctttccttctacctatgtaggcctttgcttaggtcatatcctgagaagccatatatatatacatacacacacatatatatatatatatacattttcaatgataaatgaaatcaagtgaataccccaaacacctaaaagtgattactaaagagatcgtcaattggcaactaagaaagattgttattatatatatatatatataggagcttattaatcgtttgtccatcattgtgatttacttgtatttagttagggtttccatgtattcctatatatattgaactctattgtatagaatgaatcaagtgagttattcatattttcctttaacttcaacatggtataagagcattagagaaaattagggtttgagaatttggaacccttttgtaacatctagagttttgtggagaggtgagtttatagttttgcccattttcgtcgtcatcagtttgtttgttgttcgttagccgctgctgccgccattgtttgtcagttgccgacgaaagtttgttctttttcaactctgcccagcttaaaaaagagcccaaccatctaccacaccccagatttttgaagacatcagtgaggctcatgcactgctccttcctccaccacaagatccacgtgccagtacatgggagcgcgtgggagatctgttttgtacttttttggttgagtttgtctccatttgtgtttttcaattgatctgtgtatttggtttctctgaattctatcgaatgtgagggtctttggaaaaatacccttttggttctccagatttgttgatgttttgttctaatttaggcaaccgttggttagaagcttcctagatcttggttttcgatcccatagtgatgtctcatttggctcaattacgggctccatctatccatgatttgtcaactatgttgaaagaagttccttcatcattagcatggactattacaaccattgctaatttaggtaacatgaatcattgtctctcttcctcctctacacaatgagtgataaactccagtgttactccttatatgactggtaatcccaaattattttctataactttgtcatctacatccattaccagtgttaccctagcaaatggatcaaagtcttttgttgttggatctggtactacccatccctttctctgtctatctgtcctccatttaccccaattgtcatttaacttgctctttattagttaaatcactcgtgaccttaattgttgtgtctcattttatcctggctattgcttgtatcaggatctcttgtaacaaagaagatttttgggaaatgacatgaatctgggggactttacagttttgatcaccaagtatcgacgtcaactatcattgcttgttctggaattgtttctccttttgatgcccattgtcgtcttggtcatcaatcactccctgtcttaagaaaactttgtcctcagttttataacttgttttcattgaattgtgactcatgtcagtttgccaaatttcatcgtcgtagcttcagtcctagagtttacaaacggataaattctccctttgagttaattcattttgatatttggagtccgtgtccaattgtgttcaaaactggatttagatattttgttacctttgggctttgttgatgatcactctcacatgacttggttatattttatgaaaaattgttttgagttactttctcatctcaccaattgtcatgcggaaattcgaacacagtttggtgtatgccttagaaccttgagaagtgacaatgctagtgagtatttttcagaagcactaaattcatactaacgtacacatggaatcattcactaatcgtcttgtgttaatactccatcccaaaatctggttgcagaacgaaagaataggcatatttttgaaactgcatggacattatcctttccaatgcatgttccaaagcattattgggttgatgcaatttcgacttgttttcttataaattgcatgcctttgtttgttcttcaaggttagattccttatcatgttctctttccaacaaaatcattgtgtcctattgagcctaaaatatttggttatacatgttttgttcgagatgttcgtcataatttgacaaagttagaccctaagtctttgaagtgcattttcttaggctactctcatgttaaaaaaggatacaaatgttatcgtccaagtttgaatagatattttgtctcttgagacattactttctttgaggataagcctttcactacccgtttgcctaatatgagttagggggtggaggacgatcattttctttatatattcacatctccaactccatcccctgctttttctatatttgtggaaaggtctcttacacagttactcaaatcatcggttgggaaggaagcttcttattggagtaatgaggtgcaagccaaaacaattgataagtggtcagtgcttcgaaaagttgaccaaactctggcaagagtaagaaaccaccgaaaatcgattcctggcttgaaagtgggccgagtctaagccgttctattgttggtcctaggaaaaggcccttaaaaaaaaaaaacaaaaaaccaatgatgatgccccgactcagttttgattttagggtccaaagtggttcttcaacggcttctttgttttgttttggttctaagcctttctgattcaaggattctggaaccaaggaaatgcgtctatattcgtggaaaggttccttgcacattcacttgaagcatcggtcgggagggagcttcttagtggagtattgaggtgtgaaccaaaacaatcgaaagtggctaatgcttcaaaaggttgaccaaactttggcaagagtaagaaaccactgaaaatcgattccttgcttgaaaattggccaagttgatcaacgatgaaaaccaaattttctttgatcttcgggcgtgtgcatccacgcacgtctctctaatttctcctttcaacaagcttcagcgaaggtgtaaacggacggttgttggttggattccggtacctttcggggtattgttgacgtgggtttatcggccgttttattcaacatttgcactatgggtcttctggtgtgtttttcgtggtttgagattcggtggtgatcgacaactttttgggatttcgagcaaatttttctggaatgtcttattagtttcgatttctgaggtgatgttgtcgacggaagagatgggatctcagtctggtgacacctcggtagtgaagcaacgtgcactggttggactaaaacgtgtgcacgatgtggcggtgaaggcttgaaaggcgacggtaagcagtgacttactttcgaacttcgcatcaagtgcgaaccgggttgggcgacaatttggggttgaaccgggtgaccgcgcatctagtgtatctattaggcccagttgtgaaggaattgggctgccacatttggaagatgggtcggtgtgttcgacgggaaagacttttgcgctgatgtagtcaaatgggcttatgtgtgtaggatagttcgcggtgaacattttggttgggtcttgttcgatagctcgcggtgaacattttggttgggtcttgttcgaagagtagtcattccaaggatgactcggtggattcagtgcatcttaaggctccgaatggcttgttgggttgggagtttgcaacagggtggtggaaccgactgtcaaaactttgtcctgttcctcatgggctactttatttggctcggtttctggtatgtttcttcctttcactcctcctactttcgttagtcaaaaaattgtggttgttttgcctaaggagaatgttgctaaaggagttaaggtttgggaaaattccttagtgaggcagattattgatgtgaaaatgccctatccaatcattcaaaggctaattgagaaaaattgggacaaaattgaaatgcctactgttatgatccttgaaaatgatctcattagctttcagtttcaaaaaccaaaatctgtggactggatcctatcatgtggtccctgacatcttggtggaaaacccatgcttcttcgtaaatgggctcaagtattgtctctgaatcctttgtcttttattttgtttctgtttggattaaattgggtaggatccctatggagttgtggattgaagcgggtcttgctgtggtggaagtgttgttggcaagctactgactttagatttagctactaaggaacatcgtagactgtcgtatgcgtgtgtgttgaattagatttggatttagttatacttgttgagattacagttagtcttagagtggtggactttatcgtgactctacttatgagtggaaaccctgtaaatgtaattagtgtcatggttttgggcttttagttggaaagtgttcaaggactgtggataatacgattcaacagcaggaggttgtgagcgaggaaagacccagtaaggatgatgatttggctattggacttgtgaggatgttgtgttggagtcctttaagcagttagaggaagatgaaacaaagggctctttggataggccctttactcaggtagagacgaatttgggtaaatgtgatgacaatgtgatttataagtgcatttctaaacttttggttgaaaggctcctcatgtggctgcctaattttatcaacggtaatctgtctacctttgttcctggtaggagtattactgataaacttctgttttgccaagagttggttcggggttatcatcttaattctcgtaagccccactgtgttacgaaggttgatctcagaaggcttatgactctattaattgggactttttgtttggtttgtgatagaacactcatagtgtttctattttattgataccttcaacataaattacaatataaaagaagtaaaagaacaagtaaaagaattctaaccctctgcccttcctctctttcaaggaatgttgcagcccaatttcttcaccaaattcttcatgccttcttccctctccaactaactaccaacaaatctaattacctttatgccctaccctatatcaatggtatctaacaatttgctacttgctattggtaccctcatgcggtttgtaagttggattcgggcttgtgttacctcctcaatgttctccattatgattaatgacttttgaggggttgagacagggtgaccccttatctctgttcctttctgttaggtgatggaggttctttctcatatgttgaataggaaccccaagagttttcaattccatcatagatgtgagaatgttcatttgacccatttggcttttgctgatgatcttatgattttataggtcatgagccttttgtttatgcgagaaacgatcctgaagtttggggatctctctagtttggttctaatcgtggtaagagttctttgtttgtggcgggggttgatagtgaaattgcatctctgttggctgatcgtatggggtttgcgcttggtcgtctccatgttttgtaccttgggctttcgttgctctctcgtaggttatggattgctgattgtgttcgtcttattcaacacattattagcaggatttattcttgggatgctagagttctgtcttttgctggttgtttgcagcttgtttggtctgtgttgcgtagtttttaggtctactgggctagtgtgtttgtattgtcgacgggtgtgcttcatgaggttgatagaattttgaagtcgtatctttgaagggggaaggtggagggtaaatgggatgttaaggttgctttggggaaggtgtctcccttttggtgagggtggtcttgctattcatgatggccgtcttggaacattgcacgtatcatgaagattttatggttgttggcttgtttgggttctctatggggtagcttggttggaagcttatattattcttaaaaggacgtcgttgtggtctgttgcttgtgtcttcgggctatcttgtgacatcgcgataggctaaaagaacacattcatttaaaggttggtgatggtagactatgtaaagtgtaacttgactcgtgggtgcaaggtggttcgatcctagaacaggttggtgagtgtgatttttgatgcaacaagtagggaggatgctaggctttcgagttcatcggttcagattgggagtggaggcggccgagggtgtctagggagttggttgatttgttggagagggtttaggttgtccgtccgagtttgagagttggggattggtgggtttgggttctaggttgttaggctggtttcaattgcaagtgcgtgggaggctacttgcgttcacaatgtttgggctgtttgtagggtggggggaatattcccaagcattctttttgtgcttggttggagacttgagataggttggacaggtgggataatttggttccgtcgtcgtgcccaacctatttttaataaccaaacaagcacaaaaggaatgcctgagaatattccctccatcccacaatagacttgcccaatgaacctgaatgaatagcctcccataaacttgcagtcgaaaacccaccttgactacccataacccaaacctatcgatccccaacactcagatatggatggataacctaaaccctctcccacaaatcaagcagctccatagacaccctcagccacctccactccccattcgaagcaatgaactccgacagcctagccttctgcttgctcgccgcatcataaatcacccactacccaacctgctccagaatctcggaccaccctgcacccacgagtcaagtcacactctacatagcctaccatcaccaaccttcaaacgaacgtgctgtttcagcctatcatgctaccgcaagatagcctggagacaccaggaccgatccatcccacaatcaatagactacaacgagcgccccttaagaatatagacctccacccacatagaactcgaatgagccaacaacaaccataaaatcttcagggtacccacaatgttccaagacagcccatcatgaatagccagaccattctcatcaaaaagagatacacctctcccaagcaaccataacaccccctctacccccctttcccgtccaaacatacgacctcaaaattttatcaaccttatgaagcacacctatcggcaagacaaacacactagcctagtatacctgaaaactacgcagcacgaagcaaacaagctgcaatctaccagcaaaagacagaactctagaagcccaagaacgaatttgacaagtaatacgctggataagagggacacaatcagtaaaccgtaacctacgaaagcaaggaaagcccaaggtaatgaacagggagataaccaagcgcaaaacctatactatcagtcaacaaagtagaaaactcactttcaactctcgccacaaacatagaactctttccaaggttagcaactaaacttgaaaggtctcaagactccaaaagagtcacgcacaaaccccaaaggagactcaacagcgacacaaaaaatcattagatcatcaacaaaggtcagatgagtcaaacgaacgttctcaaatctattatggaactaaaaactctggggagtcctattcaacatacgagaaataaccttcatcaccataataaaaaggaacgggacaaagggttaccctttcttaactctttccgactaggaaaaaacccctcaagatagccattaaccataatggagaacatcaattaggtagcacaagccctaatccaactaacaaactgcaaggggtgccaatagcaagcaacaagccaaacaaaaagttccaattaatagaatcataagccttctgaagatcatcatagcacaccggggattaccagaattaagatgatagcctaaccaactcttgacaaagcataatattaccagtaatactcctcccaggaacaatgacagatttataccaatgataaaattaggaagccacgcacgaatcttataattgcatttatagatcacattacaccaagaaataggctgaaaatcctccatacgcttagggatgagaataatcgcagtagtattaacaccatgaggcaaataacagaactcaaagaagtgcaaaacagcatcacataaatcctcctcaaccacattccaaacacctttaaagaaactcactccatggaatataataccctcctcacgatcagtaggagcttgcaaagcactcatacactactcagaccacctatacatagtgtcctcatgcatgggagagagcatcctgtagccaataacctgggaaccgaaactgttatggaaaaaattaaccaccctgcacgtgcctgaaatttctttcagacttgaattttaaaattcactatattctaataaggagagataaagtttatgagaaatagggaagaaaaagtccattttccttgaaataacattctctttttatctcttgttatttcatggcctatatataatgtaggcctctacttatacttttttgacctctttgtttaatcacaactacttttcatgtagttgatcgctttttaaacttttctgtatttagatatccctacgttcagggctgcactggttttattg

SEQ ID NO: 7419 - DNA, 1231 bp, Cucumis sativus
  Intron number 1 from transcript Cucsa.093440.1 (locus Cucs a.093440) derived from phytozome v7.0 (chr-ID scaffold0091 5; pos 53739 to 54969 reverse strand)
aaatctccgaggaatttctgatttcaagaaacgaagttagtcccattcttcaactctttctctcttttcattttcttctgtttgctcataccttaggaatttgagttttttcgatccattgcgaattgctgtatctctggatttaattccttgcttgggacttacttctctattgtatagtttgtacctatttcttaaccactcaatctaacggtgggatctaagttggtgcgggtggttagtttggcgtagattgggaagatttgccaatcggttgaagtttagaccctaaatagaattgtctggcggcggtgtccttagttcttattactggatgggttatgttcatttctattcaataaattattgttttttcgtagaattatagtaaaattgtgataggtgagtgggggagattctcttgatttgagcatgtaggcagatgagtcttgtataatccattgaacttaaaagagaaagactgtgttctgggtaatttacttgaaaactattcaataagtttggatagacctcaaaactttttaactaacttagatgcgagtagtgttttaataaatttgatttttttgtagttaataaagaaggacaagcccttattattactattttcttaaaataatacaaaagcctcacagcccagaggaggcatgccttattttgtgaacctatctttcttttaaggcgaggtgccttttaaaccactggttgtgagggtaatttcgtggaacacagtttattgagaaggaatggcatgaaccagtcaagtttaattcttaatttctaatatggactgaagatggttgcatatctgataatgccaatgtgagaactgaacaaatcccatgtctgcttcatgagaactctttaacaaactagatagatacatcaaaagaaacagggctggttccaaatgactttttaagtgctaaaacaagcgttttcaattgtacaaacagagtgtttttaagtactcaggaagtcattccaaacagaaccttagctgtgtaggactgttttagaatttagtgttttcttttctgtattttgcaatttgaatataatactttggagtttggacgatagaaatttccaattttccattctgaaattggagacaaattccactctttgtgaaatttgattgtacacaaaacacttattaatgcatgttatgcttttctgtctggctcttacaggcaacttaaattca

SEQ ID NO: 7420 - DNA, 6440 bp, Cucumis sativus
  Intron number 1 from transcript Cucsa.340390.2 (locus Cucs a.340390) derived from phytozome v7.0 (chr-ID scaffold0335 6; pos 2852576 to 2859015 reverse strand)
aaagattgctccgagttggcaccggctcttgccaggttcttcttctcttacctttttgctacgtgtagttggattttgaactgtgggaaatcatttgtcccgttttttttttttttttacttcgttagaagggcgttttcttttttgtcaatgttagttagttatcgattttggtaaagaactatatgtagttggatggcagcaagagaattctaatcccgtgtgcttacaagattattgcgcgggtcttttcgaatcgattgaaacaggttcttccatctaccattgctttaaatcagattgcttttgttgaaaatagacaaattctggatgcatcccttatagctaatgaattggtggatgattggtttcatgaaaccaaggaaggtgtgataaacttaatcttgaaaaagcttttgatacggtcgattgggactttttagatgcaattctccagtctaaaggctttggaagggtttggcctaatgaattcatggatgtgtctctagtgccaaattttccattattattaatggtagacctcatggtaaaataatccctactggtggcattagacgaggtcatcctcgttcttcttttctttttatatcggttgccgattacttaagttgtctgttggaccataatctatctaacaatttgatagccactcatcctattggtgcttcgagtttgatcctgaatcacttgcaatttgctgatgacactttgctcttttccactgctgaccgcgctgcccttgcatgcttgtttgaggctatttattcttcgaacaagcttctggtttatctattaatctctctaaaagtgagctccttggcattcatttctctgatcatgatttggattggatggtgactgtttttgggtgtaagaatggacaatggccagcttcttatcttggccttccccttggtggcaactctaaatcgatgattttatggcaatcaattattgagaagtttcaacaaaaactccataattggaaatatgcctacatctccaagggtggtcgtcacacacttattcaagccactgtttcaagcttgtctacttattacctttctctttttcatgcccctaacgatgtgattaattatttggagaaactgattcgtgatttttttgggaccgttcatgtgatgaaaatggtatgcataacgttaattggattactactcagtgcccaaagcttcttggtggttttggcattggcaattttcgtcatcgaaattttgctcttatggaaaagtggatttggaggtttttacacgagtaggatgctttatggtgtcagctcattgtggctgagtactattatccctcatgtgtttggccgactattgttagaaggtcatcaaagtccttgtggagctccatctgccatactgctgaccttgaattttctaggactcaacattgccttggtactggtaacactatccctttttggaaagattgatggcatgattgtggtattctctctgtgatttttcctcgtttgtttcgtctctcttatactcccgatatttctgttgctgaagcatggcttgatgattttgagacttgggacttgcactttagacgtaattttactgatcatgaaatttagtaatgggtatctttgtcttctagcagatttcgtgtagtgcttgattcttggagatgggctattgactcctcatctatgtttactgggaaatttatgattgatgacttaacaggtgctctcgagtcttctgaaagggatttttatttgatcatttggatggatcacttcctaaagagaattaaaatttttcttcgggagcttagtcataaagctataaacactgccaatcgtctccagcatcgtatgccttatatgccactttctccgtcttggtgtattatgtgttgtgctaatgttgaatcccctgctcatctttttattcattgtccttttgctcgacaattttgggatctcattttggaggcttttggttggtctactactttttccaatgacattttggacatcctcaactctcttatggtgggtgtgacccgtttattggttgcaagaaggttatttagctggttgttctttgggctttctttcggactttatggggcgagcttaataggcgtctttctcatcttttagttatttttttgacatggtattgtccatggctttttattggtgcagatttgagcacccttttaagaactttagcttattggtcttagttgccaattggcgctcattttgtaatcacctttaggtgcttggggtttccccttatttcattttatcaatgaaatgtttgtttcctataaaaagaacaatggatggaagatgaaatacgttagccagagttcagatcttgattcaaattttgtattcaacacctaatgtctttggcattccttacattcttgcgatatgacaatgttatacttacttgttttcaaactgtttctaagtgggaagaatatttccacatactcacataccaataccgagtccttttaacatccttgattcttactcatgtgcttgctaacatagaattactccaagctaaagacgcttaactttgaagtttctatgattgagttacaaaaaaattgaaaatgcaccttgttggtatatggtgaatccgtggggcctgaaaagttgttggaattgagttcagaaacagatttggcctctttcttggtgtaggtggtttcggtgtaggtggtttctagaagtgattcttgttgtgtggagatggggagccaatttgagattttctggagagagtggctgccctgtttttttgcttttgggtatgtatagatcagttaatgttgccctcatttggccattttgtcttacatttttgtcacctccttagcagccaaagaaagaaagaagttccttcaaaagtgtatttttgtagtttatgagaaaccagcatatcccctgattgctccgtgctgttgattgaggtaatttttgcaataagctggtgtttctgggtgatattgaagctcaaggtctcaattccactttttaagaatagcttttgaaaccttttaagtttttgtatcaatccatgtcctggtcaaccacaaataggggcgttctttaccaatggtccactaaaggagaaagggaatactgttgcaacaacatattctcaaattaaaaaagggggtgtacatctaagatgtgtgaccaatggagagaagcaacgggttgtgataagaggttggtctttcagctttcgaacagtggtcattaaatttatcaaacacctttttaattgttaagaatcgattaatcaatataagcgtcagagaatcttgaaaataaaaccaagtgtagaggttgttttggagggggatatcaataagaacaatattctcaatgaaccaattaaaagctcatacttcttgtgttttatccccagttagaagtttgagaagaccaccgtgccatgttggaatctcctcccaggatcaacacaaagatgagacacaccctcccgttcctttagaaaataagacttaatgggtaaagaagttttggggattctagtgaacgaaaaagtaaatgaatctcctcccttgaatacattgccccataacaggggcttcgtaaagctggagctctagatgtggaggtttgagattggtagggatgatggggtagagaagaagagagggaggttaggggtggggatgggggaaagatgaagcataaggactagaaactgggtcatagatattgatgttgagaagatgtatggagatttaattttgggtgttggatttgagaaagtagggactgttgtgggggttaacggtaattttagacttgtcttttagtcttttgttaatgacaggctgctgatgtaaaggtcttactttttggaccatttttactttctcaatgtcatttcatttctctattttttggatatgccgaggacactaagggagtgtcaacctaatttagatgttcaggtgcgtctactgattcctagttctttaattgctcattgtataaccttcttgcactttgagctctacctcattaaaaacaaagggtcggtgatggaaaagagaccctagagcaagtgggtaaaaagtgggtaggtttagacaagtgttagaagccatgagcaatttgtggttaggttaatatttagttggggtgggttgagtggagggctaaaaaggggtcgggaagaattgggggccacaagaattttgggatagaaagggataaaagaaaaggaggcaacggtgggtaatgatggtgaagggggaggtaaagggggaagtaaaggaaaaatcaaagggggagtgactttttgtagggacaggattgagtgaagttgctaggaagcaaccaatgtatgattgaattttggtaaagggtatggatatagacccagaatactttatgatttgtcaatatcaagcttgggattttgtgacgtgttgctgggtagattcgctgacgatatggggccatgaacttcgtcatgtaacccaaatgattttctatagtaaaaaagtggtcaatcgtaacagcaccaacggtgaggaggaaaagggtagagtaacgatcctgtcccgtcttacgatgggtggataaagataagaaatctaaagtcttcttatagttcaatcttttcaagcacttcattatctcattcaagcatacacccttttattttgcaaagttgtagaaggttcccttaatgtttctatcttgtctcctcattacctatgggttcagtacacctacagaacaaatcctattcaaggaagtgatgtagtaggaataagatattatgatcaaatccttaatctattaggattaggattagaattagtttgctataaataggattaggattagtttttttaacttattaggattagaatgagtttcttttaaggattaggattatgattagtttgctataaatagagtacttgttttgaagtccatccaatattgatacaatatgtcatctggtccatatctaaacctactaaagaaataaaaatccaaccacaattggactttcattatgcttacaaaattgatttttattcattttatgagaattctgcatattctttgacaacaaagttcttttttaccacattagttctaggattgaatggcgggaattacaaaattgggatattattgatgttgaatattctgagttgcctccattcgtctaacttacttttttatttttaccttcatttttgatttaaaacttgaggacaagtttttttgtttggagggatagaatgatgtaataggaataagatattatgatcaaatctttaatctattaggcttaagattagtttcttttacttattaggattagaattagtttcttttgttaataaagattaggattagtttctcttattaattaggattaggattagtttcttttattaattaggattatgattagtttgctataaatagagtacttgtcttcttgtattgacaacttttaaacatttataaaattctctcacttgagttacatcataaggttaaagtttctattttttttaaaaaaaggaaacgagcctcttcattaatataatgaaatgagactaatgctcaaagtacaagagaagtatagaaagatcttgaatctctaaaggacaaagaatctagaatccaaatatacggactaacaaaacgaggaccaagaggttaaaaaactacaaacaaggcagaaaaacaatcaaaacagcaactgaaaagtttttggttgggttacttttcttgggagaacatacacggtaacacaggattccaggttgaggtctaatagtcttatagtttgtattagcatttattgtgtaaagaggtgatggaggacacatatcctttttggaagtattggttttcttggaaagatgtggttaagattcttgcagacttttagggtgttgttggcccaagttgaggctgacgaacgtgaactatgatggacaaggtcttggtccttttaccatctacattttaggacagaggacgaacgcccaggtgggctgggttttttgctaattgttggattgtctggctagaaagttatggaaggatatttattgcttagtctcacttcaataatacctcttgtttggtgttttactgtttttatgactttttccatttttattcttattacaaactgctaagacttatctatttctcatttttctcattgcctttcatcattattttttttaatctttaattttccctttccttctttcctattttggttcaagagataggattctgccagaagttatctttctttttatcattcaaaattgaagatccttttggggctaaaacattaagctggattaacttttcttgtgtagat

SEQ ID NO: 7421 - DNA, 2714 bp, Cucumis sativus
  Intron number 3 from transcript Cucsa.341100.1 (locus Cucs a.341100) derived from phytozome v7.0 (chr-ID scaffold0335 6; pos 3470702 to 3473415)
cgatcctctcatcaacttgggtgcaaagtaagttctggatgtcccaatatataatatatacactgcatacttaatgtcattatgcaagcaaagcccacaccttttgaggttttgaggacttagtgtccaaaatacatctgtggtatggttagacagtcttagggcacagggtagtggtaagacttttatgtagtgctcggtaaaataggatttgagagggaaggaaaaggagaattaggggagaaactgggagaataactttctcaatctcacaaagtaatctttttcagcaaacaaggaaaggaaacatatatttcattggagtgaatgaggtatccaaaaacttaaaacgaaattctgaaaagaaagtgccagttatatcttgatagagagaataattggaaaaggaaaaaagaatagagttgcactccaatgagaagcaaaagtgaattcaagttcaaataatcttgggaactcctaagctaaacagagactttctctaagtgagaaaggaaccatagaaatcagtttgaaacgccaagttttattggaatacatgagagttgagtaacatgtgactcgtataatcttgggaaactttggaaagtactagttccgctagagaaacatttggattcctctcctgtacttgttatcattaagatttattctaggaaaattgaccagagaaattttgtcttcgagctacatgatatgatctgaataaatggagcgattagttttgtgaatggtcccccatccgactaaaatcgttcgttctcaatagaagaggaggtctagatgtagcaatcttttctacttcgaatttcgcattttaaaagatagatcgaaggattacaggtcttgcacatctttgggtttcttctttctttttcaaaaatatattatcatatgtatggtgaagattataaaatggttgctaatattttaactaataaaactgtaatatgccgtggttgatattttaacaaatgaaacgatactatatttttctttgaaaaaatagaaactatactttagtaggaaatatatatttgggttatttttaggggtgtttgcaaaaatgggtgcattttctaaattgtaagagtagtaaatgtaaaagttgacagtcccctgaaaataaattgtactaaaaagcggtgctatagactctttttttttaattttttattatttaatgtaatttaccttattttcaagtatagtaaaataaataaaaatatttataaaatataacaaaatatcaccatttatctaagatttgatgtgatagactaaataaactactatatgtagttatttatagtctatcacaaataaattgtataaatattttcagaagttattacatacaaaataatgtttcaatatttttaattacatttatttgatttatttatgtatttattagattacaaaagcttatcacaattcacattaaaatgaaaagaattttttttaagagaaacagaacatattctattaatgaataataaaagcagttttgataaaaaataaaaaggaatttcaattttgttttaataacgaacaaaatatcatctcttaataatttagtcagattgacaatttttctaatactaaactaaaagcaggcacgtatttgaaacgacttctcgtatagtatgctttaatgagaaattgtcgtggatgactattttagtaataataattaaggatatagcaacattttaaaaaatttgcaaatatagcaaaaatatcactaatagacttgtatcgctgatagacttcatatggtatatcagtgatagaccaatatttgcaacatagtctatcaatgatagacttatattattgatagaatttgacaaattttactatatttacaaatttttaaaaattgtgctatatacttaattaatttaaatttaattgctaaatttgctactaatgcttggataggatggacaagttttctatgtagaacataaaaggggaggatatcagatatctctaatgccagaagccatcgaatggtcaataccttgaagttacgaaaaaggaaaatcggccatttaactgaagtgcaaatgatttatttcaccggacgactcataaataactcaaaagagaaattagaatcaagaatatgatgtctgtaaattcgcaagataaataacatttaattttggagaatattcgtcacgatctggataaactgtctagttcattctgaaacgatttagaatatatgttcattgagagggctagagtagatagtccatcgagtagaatgatcggaggaagttcttagttatgagttgctcgataggcctttactagtttgatataataattagtgttggttttcttcaaacttaaaaactaccccatactaccccatacgcgttatgcccattaatgggctattttaatgaattgtttttcaactgttaatagtccttgatgtgctgcatttgtctcccatatgattgttactgaaacagtgggtggttttacactcttggtcctctaagaaactcctttttttattattattattctcaaccaatcctttcgattaacgtaatttatatgctaaaaatctcgattcgtttgagttttaatttgatattttactccaacgcttcaattattactgaacaagtccactgctgcagataccagccttctcctcaggaagtggcagc

SEQ ID NO: 7422 - DNA, 4760 bp, Cucumis sativus
  Intron number 1 from transcript Cucsa.340340.1 (locus Cucs a.340340) derived from phytozome v7.0 (chr-ID scaffold0335 6; pos 2801504 to 2806263)
aacgatcttctttcggtaattttccccaaattctctgtccttgtattgcattttgttgttttgcagatgggtttcctttttttttctttctcgatgattttggaagttttgacttgtgggttttgtcttgaatttgatccaagctttgttttgttttccggatttgttcgatccagtttgctttttgtttacatgataaaggaattagacttgttggtttaatttcacctgtggttgtttagtgtagtttagagcttgtggagtttatgggtgaattcaatttgggtattctagacactgttcgagggcttggcaaaacatgattttatctctgtccaccaactgtccaccaactgtcctcttatcttccatttattaccgattatgtaaaggagacgatggctacttagtctttaatttctctgttgctagaagtggtttgacttttgttgactctttacttctcatttcataaaaaaaaaatcgtattgtgacagtacaccgatttatttagatggttctgttatgataaaaataagacggttaggtcagaacataaaattgaaagcttttggactgaacgaaaggttgcagaaaatgatggatgtttttggtgtgacatgatcctttgtgcggtgtcaatgttgctaccgttggtgatactggtaaagcacactatgtggtcatcaggaacgtcagtactttgattctcaaaagtttatcagaagtgctggttgattttagtttagaattgagtaaagggaactatagattcttccataagatacccattttcagttaggggcaagagctcagaatagcatggacagacagacggatggatcgtttataccttgcatcatcatgaaaactttttattatgaacttgtttaattatcttttctatttccaactcttggtctattatctagattgtgaataataagagaatgactgtagaaagactttgtggggatgatgaaggagaagaactgaatgtttagattgctaatggttgcttcttggttctaattaccatgatttcagccttttattcccatccaagctagagtgaagaaacaggttggagatacagagcttagctcctttgattggtgtttgtgtaatggtaggtaaagttcactgactttggtagtcaagggaagctgtttttcttataagaaacaaatttcattgatatatgaaatttacaaaagaagggaaacatgcccaaaccaaaggagttacagaagacttctccaatgtaagctcaaaggagttaagatgcatgcttgcaccaattttttaggctgtaaaattaaatgtgttttgcaaggcagagttttgaaatgctgcttctttagtttgaggcctcaatttctgaaaaaatcttcatgttaatagaggactcggttgtttttataaagttataagtaggaaagttgcttaaccgctaacaaagaagatcttagaattaatgactcatagtaagtctttactagattttttccttttaaataagaaactttgcaactggaaataataacaaaatgggtaggtcattaagagttccaatgagcagataaattgtgtatgccaccgtgtatttattttctctcaaatttttttcaaagaaaaaaaacgactgctttcgaggagaaagaatgaaattagcccagaaaagaatcctttagcgtaagaggctccaacataaaataatgttgcccagcgaataattacaaaaagtcttaaaaaacaaaggctcaaagagaaacatgaaacttcatcaaagactagagatcactagatccctttccacacccatgaacactgttatttctctccacccaaataccccataatagagtgcacaccctagcaaggcataagaagcaccctttccaaaacaaagacaaattgaggaggaactccctgattgagtttatagcactaccccaacgagcatggacttgtgaaagaagcggttctatacttatcttagattcttaagaattcacaactctagagaaggtgaccaattctttcttccgctttcaacaaagaatacaaaagaaaggtcccagcaactaaagtgacatactcgtgagccgatccaaggtgttcacacggccacgaggatggctttggcaagtaagacatgtcaaacaaagaacctgtcaaggtattgttagaagttgggaacttgatggctgataataagatgaaattagctgaatggctttggcattttccctttgaatccaactctctgtgggatagaatcattggtagcaaatttggtcctcattctattgagtggccgttaagtagggttcttggtgctatttggaacttgtggaaggcaatttctaaggagtttccttcgtttgctcatttggttcattgtgtggtaggtgagggtatgggtatatgcttttagtaagatcaatggtgggggatagaccctttgctctttatttccccgtctttatgagtttgttgtttggttaggaagctcttgttctatctctattgagcattgttgatctttatctgataaggaagtgatggacatgtcctctcttttatcgttggtcaaaggccaaaccctttggagggattcttgtttaatttcttgtttcgtcatctgattatttaatagacactattttgtatagactatagttgggagtctctttagtgggactctctcttttctcttgctatagttgacttatgctcttgtattctttcattttttctctcaatggaagtcctttattcttaaaaaaaagaaaagagaagatatttgtgacttctttgtgaattatgcgtacaaccataatctataaaaaatgatacaccatacaaattttgtggtgggatgatgcgtcttttttatgaaaatttgggtgttcagttatagggttactatcttaaaaatccttggaattcaatgatgattccctataacaattaaaaagactcttagaccctatgcaggaaatctttcaaaggaaaggaaaaatttatttggtatgcaatacattaaggccctttttaggaatcctggcttcaaggaatcaaacttttcctagatgcggacacaaattattttgtgaaagggggtattagcctagcttcaaaatggagtctttttgtagaactttttgcaattatgctttggtagatttgggtggcaattgtagtgtgtttattgttaaaatgttgacctaattaaatttaatatatcctagcaggttaagattttgggcaaatcaattatttaagatggtattagagatggaggttcttgtgttcatacctataatgtcatttcctccctaattaatattggcttccacttgtcagcctacaagtgagggaggtgttgatataattaagtctactataactcatcgacttaagcttttgggtgaattggttattgaacatttattatataaacctccttgggtgtttgaggatgccttattctctttcctgttttccttcatttttaaatgaagaacattttttttctaaaacaaaggagagccataatcatggtaaatggtagtaaaagccgtttggacttttcttagtggtatgaagatttgtttgtgggttccttttgaaggttgtggttgattgtggaggatttttttcatagtataatttttgtttgcaagctctctattcttttgggcaaatatattgaaaaggcctttgttctgggttaatgtttatatacatggctatttttctttataggtatacttgctgttatgcattttacccttttctttttcactcccttttggagttggagtttggatctctgaatttttctccttttcattataacaatgagaagttttttcttttttaataatctttctgaagctataaaaatagcaggcctttttatttattttttaaataattgtaacaagtgggtggtttgaaacaaagaggaattgttctctttcaggcttgagattggtctttgacttaccttattttggttttccatatccatctagttttctctaaatcgatgaaaattgttactcatttctgtctgtctgtgtgtgtggggtggggtgggtaatctagagatgggtagtaggacgtagctacatgtttagtttctactgtatgcttttcgagggttttggctcttataatttttttttctgtttttgcatattggagccctttcttgttagcttcattggtttctgatgcattcttatctaccctcttctgtgatctactttttgtttgaaataatgtaagtttcctataaaaaacagcataaagagagaaagagaagcaaagaactattctaattgacagcatgcatttgtgctgaatcaattatgggaaagtttaatatgaaatggaagttaacttaagacttggttatgttttgggcttcactgtggaatttttattatgccatgatattttatccttcactaatgctttagcattaatttcattttaggatgtatttgctttttcatccatacgtgccttattttagttttgggagattttcgaattaatttctaaatgactaatatacaagaagatataatacaagaaaattcaaacaaggaaattagctaataaatccaaacgaaatagagataaaatattttacaaaagaagagttaatctacactttcattaacggaacttgatattgttttgaaggattcctttgagatccgtcggggtcaaccttctgg

SEQ ID NO: 7423 - DNA, 3869 bp, Cucumis sativus
  Intron number 2 from transcript Cucsa.242840.1 (locus Cucs a.242840) derived from phytozome v7.0 (chr-ID scaffold0204 7; pos 2485496 to 2489364)
ttttacagctggagcatctgttcttggatataaaggtgaactttctactctttctagatctggatgtagttgcagtttgattttcattagcaaatgtgaagttaatgtgtaagggttgtttcttctttttctccgcttttctctactgaaggatgggatgaagttatattttatgaacgtggagagattttttttgtctaactgcagtttatctggcatatttgcacctgtggatgggtgataagcaacctcaaattgattcatgtttcagtatataaatgctaattccaaaaaagttagcccatttatcatttagttcactcattgttgttttccatctaacctctttggtttccttactctcaacctttttatgaatggttcactgcaggaggattgaaaatatgtttcttaagctcgattaattaggagtcttttctactgtgttttttgcatccttttggtgttctctttctaagtctttctgtgattatgatcttgtgcatattttagctaattagaagtcttttctataaaccctttggcctagcggggatatctcatctcacctttttgtatgactttcttcctactaacatattccttgttcgaggaaaaaatagacaaattatgaaacataactgatattttaatgttcaatactgacacggttacaggctaagcaagtggaagtagcactacggcataactgtgtgaaactgatacagttactcatgaaactttagaaggttttgaacgctcccaactagcatttcattccaatacaaagacaacatctacttgccacaccccctttgcatctatattgacatctaactagcatgcacttaatgcaacaaaaacatagaaagacaaaaatgaaatttctttcctgccctgtttctctcctttcttttatattttcttccttctgatgttgagtgatgggtgtgtgacgtgatgacacgatgaaaaaggaggaaaatccaaaaaaagaaaaaaacaagtggagaggagaggaagggagagcttttgtgtttgcttccttcaaccattttctcatttttcgttgtttttccctggttattcttttttctcagaaatctatagacctctgttgtcctttcctcctttctgtttggcctctggtttgccaccccttttttcttgctcgtttgtttcttgtttctgtattcatttgacagacagatgttaatgagtttttctgtgtcatggttgtactttgtgtgcaacagtcactagcccaccccctcttcttttgttagtgttgacgggcaacttagtgtttcccaatctgtaggtgaagatatcctccttgttaattctagcctcttgtagtcattattagtgaaaataattttgatttaaggaggtttttgttaggaaccaaggtagtatgggatgcgtttgtcccacattggttagaatgggatgaccactgtgggatgaccaatagttggcttttggggtgtggttctccaagtttcttaagtacctaacagttttactacatttaatacagtcgaaaaattttcctttatttacagtcttgagacatttcatggggggatccaaaatgcagttcttgggtcaagaactgaagaagacggttctcttattagagaatatcttcctcttgtgaagtagaagtgagagaaattgtaggggcgtcttatttctcttcatccaattgatccatttttagtcctcaaaatgaaaaagaagaaagaaaaattgaatgtttctactagtccattaaattggaggaaatagaaactttcttttcttagatgatgacttcctcttaatttttgttaatttactaagtattatgctagttcttatcatctgttaattcttattagcactaatgatgtggaactaaattgaaaattgttgaaacatcagggactaaattaaaaattttacataacaaagcaagcataagtagtcaaggaaattatagaaatgttttggagctctattaatagaggttgggatgaagtgaagttttaggaagatcagatggtattctcactctttgaaatgaagataaggtgaaggtaaaagatggcaggatatcttcaaggaatcttttctattcatgtgaaaatagtgttgtaagatggaaaataatgccgagtgtctaaattttgaagataactttattcaggaagagatcttgaatattttcagcaagtagtatggtaagaatacagaagtgttgatcattctcgagatttcttaatctcaaaggattatgggaagtggaaactctagctcacctattcctccattgttatccttgatggcttgagagaccacatgtagaagattacatagtgtatcatcggcaagtcgatatgttgaagatactccaagattttttgggagagtcacctcaatttttttgtcttattaaaagcaaagtgctgaaagagtggtggactaaccaagctgtctaccaagtcgttgctctaaggtcttggctaagaggttaaactgtcagttgcttgacaaaatgtcaacaagtcaaaatgcttatacggaaggaccgcaactaattgattctatctttttcttacttgggcattcacttgggcaataaatccacaacgctagagttttaaaagctctggaaggaaaatgagtcctgtataagttagaaaaatggaagctttacctttctaattgaggaaattttctctttgtcaaacagttcttgccaccttacctgcctatatttcatgtcaagttttcctatgcttggggaagtggtggtaagttttggaaaaaaagttgaagatttttgtagggatggtaattcggttaggaagcttagccacttgtaaactgtaatgtggtgttttacaactgggtatggcacttcttcaatgaatcaaatcagttttggcacaaggtgttctctagcattttgagaaggaagacgagtgtttactttttgagatttcattgtccactatattttattggaaaaaactattcaatctggatgcctcttgccggtagttcaattcagaatcatcatttagattagattacagtaaaaacgtaacattgaacacctattagaagcattctgtaattgccagcaaacagagtcttggaaaaaggggaaaatagttgtttccagatgtcattcaacttctcccacctaaacatggaaccaaaggctgtgttaggatccacaatatttctaagcttagaaatgagcaagcaagtgctgcaggacattctttacacgtagtgatacacctgacttatccttcccatacttgctacagtctttctttgccatagtccattgctttctagacggaactacaacatgcatttggtttaaaatatgttgtttcacttggctatattcatgaagtcaagacctctgtgttccaaagagcgagagacacaacactgtacttcattaatagacaacctccatcctagtgtgcaccttcctaaaggatcccctctcatatgttcatcaaagcttctaccaactgagccttaaagacacaaataattattctgcacatttgcaacaacccctttggcagggcagagccatgagttgggcacaaataattaaatgttttggatattgtttgtttgttatatacttatatttaccacaaaaatccctaccaacacatgattataaagtaaaatggcattttcatctgtctgatccattctctctaggatggctatactctgttttcttttaatctctaataagttaacttgctctgagaagttgttgggttaattgttgttattgttttctttcaggaaaaagcatttcaacagctttatccgctggagct

SEQ ID NO: 7424 - DNA, 1939 bp, Cucumis sativus
  Intron number 1 from transcript Cucsa.087950.3 (locus Cucs a.087950) derived from phytozome v7.0 (chr-ID scaffold0088 8; pos 422593 to 424531 reverse strand)
gttttaaagtttttggtggtggcaacgcctttcaggtttgtgggttttcttgttactggatttcccagttgctaaattcaaaggaaatttgaattgcttgaactttgtgaatgattggcctgtctatcggttggatttacttttgaattatatgtgttgtttgttttttgttttttttttgaagcgggatatggatctatcgaaattgcagagcttttatatttgatttgatttgatttggaaatgaaaaatgttcttcttttgactttagtttttttcttttgataatctttccttgaaaattcttcttttaattgatcaaactgtttgaataaatgcccgtaagaattgtttggctgcagagactcatatttataatcccattcatttggtggaagccttcatgattaaggttttcttttgtttagggtaattatacgaacaaatataattgtttggagacttgttaagatctctttttaggcacttttgctatataactttgagttgaagtaagttttctggagtttttaacaaaacttttcctctgaaggttttgttggggttatttaggttgtatcacaaacgagaccacagctttcctccataactcttgattgctttccatccattaatttcccattgatagatcgccagaatcaagagaatcaaaaggtataagtttccatgctttgtttttctcgatgattgttaagtctgattctgagcttccttttttctttgttttttttgcattaagtatcctttttcctatttttgtattagagaatcagatttgatttatactgattcaagaaactttttccatttctaggaggagaaatgccttattctctcttccaccctcctgtacagctttcttattaatgaaaagtctcgtgtagaattttctttttagacaacttaggactgtagatggagtacaccttattgaattttaaataaaatttcctagttgatcacttccatggtgtcggttgggcaagcaggtgtctggggcattcctagataaaattccacagatattcttccaaattcatcttgattgtgacaataacccctagggtggggatgcaccaacttatgctatgcaatgttcatcaatgatttgttgaattttttagttttgagatcaagctctgttacaacagttccatttttttggtactattttcagccctgcattccacttggggaaggatgatcctaatagttctacaatacattacttctaaatcttttggatgaattagttaataggtcattgaaaattatatttacatcaaactcttcattgattccacttctactgtgttctacaactttattcaactatttgatttttatacccaatgagcttaagacaacaaccaggtcaactaacaaactgtttcggtggaaattcattctgtagggactatcttctttaagcgctctggatgcctttgaacttttatcgctttttcagttataaataatccaacttatttctcttatactgttctttgtagttttaacgtaactatttctattagcatgcttgtaaccaaacagcgcacatcgtagatgggtgtttgcatgtgtatgcatgtaaaattctttgaattttcttaatttcaaatagacaatacatctttctttgatcttagcctttgttgagagcctagagtaagctctattctttttcaatgtatttgttcttttctgtttgtggacaaggtgcaacatatttttttctaacatttgtacaattagtcctgctgaggaaaagagaattctagtattttctcacagttcttttcttctattaacatggtttacaatgcagcgtactgccatcatattactgcaaggtgaaggtggagcctgattttatttcatttttggttttgtttttatgcttgtgcagaacagcaga

SEQ ID NO: 7425 - DNA, 3331 bp, Cucumis sativus
  Intron number 13 from transcript Cucsa.292340.1 (locus Cuc sa.292340) derived from phytozome v7.0 (chr-ID scaffold027 75; pos 49828 to 53158 reverse strand)
agtaagcttggctcaactctgttctgtttatttgtacttaatagtacttcatgggcgtgaaacttacttgactgcacaattggtaaagaatttggtcactgtttttactttacatgggcacccaatattttgccaatagcttggttgtaaaggaaattatatcatctgaattttgatagttcattacacaggtaaatgtaggattctgggtttgtgtgtatctcttgggaggaagtattgagggtgtattagggatcaatagcattgtgcatttcaacgtctcccttggagttgtgtatgtacacacatgcacacacacatgcataaggtgctttactatagagtaaataactacggtttcaaattctagaaaatacgtttaggaaaaataaatatctttataatggacacacaagtacattgcaaacttattttaacacgtcctttactcttttcaggaggaaaaaacatatcccttactagtaagctttggttataaatggagaatatggatgtgtgggggtgttagtgttagaaatgttaagtattccactctcatcaatggaatctcaacagggtcgattcaagcttctaggggtctaagacaaggggatccaccatccctgtttctgttcttgtggtggatgttttaagctggaagataagcaaagaggttgagggaaacattattgaaccttttaagattggtagagatggagtggtcttatcacaccttcaatttgctgataatacaatgttattttttttcggtaaagaggagtctttccacaatctcaatcatatggttgaattatttgaagagatgttggggctataaatcaatagaagcgagtgcactattttttgtattcattttgatcaggctaggatttagaggtgggatgaggttattgattgtgaggtgggttctttcccatcttcttaccgtgggtttcctttagggataatttgagatatgtgtccttttggaacccagagaaattccgcaagagattggtggagtgtaagaaaggtttccaagaataagcaaggaaagtacttcgaatttttgattcatcgccagagatggcttagaactagaacgagtagttcattatctaatggatttttctgttctaatactttatccgagagttatcagtatttatcaaatctcaaaagctggcaggttaactctgattaaatccatgtttagtggtacttcgatgtattatctttcgctgtttagggcccctagctttgtgtgtaagagtattgaaaagtacatgagagatttcttgtggaagggagtgggggaggatcatggctcccatctggttaattgggagttggtggggcaacccttgagtcaggggagggattagggattggtaattttggaatccgtaacagagctttgttggcaaagtggctttggtgcttctatcttgaatctgattctctttggcataggattattgtaagcaaacatggtccccatccttttgagtggacaacattaggggttaatagcactttccgaaatccttggaaggatatttctttcgaactcccttctttttctcagttttcttgttgttttgtgggggatggtaaggacaattacttttgggaggatcagtgggtgggggagaattccctctggtagatttttccacatctgtatcatttatccgcttccaaaaattgtactatctcaggatcttttggtgagatgtgagaatttcatgactctctttcgggttccgtcgaaatttgacctatagggaaacgacggaggtggcttctcttcttttcttgcttgagaggtgctcttttagagagtggagaagggatcttcgtgttcggcatcctaatcctagccgagttttcttctgtaagtctctgtttgtcttttgttaggtcccaattcccttaaaaacttggttttgatatggtgtggaggacgaaggttcctaagaaagttaagttcattatctgacaagtcttgcttggtctggttaatactatcgataggcttgttgggaagagaacttcgcttgttgagcctttttgttgcatgatgcgtcagaaggtgtaagaagatctttatcatcttttttgggattgtcagtttgcgagggccgtgtgatgctccttctttcaggagtttggtgttagctttgttggtttgcggtgcgtcagagcaatggtcaaggagttcctcctccatgtgcctttaagagattagggggtttttttgtggcttgccacggtatgtgcatttgagacatggggtgagaggaatgataggatattccagggtagagaggggccctagcgagatttggaccttggttttcatgtctctttgggttttgatttcaaagaacttttgtaactattctataggcaatattttacttttgtaactaagtaaaatattaagttgggtggctttggtgggctggtttttttgtatgcccttgtattctttcatttttctctcaataaaagttgtttttataagaaaaaaacatatccctcgctaatagaactcccatctttctaggtgaccctcaaatctagataaattaaatgtcggacgttgaattgaaagagccaaaaactaagaatacttagctagagtcttatctttacaactattcaaaagtaggctaatacttgagattatcccccacgattcaaccctctaatccaaatactcacacacataaactaacaaactacttaacaactctactaccaatcaattaacaactaagaaactagaatgacctcaaactaaatgttgcaaaatatataccaattattacgttacgtcatatgtcatctgtacatattgattaacccttcaatctggcttgcatttaggtttaatgcagtgattactgttttgttgtcccatatacctttttactttcttcctgagttgattttcattatattattttctttgttttgtttatcaagaagttgctctttctatgttgatcttcaaacggtgctttattacttggctatatatttttttagctcaaaacaagctttctttttctccctcttctcgcttgaacaatttcttgaccaaactgtcttcttcatcagtcttgtcaactgggactatcgggaataaccacttattgttggtttcagcctttggagctctttcgttgcatttgagttgtattgttcaatgtcctcacgcaatttacttattctttttgacgaattcaatctgttacccttgtttatctaactatcttcgtcgttaggcttgtatctgttggaaacttagaagccgctgtta

SEQ ID NO: 7426 - DNA, 2908 bp, Cucumis sativus
  Intron number 4 from transcript Cucsa.385470.1 (locus Cucs a.385470) derived from phytozome v7.0 (chr-ID scaffold0390 4; pos 778160 to 781067)
tgagttgcagtttaatcaaaattctcttgcttgaagtaagttatggtgtttcatagcctgttctactcaatagttcaattattttcagcttttactcgttttgtttgaatgattgcccatgagatagtgattagtgtgtttctttgcaacagtttatattttattgtcaaactacttgcttgtttgtttggaggggaggggaggaggggaggaggggaggaggggaggagggaggagggttggtgcactaagtgttataagaaactagataacgttttgattgaataaaatattgcgatagggttggggtggtctcaacattgacctcttctcttttctttgtttctttattatccctctcccctctcattgtcctctctttctttctgtctttctttcttccaggcttcaagtgggtgctaagtttctgtccttttttgtggctttagggtgcgcgaaacgactaaatctagagttcttctagcaatatttggtcaagattctctatttcccactgggatttggtttcttgttttttcctttctaattaatcctgtggtcctattgctctcaattggagtctcttttaggagtttggctcatttttgttgagtctcttttaggagtttggctcatttttgttaagtctcttttaggagtttggctcatttttgttagttttctgttcctttattcttgtatttttctctcaatagagtcttcttttctcattaagaaaaaagatctggatcttggtttacacttgtgccgatcaaacatcttaccaaagaagttccaaacattttcagcgaactcaagcagcaagtgaatgatagcttcctcactttaatagcatatgaaacatattgggggaaagacattctagaaactatccttttaaccatatttatacttgttaatactattaaggctcatggtctgtagaaagaatttaactttctttggaatagcactctggctgccatgaaattcttttgagtgccttaattttatgatctgtttaaaacacgatgcagcgatcatctaggttggttccttgaagcaatgaaggtattccatctgtactaaagagacattgaagacgtattaggatgattttatgaggattttcctttttggtatgctaggattagctgaatgaatcacaacatttggttataatttatctttgtgggggtggaagtgtgagtttactatacgcatacttttgcctttaaaaatagatgaaatagaatgcatgctaggagtaaaggtcaggacgaaaggtgtttggaggtttggaaaaaggatacgactgaggtttggtccttagtgaggtttcgtgtttcactttgggctatagtttttaagacttccttgcaattattagcattgtaatattttacttggttggaacccttaatttagagagtgtttttaagggctattttctttatgcactgtattttttctcttttttttttcaatgaaagttgttgatgtcatcccaaaaaaggcagtatgataatcacctgatttgatagagacatgggagacccaattttgactactggcaagagaaaatgatctttttgtagttcatcaatttttcatttttattgtggaagtgaattaaaaggggaacttcggttcggccatttagattgttagttaaccagggctctttataactataaataatatgtatgtaggtgtttttcatggatcggcctagtggtagggcataaccttgataaatgactaagaggtcttagatgattgactaagaggtcatggattcaatcatggtagtcacctctcttggatttaatatcctacagatttttcttgacacccaaataatgtgaagtcaagcccgttgtccttgtgagattacttgaggtgcatgtaagttggcttggacactcacgaatattaaaaaaatcatatattgcagggaaatagagttgtgagtgtctagtgagtaaatattcgaaggcttggactttttgcccatcttttgtagatttcatacatcaatgaatttgcttgttttcaaatatatatatatatccaatgaaatttgtttgttttcaaattaggttgcttctgtcacttgtggaagtagactctagggtggggtgactcttttatctttccgttcaggtttctcaatggaagtttggttacttacctcccatcacgcctgctcacacacacacaaagaaaagaagatgatataacccttttgtgaacaaataaagatgaattttatcatgatcttttttatgggtcatggaaatttaccatcacattcacatgactcctttgcttggcaggcaaaagactcgctcctctagtccagtccagtgttttaaatagccctctagggcgtgtgcctaggctcaatcccaagtcttgtgcctcggcatgaaaagatgaggctcacaaaataagcacgcctcagggctcaaagtccagtcattcttttgtgccttgagctttaaaaacacactggtccagtgttagtttgtttttgatgaacgactggacttttcatcctgtgaacgttattactctgagttcctggttgtacttttcgatatagttgtattctatcatgtgagactgtaggagggtgaccctacataagtaaaagttgactttcattctgcgttttttattcttttttagcgtttttttattcttttttgagtgggggtgttacgagtttgagatgcaacatatttcacttttcctcatacatatcaatcttcttgttgatttatgtgccatcgatgaatgtctgtgttacaaaaatttgaagtatattgttcattttccttactgacgaacaaaaaaataatttgcagcttgaagaaaacattcgttgtattgctctttctgg

SEQ ID NO: 7427 - DNA, 5011 bp, Cucumis sativus
  Intron number 1 from transcript Cucsa.338990.1 (locus Cucs a.338990) derived from phytozome v7.0 (chr-ID scaffold0335 6; pos 1725482 to 1730492 reverse strand)
aacgctagcggtcttagcttcgaagagctttacaggttgcttcctctcctcctacttttcatttcactgctatactacaccatgttatgattccaacttctgccatcagttctgtattctagctgttcttctcagattacttcctctgttgtgcctatgtgtttcagagagtggttagtgcttttacatctttgagcccttgcttcataacggggaaaagttgcgacttacgtattgcccttctgttttatggacttgggcttgataattatttgcaactatgtcttatgtatgtgtctgagatgatcttgaatagatctgctattggcgaggacattatctaacttaacgacggcacggctatttaggagaagttgaataacttggttgataagcctaaatgaaaagttcttggagtattagttgaaccaagtggtataataagttatttatataatccttctttcatttaggatgccttcgtttttaataattgttcacttaactaaaaagaagatgtctataattcttaattctctcatctcttttgattgatggtttccactgcgtaggttaatcttagaaaatttagtgcgaccacgaagttggttgagtgaatttggtatttgacaatcattttgtacagtgcataacaaatgggatggtttctacgactcttaattttctttgtctttagggatgtgagtcgagcacttctccccgatagtgagaactctatactgtcacttcttcctctatgaatggcttggatgttgtattgctaagtcagcccgattagatgtgcaaggagcatttgtttccagcgtagtaaaaaactatagattaaagaaatactgtttagaaatagtgcataattaagtaatcaattcttcatccttttttggtttgtcagacttttattggtgtgggtgtgtatttgctgtgagatgcaaagtttgaacaaggactttgagagttctttattctatgtacctagccatttgtagtgcattttgtattaaagatggtatgttgtagatgatgggcctcaagtttaggggtaggtcgttagtaatagacattggattggatggcataggttagtgtatcaccattgtcaacttcagacgttcatgtttttctttctccatgctattcttatggttctacactattttttaaaaaatatacatgagcgttcggactggcttatgcacacctcgactaatccaacgggactacccacctgaccatacaacatttgggtgtcgaggaaactcgtaggaaattaattcctaggtaggtggttcctatggattgaacccataacctcttagtcatttattgagactgtctcctttttaccactaggcctattcgcctttggttttattcttcaaaagatttgtgtgggtaagctattcaatgcctttgcagattatcatctatatgagatatccgacgacacatctaaaacactttcaaacattaggccaagtgttggaattagttgtagcttgttccttgttaatggaaaggtcaatgacactttgtgcactttgctagtttgtttcattatctaccttagcttggttgagcaaattcttgtatttacaaatttatcgtagtttttgtgcatgttgtagtttcattacttccattcctccagatatctgtactcaaaatattgctcatggagcaaagacaagtaagcaggaggtactagactgagctctttcttccatgttcctatcgatgctggatattgctgaatcgaaattgaagttagtggcttggtttgtcaattctctcaccaaagcattcttgtggtgtttcaacgtagcttttctcaaatcaccttcagcttaaactacatccttcagtgcaagcactcctagtcctgccatgtttggggccatgattgatgactcttttatatcaattatattttgttcctgcaatggtgtattatcggtaagaggcgcgaggagggcttgaattatttgttttgggattgctcatcattggagtttcttgttgagattgttcgatgtttgttgggtttggaatagagatggcaggtttcatctcaaggaggtgattttgagataaagttttgtggaacgttaacttctttgtagttttgtagggaatttggcttaagaaataacaaaatctttagagaggtgggatgagtttgggtggtggataagtttaatgatttcgtatggccatcagtcactaggtgtctaggctttcttttaattatgagcttggtcttgtccttttggattggagtcctttggtagggttgaactcctttttcttttgttggtttgtctttttgtatgcccttgtattctttcattcctatgtatgaaagtgcaatttattatccaaaagaaaaaggtatgtatatgcaactaaactttttgacactgctgatctgttatcccctttgaactaaaccgattagtaccgttgtttcaacttactaagcgtcaagatatggttacagtagttactatgatctttatatatatacaaacaacggctttcattgaggaaaagaatgaaagaatactagggcaaacaaaaaacaagcccacaaaaaacctactaaagaaaggatttccagctagataagatattgcctagagagtaattataaaaaacctttgagaccgaagccgaaaaagaaacatgaaaccttaccaaagaccaaacctcgctaggtagtagttactgtgatctttaatctgtctacagattacaatttgcagctgacataactacatacagaaaaaccaccaaacagtttcacttttttcccaattcatggtcccatcttgaatttctacacttttgcttttgttttttaaattgctttggtttttttttgaagaaatgtgttggtgtaagctacagaaatgtaattctgtgcagtttctacttgaagcatatcaagttttctttcatttttctcaatgaaagttgtttttataaaaaagtgattatgttatgtcttttgatattgtttgcaattactcatcgctgcatacatgctatttattattattatttcttttttatgttcaagttagtattgaattggtttcagtaatcaaaataatgtggttctttcctagggttctcttccaaaatcttttaatatgtcaacttgtgaataactcacttggtcaaggcatatgtcttgaccaaggggtcaggaaatttaatctcccaccccttaatgctgaactcagaacaataaaacaaaatattttgataattctgcagtcttgaaagaacgaaatggactagatttaatgaaccccctcttttgtttattacaaatggctacaaagggagcaattctcttggaaagagaaggtcagaaactttatttgagctaaaatgcttgcagaagaagggtgccacctcagttggaagtgtctgtttagaagcagatggaaggtggtccctgtctcgataatgggacgaaaatgaatatttcttttgcagctagttggagttgggattttccttggagaaaacttgctatggagatcaatagtggatgataaatatgaagttgagtttatcaaaataaaatatgaggttgagagtcgtgggtggagtagccaaagaaaaaaacatcagtaaaagaatccctcttaaggagagattctcgagaatctaccatgaaacagacacaaagttgttttagattagagattgctggaaaagggagagaactttcctcactaatttctaatatatccctagtaaccttcctattagcatttatgttattcacccctgctgctttaagcttctaacacatctatatgctgtatgcttgtaagataatcccgctggtccaactgtgaacttgtttgtgatagttatcatcacacccataatcatgttatcagatatattccaattgaaccatgtaaactttaacaaatctactactctttattttttgctcaaggttctaagaaggacggacacagatacgagacacgaatacgtcataacacagacacggcaacactccatattttaaaaatctaggatacaacacagcatggacacgtttattaaaatattcatttaaaatatatatatcactttatagtaaaaggaaattcatagtaaatgaattgatgcgtttatatgcttaaaaaacttagcttgatgtattccatgctcaaaagttattatcattatcatatatgtgtctttttagtctattcaacgcgtgttctatgcatgtctaatatatttgttacactagcaatgtccaataggtgtccaccaagtgtcagagtgtccaagtatcggacacagacacgctatccaaactgaagtgtccgtgcttcttagtcaaggttatcctagccatgtaatgctctgagtggaaggtaggaggatgcactcttctttgtgcataactaaaattaaactaaattagtttttgaacatgtgctttgtgcatctttatggctgaaatgtcaaatgaagatgttcaatcgccaccatgtagatctgcttgtaattatttttcatgatctctgtctctctttggattttttaatgtacattggattatttaattcaccactgtatgaattaaaaaaaaagttccaagttttggatcattattcaatgtagtgcaattagcttcaaagcttcttgctcaaatcaagttctttacattttgtcggtgcagtaaaatggcttcaacaatttgtgatggaagctacactatcagctagtttgtgacttttttaaaactaccctctcataaattatcatctttattttttattttttaacttgaaaagtattttactgctatagcatagtaggaaccttcaaacctgtttattttattacttttgagccttttttttcttttttggtgtttctggcattcgtgtaaaaatattttgtctctcctgatgatcaagcatcttgtgcatttaggaacgcttataat

SEQ ID NO: 7428 - DNA, 1386 bp, Cucumis sativus
  Intron number 2 from transcript Cucsa.161510.1 (locus Cucs a.161510) derived from phytozome v7.0 (chr-ID scaffold0114 4; pos 1416129 to 1417514)
gccttcattccaaaactgctttcagaactgctaaggtaattaatttttttttcttttcattttttcatttttagctgtttattattattattattttgtttaaatggtaatgtaattaaccacttctaaagtaatatggtaattattataatcaaaactttgcaaaaaccgcaaaatttgtcggtgatagtattatattaccgataaactcttataatctataagtgatggaatttgcaatataatttattaaaggtagaattttatcattgataaattcggatagattttgttatatttacagttgtttgcaactgtctcgttataaactttaaagtgtagaacttcgaggaacccaaatttttaaaatcgaaagtttgaaaatctaatttcaacacttccattcttgacgtgtttgctcattaatttacaatatttctacctttcatcacttgcttaaacaaaaagatatcaaaggtcatattatacactataggttaaaaattaaaactatgtcgatgaatgggaaaattacctgtgttgaagaaagataatatgagtgtaacaagttttggtcacttcaattattaatccaatcatgttagaagtaatctaaccaaaattctacttttaactcttaacttaccataaaagaaacttttaagaattgtcggagacatgaattaaatgacgaattatagtaaatatttgacctaagattgtccgagttaaaagttaatagcaatttctagacccacaaatttttctttcatatacgtatgcttatcattttgtctaaaagtataatccaaatgtgggtaaattttacaaggaaacacaaatgcgtcggtgacatgtcacatgtatatacttacgggagtaggcaatatctaccacacgtatataataaatatggataagattaaactattagtctctaaatttaatttgcacattaaattttgaatttatgttgatattaaatcttcaaatattattaagttcgttcgattttgtttcaaaatttagtacaaatttaaattagttttgaggaacttagtataactaaaattgactaaaatagactaaaatagagtgatcatcatcaaagtacaggtatggtattttaacctaacttttactatgatagtacttttatgtgaatgctaaaaatctcttcttaacaagaatgatatacaggttgttctactcatacacttctcataaacaaaatttgaattataggctgagatttcacttttatacgcaattgccactttgttaaaattgatttttgaaagataaaaatatgttattctgtgtaattttaaaaaacgttatgaagggtcatttttttcattggttttcatattgaacacaggacga

SEQ ID NO: 7429 - DNA, 747 bp, Cucumis sativus
  Intron number 2 from transcript Cucsa.199980.1 (locus Cucs a.199980) derived from phytozome v7.0 (chr-ID scaffold0136 5; pos 355048 to 355794)
tcacggctaaagacttccgaaattctgctgttcatgtaagttagctataacattgtatcgcgccaaagggtttttgcttctagggctcattgcgtattctctgagatttaagttgaaagagttgaaaattgatgtgtggcaatttttatttcgttgcaaatggaaactagcgtggtcggaaaatgtacttgtcctattctattgtagttttctattgctattcttcaatgatatgagtcgatgagcttttacaaagcttcagtttcttcttctagttctgaacatggtcaatagtttcctcaattaagatcaagaagttaaatttctcaagtaatcctgttatcatactgaagttgctggtctcattcaaacgtataggaggctagggttctccttggtcctacacaatacttgtggaatacagggaaaggagaagaaccagggcaatttaatagttagattcatttgggaatgttggtttcttactcgagttgtaggaagagaaggtggttagtaacttaataattgtctactcagaatttaatagctaacattagagtgttataaaatacttgaagaggaccaatggatagactacctttttggttagtaactcaacagtcctgtgctgtttgtagcatattaatcttatcgtttatatgaagtgtgggctgattttttcccttctgattaatgttatttatgtagttttgtcttgattctgcattttaattttgcaggttattg

SEQ ID NO: 7430 - DNA, 864 bp, Cucumis sativus
  Intron number 2 from transcript Cucsa.199040.1 (locus Cucs a.199040) derived from phytozome v7.0 (chr-ID scaffold0135 7; pos 1874603 to 1875466 reverse strand)
tttgcaggtaatttgttagacgtccaatttattttttatgtttgaacttttaagatataagatgaagtctgtatactgctgtcacattatgtgtttttatcctctttgtccttccttttaaacaggttaatcctcattcctgtccttctcatgcgtgtcttaatttcatttaacggcacagttatatcattggtcattaaaatttcgtagtgtcattctacaaaatttaaacgaattttagttaccctttgatgacttttgttgctttgcttttgaatatgctatagtttcatatggaaataagagaatcataacataataagctttcgctacactaataaatgcagtcctactccactgtcgtttttatttgtacattttaccataattttttttctagactcaaattacaaaacttggaggtataagcttgtttgtgatgcaggacaagtggttaaagcaaaactagataaccaaagtttagagacttaacaagctaatagcctactttattaaatgttttttaaggtttactctaggccttttggtgcactgaagtcataaaatacaaataaaaacagcctgagtttgcttactaacttatgaccaatactttatcaccaaatagaagacgtgggaaattagaaagggtcaggttgctgtttcaggggagggacatctagtattccattcttattctcagtcactaaaataaatgatgttgtttcaaacttttaagttcccttgttttttaggtcttactgttcatcaaatctcttttaaccatcacgttttataggtgctaagaatgattttttactcatgtcaatggaactatatatttgcaggaggttgaccgttttg

SEQ ID NO: 7431 - DNA, 2559 bp, Cucumis sativus
  Intron number 3 from transcript Cucsa.121630.1 (locus Cucs a.121630) derived from phytozome v7.0 (chr-ID scaffold0099 9; pos 137344 to 139902 reverse strand)
aaggttattgtttgcggggaagcacagaagaagaaaaagagatgacaagaaaaatgataatcgtgggactacattgtattcaaacattgcccgacgacaggccgtcgatgaccgacgttattgcaatgttggaaggcagtggcgatggcttacaaattccaccgaaacccaacttgtttggacctccaacctttgagcatccccaaccttcttcctcttcatctaacgaaattcctaatgatagtttgatattgtagcagcaacaatcatatttatcctccaatgaaatctcttaggtttcatgtccttttatcatttttgagtaatacaaacttgtatatgatttggtgacaacgagggaagtaaacgtggaggaaattttcacttcattaatttttagcagcctgcggtactatactatttacaattaggagacttggattaatgcttatttacaattaggaaacttaattttacacatcctataggacataatataaacatacaaatctacaaatgaaattaattatagaatgacccgttaagagcatacctctcaagtttcagcagatccttatggtttgttcttttacaactttatttcccttcctcccagttttagctacccaattggttgttctagtacaagtaaactctattcttttgtttctttcaatgatagatctttgccaaacaaaattcctggctcgaccactgatctttggttcctgaactcctcttaccgttcttgcccatccttggttgaggtgcctttgcacttcagtagtaataaggaaaaggattttagtaagttgttcaagaagagttattctgaggctttgaagatgtagttcagtttaaattggagtgcccaaaattgtagcaactgtgaaacaagggatgaagtaaaaagttctgcaaaaacgaagtttccaaatgctatcaataatgacttctatattgatataatgctatgaatgacatcataaattcttagattttataatatttgtagatttttagtagcaatactttcgattatagtagttttgttctttgaagtaatttccacacacatatagttcgataaattctcacaattttaaaaatattttcaagaatttcgtcatagtttctcgcatatttatcataataagtttaataaattaggctcacaacataccacatctgaatttgatatacttgatgtattaattacttatatactttttatgcctcacttatacatgtactattaatacacttactaatgtattgcatatatatttgttgtgcttcattgatacacatgatacgtttaatacatttaatgtactgcgaatacactttatatgttttactaatgcactcgattgattaagtgcacttgatatacttgaaagtcttcaatacacttaatccactattgctatatacttgtagatttgattgatatatttgataatgaattgtatcgttgtatatttaataatgcagtggtttgtactatttaatgatctggttgatgtcctactgtcattctttctctctctttagttttcaccatcgttcaaatagttgaaaaagcttggattaagttggattggaaccatttttaattttgatttcgtccttgtggagaagggagaagggagaaaacaaagtgttcaaatagccaacgtagcttgggaataacaaaagaaatcaagtagaaatatctcaaaggatactttagggattggagattcgccttatttgtaaagtttgaaaagtgaaccacaaatattgctaaaaacccatacttcattgctatatgctatccaatactatgtgtgggatgagaaaactaatatcgtaagcttgtatcaaccagccatgaatatgattaaagttcttgaagtctatccataatactttaagaactttgctttcaattcttgtcggtcctccattgaggtacctataaggacttcagtgattttgatggtgatttttctgggttgttgaggtagagttattctgatcaccatttgaagatgggattcagtttaaattggaattgcccaaaaactgctagaccaagtggtggtggataatactctttcgtcttgcttataaactgtttttgcattaacctgcacatatagtataatattttgagttttattagtattctcgttatttttgtaaaacaatcttgtgatctaacgatttgcttcccatgacagaaaaacgtgtgttgattcggcccgccttcataggtaaaaactacaacttgatttcaaattacaaacattattattcttatggttggaaagtgaccaaaacttgactatcaaatggaattaatggcaatcttgaacttaatttcatgcacattacatacattaacctgattatcaaacccatttttcagttggagtttccatatccatcattctgacaatctttataatcatcatctgcatctgcatctgcatcagcatgtgcatctactgcacaataaaaagcatatcaaacaaagataaaataattgaggaaagtataaggagatattct

SEQ ID NO: 7432 - DNA, 1705 bp, Cucumis sativus
  Intron number 4 from transcript Cucsa.041560.1 (locus Cucs a.041560) derived from phytozome v7.0 (chr-ID scaffold0054 0; pos 128191 to 129895 reverse strand)
gaagaacttcaactattcacccactctattgaaaggttttgttcttcaaccatttctttttcaactacctttttctttttttaactaaatgtgttacacttttactttttgattacttttgaatttaatttctatttggtctttagattttaaattggtaaatttttacccataattttagagacgttttattttaacaaaattataccttattttttacaaatattgactttagctttttggtactaacgtctcttagttattttaaaacgattaattaattttcactagtttctaatccatttgaattaattaaaaaagattacatcatagttattttaaaacagtaaactgattttttatttcttttgtcaaaaacaaagggagcataaatgaaaacttgaaaataaaagagaaatataatgtttaaacacatgtaatgaatgaaaactaaattcaaaataaaaaaataaaataaaaatgtaattacattttaaaacaaagaatctacaaaaaaaaaaaaaaaaaaaaaaaaaatagcaaatttgataaatatttacaatatataataaaaaatttatattttatgagtaatagacactgatagacatcgatatgcttttattagtggcgttgatagaccatgatagaatccaaaattttactttaattaattttattatatttaaaaattttctcttttaaaactttatagacggaaacaaataaggttaaaatcgtaatattttaaaatccttcacgtttcggagaaatattttccattttttttgttttttaataaataaatataaatgtatagggttttatttttactttttgtatatataactaaataaattgataaatataaataaataaatattttttttcgaggtaggggatcattagggcagcgctagagtcgaagtcgagactggggcaaagaatgtattccccatctctggcctttaattgtcaatggaaaaaataatactccccactccctaccttatccatcatgtattcgaaaatttcttgtcacttcggatatgtctagttgagacaaaaaatgtaaggatcaaaataataattttttagacttctatagtccatatatttgaataatgaaaaattattgtaaatagtaaaattattaaaaatatttataaatatagcaaaattttaccatttttaagatgaaataaacttctttaatcagttggaatgtttaaataattattcttacaccaaatttattatttggaactgttgattaaaatttcaggtgggatgttaattgtattgagatgctcccgaattacatgaaaggcctttatgaaactattcttgaagtttatgaagggattgaaaaagatatctgcaaggttgacaatattccatttgcatttgattatgcaaaagaagcggtaaataattaatcataatgtataatagttaaaatcactttagtgattttttttaagaaaaccagaaaataactttcatttaaaatgcatttgatgtacgtgaaatagagcgttaaactgattttgagctatgcatatggagtgattttaaatgtaataaaagtgattgttctagctttatttgaaaaaattactcttaaacatgcacacatgaaagttctctaatacgattttgagttatttgggcacagatgaaaaatcaatgcagggcttttttt

SEQ ID NO: 7433 - DNA, 1795 bp, Cucumis sativus
  Intron number 1 from transcript Cucsa.258940.1 (locus Cucs a.258940) derived from phytozome v7.0 (chr-ID scaffold0222 9; pos 5666044 to 5667838 reverse strand)
tgttttcgccatcgaagttagttgaagctcaagctgtatggaatcttctctttcgtttttttctcttcttctggttacgattcataaaccttacctaatcgttatacaactgaagtttatttgaagaattttgagaattcttgtgcatttactatacttttttttttttttgaagtcttgagttgtggttgtttgctagggaatggagaacggagtggtttaattgtggaattttgaagtctgaatttaattgttgaagtattgtagtttgttgctgagagaaagtttgagaaaaattaactttaattatacaactgcaaaactttattgttttctggttgtaggcgttgggaatttaaacgactgactttttccttcatctctaactgtaatcccgagggtataagtttgtttcagctggatctttgcaattactcttcttccgaatctctgttgcttagtctctccgaattttctcagtcgtttgtttcagttcggattgtgttctcggccttgtgcccttttgattcgattctgcatttttatgacgaaggaggaagcaaaatttgatgaaataagagaatttgaaacgtgaatttgttaaaattaaactgcaaatgttccagattttaaatcactcgcgcaaccaaccgggggtcttcgtaattgtaacagaatttagcttcttgccctcattttctttcttctctgactcgtatgtattagttttccttggaggggcagtttcgtcatttagcattccagaatttacttttcagttcgaattcggtatcatcatcgagcccttctttgttgaaattccacatgtgtccctttgtgaattggtttttccccagagggccttttccctgctctgtatgctgcgcgcttttgtgtctacagattgatagatacttacgttttttcccctttccgcagatgtggtatttttacaactttgttgtttttttcttctttttaaaaataaatgttttaactttttcttttttgttgaaaaccttcgcggcaatgagcactaacaattattttgactacctgatactatcgtataaacatattattttttaattcagcaggctctagatagtttaattaaattgagctttgtctgtactgaaaatgaagagaaaaaaaaaacctttatctggcctgcggcagcttatgagtattaaaattaactgcaatagtaataattatgagaagtatttggtatcaagttgtcttgtaaagaagtccccttatagacaaagcatttgtggttgctttgaaggatagctacaccctgttctgtgatcttgaaataccaaaaaaaaaaaaaaaacaacatggatggtttagtactgtcagttctatttttaaatactatgtgagactccaagatgtaatttggaagatgaagcgcacaacctatttgtgatttagagacgagcttttgaataaaagaaaacctaggtgagtttggaacccccttcaatatcttaaaatacccaaattgttactttaaaatcattctttctggggagagagactttaaaattcatgacctcttgattgctggttcttatccgtgttccacgtgttagttcaatttagcattcctttctatcttcaatctaactgatagccagttcaaattaagactaaaaacgaagtattttcatcacatttctaaaatcttcgtgcttgatttcttattttcttcttcgctttcctaatttttggattgcttatccatgcagctgcccagctgatcataatcggtgccaaaggtctg

SEQ ID NO: 7434 - DNA, 1861 bp, Cucumis sativus
  Intron number 4 from transcript Cucsa.319750.2 (locus Cucs a.319750) derived from phytozome v7.0 (chr-ID scaffold0307 8; pos 426615 to 428475 reverse strand)
aagcggtatgatgcttaaacacagtatgttcattggtttaatttttacttcgtatcagaccatcttgatataaaatttgatctctgcacttcattcactaaacttatccaaaatcagtttttcattctttttctttcaatgtttgtacatatatgcatgggtcacaaaataagttggggctggattggattggggcctgcaaaatgaaggctctcaaccctcaacctcattatatttttaataactgattgaaggaaatttaaataattttttaaaatggaaatcattgatatattggtcattaataactctacataaataattggaaattattttaaatgacaaaacgattgaaaatatttacaaatacaacaaaatttcatagtctatcagtgtcatcaatatttatcaatgatattttgttgtatttgtaatatgttggttcacttttccatatttgaaagcaaccctaaataatattcattgtgtaatgtgaatggataatataaaatattttagatctcaagtgaaggattcaaggcccatagcagctcctcgacaaaggtcatgattttaatggaaatcaatgataagtcattaataattctacagaatattcattatgaatatttcaaaattgattttgaaaaagcttatgaccacttggattggaatttcttggataagatttgggaaagtttttgggtacaaatggaagatgtggatgtggagatgtacgagaatcgtgtattccttccttaataatggttgcctaaggcccaaggacaaggttttggcctcaagaagtcttagatagggagaccttttgtccccctttcgtttgcttgttgtgattgtgctaagtaggcttgtctctaggagtgttggaggaaaaacaatgatcccattgaatgggaactgttgttcaatggagggttgtacctgagcacaaaactacatgggaaagctacgatcactttcacaaccaatttcctaaactccacattaagatctaggtgtctctcattctcagggtattgttaggccttcaatggtaaatacttatgtgaggaaggaaaaacgggcaattcacctcaataactggcttttatgtcctttatgttagttaatctttaagcaaagttatgtttgtgtgttgagtcaagttatactttgtgtagactctgtggttagtgaagaacagttgggagattgccacctactccaattggtcgaagtgtttatgttgtattttgttgaaagatattgatatatcaaggaagaacctcttagacccaaaatacatagatcaaaatggtactttaacataaaaatttcttgaagttcatttaataatttgttagttgactgttgaccttgaaatttcttgaaccttttagacccaaaatacatgtaaacatgctttacttgcatacctattggtgtatagattcttccattttatgtttctatttcaattcacgtggaaatgaaatttcgctccctaacctactgtggttttgggcgttgatgatatgggatgttaaagtgctcccttattgaatctctgcatgtaaagatttttctccccttcctttttcattttgggctgttttcaaatatagcaaaatgaatcaaaataattatctatcaatgatagatcatagattctaaaactttgttatattttgtaaatatcttaagtagatttgccatttgaaataatttccctttcattttctataattattttttggctacattatgaaactccagaatagtttataatggctcaaaatgatgtttaaaaaatttggaagttaattattaatttcttttaacacagctcaagagggaacta

SEQ ID NO: 7435 - DNA, 5189 bp, Cucumis sativus
  Intron number 1 from transcript Cucsa.237120.5 (locus Cucs a.237120) derived from phytozome v7.0 (chr-ID scaffold0202 3; pos 124634 to 129822 reverse strand)
aattaaataaatttgtttctgcattgcttgagttagtacgtatttttgctccacttataacttttggatgacatttatgaccaaaagtataaacttgattattttttctccttctcacttataacttatcctcgagctcttagaattgttcgatgacactttgcctttgcttttagttttatcatttattatctagttggtttcatttcaccttgtttaagtgaaaatgagaagggagattgggggaaaactttcagtcatattgcccttattagtttgcctttgaaacttatctataaacactcttattttgacttaaattttaagggttgggttggtttatgaatacaatttggttattccggttgccaaaccaaccaaccaacccgaaatgtctaaaaaagaaaaaaaattagaattacaagagcttatagtgtttgagaagtaacagaaatacagaatcagcagaattatacaaaaacaaaactaatgggttgggctttagagtgtcggctacaatatgctatcttgacatctcctcaagccaatgaatgtagttgggatatcattgagcttttttttggtatccatgagtttcagcccaacttattcgcacgttgactaatctcataggacaacctgcgccctacaatatttgagtgtcaagaaaactagtaacaaattaatttctaggtaaaaatatcgttgagcttggaacaaattcttagaaaatctagaaatttcttttatagaaatatcaactatatgtgctaaagctggaagatgccatatgccaatactttttgctaggacaaaatcacaaacaaagtagatatcaatgtctttgtgttttgttcttgagtgagatggagaacaccaagtgataaccgcccactatgtttgttagatgcaaagctagaggttcttctaggatccttttcaaaacttacaaagaaagctaacttagatcaaacctagaatatatgatggtcactcttagatcctaagacaactcactccagggttagcttgatgaaaactaatccaatgaaatgatttttaacatcaaatctaaagcaagatttgaaaagataacaccaaaagggttaaataagcacaagctttttaatattggtattctccctccaaaatgttgaaactacatccctatttttactaattaaaaatgttgcggggcctatgaacctggctgctcaccttgtcaaatgggagtgtacttctcgctcgattttctatggtggtcttgggattgactctttgaggcataagaacaatgcacttttcactaaatggctctagagatttagcaagcaagacaatgcattgtggaggtgcttaattgtggctatttacggcttagagtagaatgggtggtctactaaagcttcgaacaggggaagttcttatagattatgggctggcattctaaaacataaggaagctttccttaatttcttggctttttttgttggctgagggaacaaaaatcagattttggaaggacagttggtgtggcatgcaacctttagcagaaactttccctggtttgttctctttgtcgatgaacaaggatgattttgtggctgattgttggtgtaatgttagtcattcttgaaatttgggtcttagaagaaatttgattgataaggagcttgacaacgtggccaccattctgaaaatcttcattcttaggcaccttcagatgattgtgagtcttaaatcgactcttaatgctaatgacagctttactactaagtctacctttcttaaattaaccaagagatccccctccattgctgctccttgattcgcgatatttgaaagactaaaatcccgaaaaaggtgaaattcttcttatggttgcttgcctatagaagcctcaacattcatgagaaaattcaaaagaaatttcagcacaccatgctcaacccctcgatgtgctgcctctgtttcaaagacgaggagaccctagaccacttatttttgcattgcactttcactaggaaagtttggtacactctgtttaaaatatttgacgtggaggtttgtcttcctagtaagattaacagttggatgttggaagtgctcaaaattagaggttatagtctgaaaggtcatatcttgtggagttgtgctacccgttcacttttgtggtgtatttggaaagaaaggaatagtagaatttttgaagataactataattctatcgattctttttggactacattgcaacacaacttcttggtggagtatgaattacaccgaacacttttgtaattatagcctttctacgatttttaacaattggtgggcccttattctttagtttctcttggggagggccgtcttgtcccttgtcctttggctgtttatcttttgttcattggatatgtctgtttcttgtaaaaaaaaatatactaattaaaaatgttaaatgaaaggatacaacatttaattttatgccctttcaactactataattagtgaaaaacataacattaataagtacataattcattaaaggtgtgaatgaatatgaatttctagattcattatgacttttgggggtccaaataacttttgaagttctaagcattgcaactcttcaagtttattgggaagcttagcttgaaagttactcattctatgcttcagctaatcaatgccaattatttgcttattgctaaggttatcatacctgattattggagcttgattcacaaaagtttcaaacaaagatttcaaccataatatctttgcagctccaagagttaaggctctatattcagcttgtgtgcttaattttgagataatggattgatgcctaatcaacatttgtagaatcaacgatgttgggactagttggtctctacaaagtatagtctagagtcaagtgttcctttagatatcttagtatcctcttaacatattgccaatggagagttgttggagcatgcataaactaacatgctttattcacacagaaagaaatttcaggtcttgtcaaagtaatgaaggatcaacatttgaagaagaaaatcctaaagagaaaagaaatgagctaagctttacaaaccaagcccatggtgtttgtttaaaaccatacaatgctttatttagcttacaaacatttgacagtttctctttgggcttcggtataaaagttcttttttttgtaattattcccttggtaatgtcttactgagttggaagccttccttgtagaaggcttgttgtttgtttttggtgggattgtttttttgtatgccccttgtattatttcattctttctcaatgaatgttgtctatttcacaaaaaaaaattgggtgctccatatacactatttttggtaataaaccatgaaggaatgtgttattgatgtctgcttgcctcaacttccatccgttgtataaaggacatgtaaaaagtactcttatggttacaaatttcacaatagggcttaaggtttcagtataatccatatcaactgtttgatgaaagcctttggctactaaacgagccttgtacctcagaagtagaaccatctgtattttgtataccatttacaggctaccaccgtactatctgtaggtcaaggtataagattcaaaagttccattttcttccttcatagcagctctccagtgatcatgtttcaatgcttctttagcatttggcggttcaacttctttgtagtctaaccaaaatactttaggcttgaaaattccattctttgctcttttccatctttggtattgcttgggtactcgacgcctccctcagctcctcggtgcttcagctattggagggtccgcctcttcctaagaagcctcagctgatttggttaaatctattaaaagctcttttagcggaattgtggtttgaatgttatcagcggatctttcaagacaagaaaagatcaagctcagatcagaaattttcaatttagtgcaatgtaatgcagcaacttggtgctctttaaagaaaaattttgcaaattacttcactcaagagtcaagacctttgtctcaattgagcagtttttctatcttagttagtttcctaggactacttctgatgtggtgttccctgtctggacttccatggagcttatttctatgctttctttttattttctcagtagtatcttggttgtactaaaaaggcttatatgtttctagccttttttcttttctagttttcaatgattttttatatttgctgtattggctggattccgctctcattgtaataggctggattttgttctcattgttgtaataagctagttttagctgggatatgatgttttggtgctaagggggtgtcaacctagttgagatgtctgggtgcaccttctgatctctattcttcttccgcttgtttggacttctttatttagctctttgtataattctcttgtacattgaaagtttgtctctgtttcaaaaaaaaaaaaaatgaagagaagacgtgttagttgtagtctcaacactcacttcattattggattggtatttacttcaactgatgggtaaacaactgatgtatttacttcaatggtcttagatatagcttcattcataggacaattctcaaatggcattcttgtaggagtagctatattatcaatggtcaatattatcactgttcctattactttgacatttttgtcaatggacttaggctagttcagacttgtttgaacactttttgaatccattcaagcagcttccagcaaggttcaagtctttttttgggtgagtttcaagtattaaacttatggttaggccttttcaaacatagttgatcaacgttatttgggcgaggtaacaattatgtgagagttgtttcgttttggaagttttcttgtggtggttacttctgttagatttttttggaagaatacttgagttcgagagttgtatttggtagtaagtgtttggtgaaagtattagttttatgcaatgttttatgctgaccttgaggtttctgtaaatttaggttcctttcttttttcaggtctctgtttgcttgcttttcacttttcacactgtatatctttccaacttcatttcttgttgaacgatatttcaatctatttttgatggaattgatattgccctttacagcttgtaaggcgagaaatcggttttataagtttgaa

SEQ ID NO: 7436 - DNA, 1113 bp, Cucumis sativus
  Intron number 5 from transcript Cucsa.016500.1 (locus Cucs a.016500) derived from phytozome v7.0 (chr-ID scaffold0022 7; pos 193530 to 194642)
tatcaactatttgagcattcaccatctgcattgaggtgtatacattttctggtgttttggttctttatttatttccttttgtgaagaaaaataattatattggtaagcaaaacatgattgtaataaataaaacaaggattcctcaaaagaaagaaattataaaaacattagccatgtagaatatattgaggcaataaaaagcctaaaatctggagaaatttaaacttttaaatcaacaatgaacggaaagttttatgttaactcaaagcaccatattctctgatttgtcttcaaatttatgtggtaggttaaaagatgattgtaaaagattcaaaaggataaggattcgtgaaagaaaagaaggtataaaaggattagcccatctagaataaattgaggcaattaaaaatcccaagtcttgaattttttcacttaaataaaaaatgaatggagacgtttatgttaactcaacacttcataatctctggtttctctttagatctatggtaaataatgtacagtagaaattgcatttttaggatcagttatagaccgctctccctcatttctgaaactagtcgtggtggattttgtaccctccattcggtattttgtttattcttgtggattaatccttgattgatattgatggagaggaagaaaagaacaggagtctttagagatcttggattttgcatgtaatttcatttttcttttgaaaggtttgaattttcacgtgtaatttctcttctccccttttgagaatttgtatcttcaaacactttcagtgaaaattttctccattgttgtaatcaatttgaaattgttcccctttactctttttttcctccccttttatgttttcaagttccatttacatatctattttcttggagggtagcaaaatggtgtgcccctggagtctggatcctgtgtactgcatgcatgttggacttccatagagcctttttgctgcgaccacattttcctcaaagaacacagacacagacacatatatatatgtttaactgtagatacttaagattcttgtcctattgattctatatatttatatacagtacagtggataaactttccctgtggtccttaggt

SEQ ID NO: 7437 - DNA, 1992 bp, Cucumis sativus
  Intron number 1 from transcript Cucsa.130240.2 (locus Cucs a.130240) derived from phytozome v7.0 (chr-ID scaffold0102 9; pos 172281 to 174272 reverse strand)
ctaccgttgccaagatcattggcaagccagaagccgtacgtttctaattttctctatttaattaccattcaccttacaactgtttttgtactcattaaggcttattcttcacttttctgtttgattttagagcgattggtgatgtttttttttatcgatttgagaatctttgacttgactgtcattttagactgtgcacgggtagaatcagctattgggatgctattttagggtttctagatctttgttaagatggaagttagaatgttgctgttacttatagttgtgattatagctttgtagtttagtcaacctagctttgcaactgtttagagtacttggttatcttcttcttgaaaggggtgacggaaaaacagtccttttttttttattgtatatatatatatacacgctgggccgtcttatgaatagttctactaatgtcacgagacaacctcacttaccctacaacattagttctactaatctcacgagaaaatctgcttgactctacaacacttacgtgtcaaagaaactcggaggaacctaggtaggtggccagattgaacccatgcagagttggctattgagactatgtcttcctctttctctttaccattggaccctaattctctttaccattagaccctaatttatgatgattcaaaaacacagttttagaagagccatactgaaccatgaagtgactccaatgtaacctaactagaaatctaacctagcttaggaccagatctcttaccaaacttctcaatccttttgaaatactattattgttctctaagtccctcatttagtaacaaaagaattggctctccaaggagtgctcctgtcctgttttcagggtgtagcaacaattgttccattatatggcatcaatccccattacaagtcaggctcaccccataattgggcaagaaaactagtgctgtttttgtttttgttttcttccacatttgtgagtgtttggccttgaatctcgtctaatctcacgagataacttgcttgccctataatatttgagtgccaagaaaatttctaggatattaaattgtaggttggtgaccatcatgtattgaaatccttctcttcaagtttttttattatatcaatggtccttattaggtgaggccaacctatgttggtgaagaaagctggcagttacctgacccaaatcctcaaactcctccttgtggagaatataccatcgaagtttcaatgcaaaaggaagaatatctctaaatatgatccatactgttgagttgttaacactctatgaaaatcctacattcaaagaatttaaccttttaaaatatttgtcttacctaacaaggagaggaccaaggaggaagggaaccaagagctgcagaaaaggctgaaaaaggaactgcaagagaagagaagccgtattcaagcaacctactcttagctccattggagttgaatttcctcatctcaagaatgcctttttttttccttttacaagaaatgccatttattctttaagaatttgaacctgataatttttacaaataatatatgtgaagagagaagcaacttgaaatgttgatgttccctcatgtccatattggtgttgatgaagggattctctctgaatcaaggaatgaagtggtgtatttgctattctcctttgatcctggttgagcttcagcttcttctgtgactggtttttaagctagtagttaagagtaccttcttttcactttcattcaaagaagatgaggtccatagaccctacagtcacaacacatacagcataagtgaataaatatttcttcatccagacattttattcttagcaatttaacctgttattaattcatgtgtgtgactccagttacgagatttgttgaggatctttatagaaattgtgtgctgatgtgacaatagattggtttttgtcaagttctttctgatgcgttaacttgaacatcttgctgcaagcagtacgta

SEQ ID NO: 7438 - DNA, 2260 bp, Cucumis sativus
  Intron number 3 from transcript Cucsa.100920.5 (locus Cucs a.100920) derived from phytozome v7.0 (chr-ID scaffold0092 7; pos 200251 to 202510 reverse strand)
agcaccatttaaagaggaggactgggaggagggtttagaggaagttgattctttagaagttgatctttcctctggcttgtcggtgcttcctaataaagagccactgaattcatttgccccagacagctctctgacacagactaacgtttttggctgttcaccagcatcgtgtatctctgaaaatgtggcggctacttcaaaggagattcccccgattgcatctgggaatattgcttcggtagagatacctgggaactgcaatattcccgacgatatatttactattgcagatatttttcctgaacatggaaacgtgaatttggtggatgccaatgcatttcaggtgcagttagctgctttatcttttcaatgatttcttgatttgactatgatgaatgaatgcttaaatttttcttatatctgtcatgaggtgaatgattatccttatagaaacttgatatcttctgaacaaaagaagacatgcatttcagcagtgttaaatacatttgcattctgattcttggaatttaaatgaattgattttatctttagtctaataataccttcttttattgtgcttatagtttcaatttctagtgtcctacatggctattattgctcatacattcttcatcatcatttgtcttcaaaggataattattctctctggatttgaatttgaatgatctgcagaatttgttgaaatgacataccggtatattgtcttctgcttctttatgaaaacaatttgcatgcccccttctcactttttctttgttcattagaaaatgttaatatttttcatgctagaatgaaaaaagaggaatgaaggtcaagagcttaaatttaaggcgaggatttaaaagttacatcaaaatagactgcagctctaaagtagtaaaccttgaacctcagtgagtttacttagtggtcattgtagctagcgagaaagcagagaggctttaaaggaatggcttccactactggtggctacctagctaagatttaaaacccttcggcttttctttcttgcttgattttcataagtgttcagttaaggtgcaccaagttggctttgacacttcatctttacttttcttgaatccttgtcattttccaatgtcttgcaattgttccctaatctagtcgtttggaagtttaagtgaaatacacatgtgtgcagaccctggctcctaggggaaggacaaaaattggtaaatttatccatccttacttttcttgaatccttgtcattttccaatgcctagcaattgttccctaatctcgtcgtttggaagtttaagtcaaatgcacatgagtgcagactctggctcctaggggaaggacaaaagttggtaaattcattttggtcaaggagtgtttggttcttatatgttcatattttggtaatttatgtcctacatggagttgtagttttatattcagcattattatcatcatgatcttttatcttggagtaagtttggtcctatatgtaattacagcttgtttactttcattactcagtcgaagtacattttataattacacttgatggcaggacctatcactttcttcttcttttttctttcttgctttccttttttttctttggtggagtacatgatgccatgcactccatatattttagttcactgtcgtaagaacaaagccttgcattattaagcagaaagcctattttctatttctttgaaatggaaggtttacgtggtggtgtgaaaacccatttatcattctcaatgaaatctgaaagccagtgatgatctttttagaactgaactatttgaagcaatgagatggtgatcctattaatttaagctctgttttgttgttgttgcgctgtcttttcgtaagaactatatatatatatatatatcttcctttaaattgagaatactgagggcgcaaggcattgcgacaacagtctgttttggagcattgctgaagtctcccttttgtgggcttgttttttgtttgtacttgtattcattcctttttctcaatggaagtagtcattaaaaaaaaagttcgttttggaaatttgttatgatcttttgcattctaagcgtgtcctcgaatttcaatctgttattaatggggtttacttttgagggatatcttctaaccattgaacacatgttgtggcttacaggcttctgctggcgctccaatacatacagatcaagttgatacaatatttgaagatttagaagatctagaaatcaatttagaagatcta

SEQ ID NO: 7439 - DNA, 1780 bp, Cucumis sativus
  Intron number 1 from transcript Cucsa.102620.1 (locus Cucs a.102620) derived from phytozome v7.0 (chr-ID scaffold0092 7; pos 1626520 to 1628299)
tgccgttgctccagtcaaaaatcaaggaagttgcggtgagttttttaaatatcaactgcgcggctgagaatatttagagttattctaaataattttctttgctacataaatacacaagacttatttaaggggccggattttagtatatactaaaaaattggaactgtttaccaacaaaatctatctttcatttcattttttctctccgtattttgtaaataattttaaattttaaattttttttattgtagatcatttttaaaaaatttatatgtctctatattactttttatttgaaagaatatctatatcactttcaatttttgaaatcagtgtgggttactttagccttggaatggcacaacttaatataaaattagaaaatataatcctaagttttttattttctgtttaatggatttttgtttatatcattgtataacatacaatatttagctctgtagacactatgttgtaattttttttaatatattttaaatcaagggttaaataaaattcatgcatatgttagatatttgttattagaatttttttacaatttacaaaaggaacatttttagccaaattttggatttaatgaattttgtggttgtcaataaaattgataaaatctaaaaatttatttaaattaactattttttaactcttcctttagaaaaactagacacaaattttattgtatttatattattgtatatacatgtacctgtgagaaaattttaaaatagaatcaaacgaaaatataaataaaaaaatatatgaaaaaataaattataaatatataaatatgcataaatataattttaataaaattatttaccaaacacatcaacctataaaattttataaatatttcgttccaataactttttaaaaattatgtgcggacaaaattttaatatataaactacaatagaccaatgcattttggtatatagacgaacattttaaacctttttcattttattttagtatattttcaataatttagctcctttttcattttaaaaatttattaggtacatattttatcaaattattcgaaaaaacaatttttggaatcgtgtatcaaaatatcaaaatcaatattttagttcatttacaaacatgtggtagtataatttgttaccatttttatcccacttcttaagaataatttatatattaattcttttaaaaagcccttaaaatgaaactgaaggaattaacacagaaagtagaattttaaaacaatccaagagttaagttggggtggattcaaactccgaagtaaagggggtaactgggcaacgcaagacactcccatgcgccagcctcactaaccactcacccgaggatatcttacacgttgagggggcatgcatatgctccttttgagaacccacactacaaatttttaacttttgagaacccacactacagaaactatctttttcatcgaatgaacataccaaaattcatatgaatttcgaactatccatctccagttaatgttcacatcacatatataattttaaatcttttaattttttttgtgtaattttaaatggttaaagttcttcaaatagacaccttttaacaaaacaaatgttcatgcattttaaaaatcaatccatttggtgtgtagatcttagcatgttttaattaatgtgtgcgacagcccattgccgttgttaacaagtgagcccacttatgtgataagtttatgttgttgggggaaacagggagttgctgggcattctcgaccatagcagctgtg

SEQ ID NO: 7440 - DNA, 807 bp, Cucumis sativus
  Intron number 10 from transcript Cucsa.337780.1 (locus Cuc sa.337780) derived from phytozome v7.0 (chr-ID scaffold033 56; pos 778641 to 779447 reverse strand)
ggaagcgacgctacaaagatacaggtaaccatacttttaacggtaattaatctttcaaataaagaagtaattattctgtttttttataaattctacaacatttaaggttggttggttaataatttccttttttgttttttgttttttttaagtaaaacctacaaatacttatttcatccctagctttgttatctactaaatcaatagtttacaaaatcaagcaaatttttgaaaactaaaaagtagtttggacaatcttgtttttatttttcaaatttagttaagaattcaactgttgagatgtaaatcaagtaaatataagaaaataggtctaatttctaaaagaaaaaaataacaaaaatggttatcaaataaaatctaaaatattgttttgtttttacttttctactttgaaatatatacatgtttctttctaattttccaaagatacatttgaattcttagtcaatttcaaaaaattacggtgatatttgataacgatttgatttttagattcttttgcttttaaaatttgtgtttgtttccttccaattttctttttcttgtactagttttaacttttctcacggaaacacttgaattctttttcaattatagaaacaaaaacaaagttaaacctttttttcttttcaaaacagagtggatattttgattcattatgaggattcataccgtcaaaatatgttggattgaatattagtgcttacctttacatttgtatggtttgttcaccttttccgtatgaaatcagattacttcgagcatcgttgttgttggactcggtat

SEQ ID NO: 7441 - DNA, 8354 bp, Cucumis sativus
  Intron number 4 from transcript Cucsa.212390.2 (locus Cucs a.212390) derived from phytozome v7.0 (chr-ID scaffold0154 3; pos 200988 to 209341 reverse strand)
tggttagtacttttcttacttctatagatcttaaaactaacctgtggctgatatttgcaggaccccaaaataagaaaataaaacttctttttttgtgtccgattcttgtttactggagaattcagaaatgatttcttgtctttagatatgatgaatacacaaggcacatgtaaaatgtgtctggggaaaaagtttgaaaacaaataaatcattttaatctggacttgatttagaagtataggaaatttaaaaaacgactagatctagggaagtttgtttgagcatcctgcctcatcctcgttttccttgacgtgaaactaagttcaagacgcttgagcttctgtatgctaccttacatctaggttgaactcatggtagaaatatatgaagtttgactgaattgtggtttctgaaactacatcgaagccatttcctaacaaaagcattggggactggaagtgaaaaaatagaatgagaaaaagaatgccaactttgacagaatagagttgatgcattatcctttttctctatgatctctctatggttcctccataaatgatggtttctctcccctttctattttttttaatcttttgtatttttaactctataaatgagttaactaatttaattcaaaattatgaacacgaaatatattttttattatattgtaaccaaagccattttttaagaattaatttctttgatgaatgaaataaaaaggagggagagagatgccttgatcttacatcaagagaccagaatacacagttcacattcttaccatctctctccacctattggaaagagtggtaatctctccctagctaatataggttcctcactaattttttctttttgatagaaacaacaatttttattgagaaataatgaaataatagaagggcatacaaaaaacctagcccaacaaagcaccccgcctataaaaaaaggttccaactaattaaaatgtttcctacggaatagttacaaaaggtcttcaaaactgaagctcaacaggacgcgcaaaatctagttaaagcccaaacctcactatggtccctctctctacctcaaaacacccgatcattcctctctttccaaacatcccaaatcacaatgcacgcctcaacaagccacaaaaaaacacctttttctctaaagggtggatggaggaggaaatccttgattgtagcacgaacactcctttggccaacaaagttaaaatcgaactccagtagaaaagagattatcaaggtcttcctccgcctttcgacgaagcaaacaacaaaatgatccaacaagtagagtcctcttaagaagtctatcaataatgttaacccgatcaagtaaagacttttgccaaataaagaacctaactttcttaggaaccttaatcctccaaacctcattattgtaatacatatgttcatcctcgagaattcctacgcactgactttcctaattataaaattgataagacccctatcatccaccagtatactagacgagggaagaagaattagtgttggcacgtgtgagtcggttagggtaattagttaggatatgctttatgatgtaagccatagttagttagttagttagttaaaacccataattagttaaagaacaactgtaatcaataactaactaaaacagttagacacccaactgtttcaaggaaacagttacttgtaactaaccttgaaatatcaataaataatcaatctcctagcccaaaaaggcagagaattcatttgagaaattaatcccaactttgaattacatcactttataaataggtttgaaatattggagggaagggaagctaggttttgtgttttagtcgggaagtctgtgcacctttgagagttaaggtaacagggagagattgtaaccgaattgaaatttccacaattcattttattattattcttcaatattgtattcgacttggatttatttatcaataaagttccattgatagaacacaaccttagtgttccatcatattagtatcagagcggtcgattcagggaagaaacgaatttacgatggttcagacgcgtatggaagaaagattggaggtgtatgatcacgagctgattggcgtaaagaaggaactaagcaagttgccggcaatggaggagaagcttacgatgatcacaactacattggagaatttgagtgtgcaattggaaaaatatcagcagtgatgatgttgtgttatggaaacagtggcaaaggaatgaattgccatgggagacagaaaggccgagccaagtgtgcgtgaaacgatgacagtgaaggccaaggcaggagaagggacgttcgacaagggaattagcggcgaaacaccagaaggaagaaccaaaaacgaagatggaaatacagaacgtaataagtttaaaaaagtggagataccgatcttcaatggtgaagatctcgattcttggttatttcgagttgatagatactttcaaatccataaattgactgatgccaagaagatactggttgcgacgatcagtttcgaaggcccaaccctgaactagtacaaagcacagaaagacagggataaattcgtggattggccgaacttgaaggaacgattacttgtacgattccgatcagatcgcaaaggatctatatgtggccaatttttaaaaattccataagagactacaatggaggaatatctaaacttgttcgataaactaatggccccattatcggatctacgagacatggtgattgaggagacattcatgaatgggtcatggatcaaggctgagatgtatttttgtcaactaaccgaattggcccagatgatgcaattagcttagttggtggagaactatgagatcgtccgtggggaagccaaccttaaaggatatgctggaggtaaatatccaccttctttatctactagtacttaatctggtgggagctccaattcaattgataataagagcaacactacaattcccaagggaactatcactttaagaggagtggctggtggggaagctaaggaggggcctattcttgttgtctgactcaaagttttgagctcgaaaggagaagggactctgttttcgatgtaatgaaaagtactctcatgaccataaatgtaagatgagggagcaaagagagcttcaaatgtatgtcgtcacggaggggaaggaggaatttgagattgtagaggatatggagaatgaggagaaagaattataaatggtgaggatagatgaggaagaccaagccattgtagaattatcaattaattttgttgtaggattatcaaacccgggtactgtgaaggtgagaggggagatcaaaggcgaggaactagtgatcttagttgatcgtggggctacacacaactttatatctgaaaagtttgtgaagagattatagataccaacgaaagacacttctcattatggagtgatcttagggtccgacacaactattaaaggtaatggaatttgtgaagctgtagagttgaaaatgaatgattggaaggtagtagcgaattttctaccattggagttagggggtgtggacgtggtcttagggatgcagtggctttactctcttggcatcactgaagtagattggtgaaatttgaccgacttttatgcaccacgacaaaaaggtgataattaaggaatatcctagtttaactaaaactagagtaagtttgaagaatatgatgaagacttgggtaggctctgactaaggctttctggtgaaataccaagccatggaatgggatgtctttacttggcctgatcatttaccaccagaaaggagtatcggacatcatataaatttgaaatagggaactgaaccataaatgtaaggccgtataggtatgcttttcagcgaaaggtggaaatgaagagattagtggatgagatgttagcatcaggaactatttgcccaagtcagcccatatttcagccctgttctgttggttaggaagaaggatggaagtttgcgcttctatgtgaccgatcgttgaataacgttactattccagacaaatttccaataccaataattgaggagctctttgatcaacacaatggtgctacatagttttctaagattgatttgaaagtcggataccaccaaattcgtatgtgtgggaaagacgttgagaagacaacatttagaatgcatgaagaccattatgagttcatggttatgccatttggcctaactaatgcaccttctgcatttcagtcattgatgaattctatattcagactgtattggcgaaaatttgttgtgttctttgatgacatcttaatttacagcaaggattttgaagaacatctatcacatttggggaaagctttagaagtgttgtgaaagaatgagctttacacgaaccaaaagaaatgcagttttgcacagacacgtgtagattacttggagcacataatttcgggccaaggagttgaggttgatccgaaaaagattagagcaatcaaaaaatgaactatacctaagaatgtttgagaggtctgaggcttcttgggactgacagggtactataaaaagtttgtccaacactacgggtttatagccgctcctctaactcagctttttaagaatgataaatttaagtccgcactatgggtttagagtcccttgaagcattcctggaattgcaaaatgctatgatgactcttcctgttttagccttgcctgatttcgatgccccatttgaaatggagactgttgcctctggttatggcataggagcagtgctcattcaatccaaatgacccattgcttttttcagtcacaccttggctatgagagatcaggttaaaccagtgtatgaaagggagcttatggcagttgtcctcgtcgtgcaaaggtggagaccttatttgctagggaggaagttttatagtgaagacggatcaacgttctctaaggtttctattagaacagagggttattcggccacaataccaaaagtggattgctaagcttttgggatatttcttcgaagtggtatacaagccgggattggagaacaaggcggcagatgctctatctagaatgcccccggttgtccatctttataatctcacagcccccactttgattgatttgaaggtcatcaaggaagaagttgaaaaagatgaccgactaaaattgataatgaaggaagtggcagaaggggaggatggcaaggcaagcaagtattccattcaacaggggatgttgaggtataaagataggatggaaggagctgtttaggttggttgtctagtacctagttgaatcgtaggtcagcctatcatcctcaatcagacggccaaactgaagtggtcaataggggagtgaagacatgctttcgctgtttttgtggagagcggccggaagagtggataaaatggttgcattgggtagagtactggtacaacacagtatcagagatctttaggggtaacacccttttaagtgtctacaagcatttacctccacccctggtttattacgatgatcgagacactcctaattcagcattagatgagcagctcaaggagagggatattatgctgggagcattgaaggaacacttgcggatagcccacccaagaaaagatgaagaaaaacgctgacctaaagagaagagatgtggaatacatggtaggggatttggtctttcttaaaattcggtcatacaggcaggtttccttgcagaaaagaataaatgagaagctgtgaccgaagttttttggtccttataagatcatagaacggattggcctggttgcatacaagttagagttgccaaagacatcattcatccatcctgtttttcatgtttcccaattgaagaaaatgctgggaaatctatcaagttgaaccgtcgaatatgccctatatgactgagattcacgaatggcgagcagtgccagatgagattcatggctacttgaaaaataagactggaggatgggacgtgctaatcagttggaagggcttgcctagacatggggctacatgggaagactatgaagaaatgcagcggctgtttccagaatttcaccttgagtacaaggtgaatttggagaaggaatttaatgatagacccctgagtaattagttaggttgtgtgttttagtcaggaagtctgtgcacctttgagaaataaggtaacagagagagagattataaccaaattgaggttttctcaattcattttattattattcttcgatattgtattgacttggatttatttatcaataaagttctattgatagaacacaaccttagtgttccataaaaaacacacagctcactttctcacatattgcctacactaaggggtgaattctcctttctactcttataacatatgtattgactattggggtctgacaaggagttacaatgaacttcaagtagatatagaagtagcgatgctataagaatgaaattgtgggcttggtttttctgcatgctcttgtattcctttaattttttcttactgaaagttatttctatataaaagattatagaagaaggggaaaaatagaatgaatggaagtgataatagactcagtagagggagttgaaacctcccttgaatttccaaggaatcctgatcgtgatctcccagttgacccacacaactcaatgtttacaattccctcctttcccttctagatctccaacatttaactaaaacatcttgctaccataatatatctaaactaagaaaaacactaactgctattatagagaatcattgactactaatcgactctgtagaaatacaaggaatagatattaactgatatttgaaaccctaaaatctataaaactaaataaaaggaacaaaattaaattaggattgtaacaggcaaagatgagtttgtcctctacatgagcatcttccaattccatgttgcaagagggcatcctaaattgttagataaatgcccctatatcatctcaagatgcctggaaatttcacattttggttaaacaaactaggtaatctagatgccatttcatgacccatgagaatcttgagtttccaccaaaagtgctcctttcgctttagatcccaaattcccaagctagccttctgaacttacttggcagtagcatgttgctgattggtgatggagaaaggtttctcaatacaattactgatttcagtttgctttcatcaaggatagacaaaatatcgatgctagccttattgcaaataaattggttgagctttggaatagaaaaaagatgaaggttttgttataaaggttgacattgaaaatcttttgataagagctttgttagattacattaaattcttgaaaggcattggaactgatggagataatgggttaaagggcatttcttctctccattcttatcattggaaaagttcaggaaaagtttcagggtataagacaaggatctctcctttcaccagtaggggatctaaaaattttattgagggactaaatccttatagttgggtttagtccctttgactggtgccatgtgcatggggaccttagcttacatccctgtttgccacaaaaaaaccctcactgaactgaggaactgaggatgaaaagagaattcctcgatcatctccctttagtcatgttggctagccagatcaaaactatgctaatcaaagaaacaagtccgcacaacatatgagcaaggtctgcaactgccctcctgcaaggtctgcgacaccaagaccctattaaattcagcatcttccaaggtatatttttccaaggagaatatgacaaacaaaacttaactgtcttgggggttcttcattcaccacatcgagataaaaaccaaatctctcttgggagatgggttgacttgtcaaagagaaggatttataggaaaaaaactctggagggctaggacactgtaagcaaaaagcccatctctcttagaagagcactgaaactcccccaacaatgaaaggagaacaacgatatccctcgttcccctttcaaacaatgaaccggggaacctcaaaatgggggctggctaagccagaacgtcaaccaatacataaattggcattgattgtttcatgatgaatttgtgagtgtaatgcttaacattgaaagtagaagttgaatgggataaaggcttcctttgtaacaatccttttagaaacaaaagaattccttatttcagcagaatcattctttggttttatataaaccttttctgattgggatactactcaaatgcttcaattcatttgcttattgttggtttgctcatgctgttttgcaggtattgaagttacaacagaggatacagtctctgca

SEQ ID NO: 7442 - DNA, 763 bp, Cucumis sativus
  Intron number 1 from transcript Cucsa.267090.1 (locus Cucs a.267090) derived from phytozome v7.0 (chr-ID scaffold0236 4; pos 168392 to 169154)
acttaggttaacaatttacaaaatatacaacttattacttagctctatttcttttctttttctttctttttctttttttatatagtttagagatattaattatttacttgttgtctccattcttcgtttgtattctttaaattttacattttttggtttaaatcttaatttagatattgaaataattattttattttaagcccattgcttttctttttatttcttcttgtagttttcatctttttaaactaattaaaaagttgaattattaggaaaaaaatggcaattgtttcgtttttttcttagaaaaattaaattttttttcaatcccttatattatttgcatttttctttaaaaataatgttgatttcaacaaaaaaaaaaaaaaattaaactttttatcttctagttttcaaattttggtttggtttttaaaacatctctcaaaagtatattacaaaactttgaaaccaaaacacagaagaatatatttctttaaaaagaaatgtaggtttaatttttaaaaataaaaaactaaaatccaaatagctaataaacaagttttaagttggtggattttgacgttagttccaacaaattcaatctttgaggaagctttcaaaatgtctatagacgactaaactgtgaatttttttttcattaaatttgggtacatgtaccatatgtttaaaataaaattctaaatctactatttattttattttaggtgaacacctcattaacatccacaacacatacaat

SEQ ID NO: 7443 - DNA, 2589 bp, Cucumis sativus
  Intron number 1 from transcript Cucsa.302340.1 (locus Cucs a.302340) derived from phytozome v7.0 (chr-ID scaffold0295 1; pos 517546 to 520134)
gagcaatctgaaagctgaataaatatcctctgaattttgcttcaaacatcctttctccatgaaaaaacaggtactaaagttaaaaattataagttcttgatccttaagtcctttctgttcctaatattaagttcttgattgttaacttgcgaatttcacttctaagatgaattattttcatgaattggcttctttgaaatagctggaaatgtccatcctgtttcctcatttgtattttacttagttccaattgttaacttgtacataattttatttaaggaaaattacctaaaaaagtttaatctttatcttgatgttttgagtgaaattaatattgggtctttcactgttgcctagcgatataaaaatcgctcagatcaaaatccaaccagaggtgaggaagatgagaaaatcaacaaggaagataatttatgtaactcaaatttgtctttattttttattttagaaaaaataggaatacgtcagacaaatttataatctataaatgtatcaaactgcaacatgattatatgtcatcacatcattttttaaaattaaaaccaccctgtcaatttattgacatagtattgatgcatgatttcaacctcgggtttaaatacttccatcaaattttctactcatttaattttagttttattatttttatgatttcaactcttgttttcatgacttctgaaaccatattcgataagatatagttatatctcaaatcaaatcaaattgacaatagaagaagtagcaaatttcttaatttttctatttattaaactctaaatactaaattgttatcaaccaaaagtttgactttatttatcagaagtttgactttatttgttagagatttatcttaatagagattaaattataataattttcaaagtaaaagaatcaaattgttactcattttaaatttaataatttaaagtacttaaactatttttttaaaacaaatatggtatttaagatttaaattacttgtacatcattttttaactatttaactttttgtttttgaaaatgagtatttaaaatgctagaattaaaattgttacaactaattactcatagtggtgcacatacaatttaagtcgaaattcaaggttacgagttatcattattattatttttttatttaattcaaccatatataaccatagttttaaatttccatggatagttttggatagacaacctatttaaattatcgtaaatttagcttttgattttttttttgtttttatattttttaaaaaatatccattagaattaaaattttatagatcattgaaatttcgataaaattatgacactatatcgatattttaaatattatatacaacccttttaaatgactaaaaaagcttaagctgatttggatttcactagtactttattagaagagtataaaatcagaaaattacaaagtagaattagaagtatgaatacgcgtttgggtttgattaaaagaaactgtgaacttttaatacgaagatgacgtgcatggtcggctacggcgggggcccacctcgatgcctaaacaaagtcatgagaaggcgttttctaacctcaacatataaacgacgccgttcctatcgaagaaaacgaccataaaacaatcccccgcggaaaagccaaggtccctcaactcccacgctaaaactgtcaactacccctttccccaatcactttcccttcacccatttatgtcgaccaccagtttccggcgaagaattccggccatttccagtacatccaacaaccacacacgccatattctctttcaatctccccaccggagaactccctcgacgaatcgcactccttccaagccctccaaattcaccagatgttcctcggaacccaacctttggaccactgccatcaccagcgccgccgctgatcggaatttttcctcggagaaggaaggggaagaggttgttatttttcgtcctcatacgttttcggaagcctttgcttcatctcctctgttgattccttcaaccgatcaactactcgaggttagggctccggttattgttattgcaaatcagcgattattgcttttctttaaatcagataatcagaaaattaggagatataattatggcctaattcttcgcttctttagatatttattttccatttctatcatgttagtgtattctttggtttggctcttgatttgtttaggatgactaagaacatcttgaatatgttatctactgctctatatgaccaagcataatttcttacagtgaaatttagttggcgtgctatttctgattttgaccaaaaaagatttaaataattgttttatataaactttcatagtctactaactctctaaatgtttttataaaaattgattctacctaaaatgtaactaagttagagttagttcatagcatatatatctatgcatcgatttgttgttgtttactttttcttcttctttatttgtagatttcataacaagtatatttctttaaattaacttcatcttaattttagtatacaaaacattattgatattcaaaagggattctttaatgcagggctacaagaaag

SEQ ID NO: 7444 - DNA, 1335 bp, Cucumis sativus
  Intron number 12 from transcript Cucsa.200100.7 (locus Cuc sa.200100) derived from phytozome v7.0 (chr-ID scaffold013 65; pos 517951 to 519285)
ttcacttctattggattcttggagctggccacttcgtaagtatcaatttccttttacaattttgattttatcaccattattttataccgtgctttccacccaatgaaagttagttttagtaagattttgaaattaaaagaaatgtgttttttttcaaagaacacacatataaaaggtaggcttagtactaaatacatgttaaaatttgactttttctattgtaatttaattttcttctctccactctaacttaaaaatataaaacattaaatacaattatattttataaccaaacaagtttaataaaaatatggaagcgagaaacaaataaacatggttgtttttagaattatgacatataacaatgtaaatgtacgaaaatttgaacatttaatttgatgtgaggaaataaattataatgttagttatgttcatttgaatattgttaaaaaaaaatttgatatcaaaattaaaatttatagaaaacaattagctcaatttaaataaaaatcttattttacaccataaaattaattaaataatatttcaactatactatattattattattattattccagcattgtaaattgtagttaatacatgataaaaaagaaaaaaaattataatattgtttaaagacagattgttaaaaaatatacaattgaccaaaaaaattgtatgggataatatataagagagtaaaagtaaaagtagattgagatgtctcatcgaggcattgatgagggtaaaaaaggttagtgttgatgatggtgcggtaactttttcttgaaagtaaaaaagaaaagaaaagaaacgtcgaagtactgtgtgtggattggttaaagtccgaccaattagcagacaattacgacaactccgtctcctatattgactttcaatccttttattttctttcactttttaaaaaatatttttcatacaaatctctctctctctctctctctctcctttttctttattttaatttgttttctttttaaaataattattttggtcatagaaagtgactttttcttaatcaatgtttgcaaattttgtatgccaattttttttttaccacaaaaacttaattgatttgatgtgattgaaagtggcattggagtaaaaggattaaatataactaattctgtctaatcttgaactttcaatatatatataatttgatcaaaatataatttctcagaatgaattttaagagagaacttagttaaaaataaatagtttagcatttagcattttgtagtgtgacttactgagggtttatgacaagggacaggtaccggttgaccagccgtgcatagcgttagatat

SEQ ID NO: 7445 - DNA, 1557 bp, Cucumis sativus
  Intron number 2 from transcript Cucsa.126660.2 (locus Cucs a.126660) derived from phytozome v7.0 (chr-ID scaffold0101 7; pos 532766 to 534322)
aagaaagtagagtacaggtttgttttgtttcttctctagggaatacttgaaaaaatatttttagctccaattgcaattgaatagcatttttaagcgcttaaaaaaatcaacacaaattattagatgatctaatattaaatttaccttctctattagtttaattttttagatgaatcaatgatttaagatagtatctggtcttatgttcaaactcctataatgtagttatttcctccctaattgatagtgatttccactagttggatcggctagatatttcaagtccacacaaatgagagaagtattgagtaatataatattaaatttaccttcacacatcatctcaagtgtttgggtcaatcaactatttaacaaacaaacaccaaatcatagtccttgtgttgcttgacagcaattgccttgtgctgtcttgcagtctgtttaattcttggatgcatttttgtttgtgtttttgagctatttagtttgttctggactttccttgtcaatgtttggcacgagggatcatctccatggatgaattactatgattatgctatttggaaaacttgttggttgatctcacattggttcaaagaagacgttggatgatggaattctcatggatgaattactatgattatgttggtttagccttataagtacaagggaaagtctcacctcttgatctaactttcaagattgaaaagttagtgcttctagagacttgcatcagactagaacagccaagtttccatctacttttcttcggcttgctggtttagttattcgttaagagaaacgtttggagctgttttaggtacctagataaggattttagtatgttagtattaagaggtacaatggaagttagttactggacgttgtataaatagcaagagggtgagtgagtgaaggttgggctactttgtggagtgatctgggtgagagttcttaaaagggaggttccaagttcctatatttgggttatcttgtaattttttctttaattcttaatatattttagattttgattcttaagctgttagcaacatgctggactaattggtagcctgatttatataatgtatgccccatatttgactaaggagaatacttcctttgctaagtgtgccacaataaatttctacatcccaccacaaaaattttgacagattggagagtgaaggagagaaaagagagattattatataaattttttctttggaaagttcaactctctgtgaaaacattaatcttgctgccaagtctgaagtgttattctttgatgaatacgaaaattgtgcaggtagttgctaatatccacgcttaagatgacttgaatctattttaaagaatacctgcttgaatttgattactaatatgaaactttgagatttctatatctgagaagaccgttaaggaagcaactactttagacttcgatgtacaaatcccattcttgttcttgcacaaggattttattttacatttagcctacttttgttgaaccaacatgcagggaagctcggacttatctatcttaacacaaacagg

SEQ ID NO: 7446 - DNA, 3388 bp, Cucumis sativus
  Intron number 1 from transcript Cucsa.170420.1 (locus Cucs a.170420) derived from phytozome v7.0 (chr-ID scaffold0117 6; pos 39047 to 42434 reverse strand)
gtgaaggaggtaacaactgaaagaaagtaaagaaagtggaaaagatcaaaagtaggatattgaataaaaaccacagctaatgatgggtggtatcggtaactagagtaatacttgaatgcattttgagtctcacctctcttttatccttccttcttttatctcttaaatattattattattattattacgtgaaaattaaaattaaaattagataatttgatggaattgataaaattagacgatgttttagatgcatgtaagtatttatctcgtaattataattagtgtagtactttgtattattgtgtcagtaaacttatgacgattttatttacttttaagttttaaagatgatgtattttccaaaaactttgttaatagtttacttttgatttgtccacaactttaatttttaattttctaagtgtttgaactaaggttgttaagtaatgaagttgtagtggagtgacatcattcatctaacttcaattaaaaatgtaaacataggtattatggtaacaaaagatttatttttggaaaatacaccaaccttgaaacttaaaagtttttggaacaatgaaggaaaaacaacgttcaatctaatattataacaagataattaacgaagtaaaaaagtaaattcaatgtagaggctacgccaaatcgagaagatatgttcactagagtataattaaatagattactacaaatatgcaacttatcttttgaaagactatcttaagatacaacaaaattactctaaaagatgacttagactcataagtaattgatacttgattgattgcaaagagagacttttttgaattgaaaattaatgttgaacaacatgtcaataactaactatcatcacgaataagaacaacaatctttctttatagttcaaaaattttgtccatgaacacaaaaaatatactgtagcaacactcgttagaaattccttctttttcttctttacaaaatacaaaacacgagtcaaacacaaataagggaagaccatcaacctatcataagggaaagtttgaaacaataaaagaagattttactgccaaccaaaaattttaataacctctatcaattttaaattcagtaaaaatttgctggtaattttttaatactttggctttacgtaattgtgtggatagatgtaaaaccatttttatcaccacaatcttggatgaatgaccattttgcgaaaacataattaatttcttctcatgtaaagagagatgtcaaccattgaaattttttttagcattgttggtgtaatatattataaatagggtaattataggtagcagtaaatttagaaataataatttgacatgtaacaacaatttttttaaaaaaaattaaatataactaagtttgtaataacttataaacttttgtggtatatcattcataaatcttcttatattttgttatatttgtaaatattttaaattattactatacctttaattattttaaatttaattgttatatgttataaatatagtgatgaagaatgtttttaaattcatattataaaagctttcttactaagttggaatcacaagcatattagaaattaattaaactacatgtatacatttttacacgcacacagtggtaaaaccataaattttatatgaggaccaccaagcactatataataatcatattaaaaaatgttaaacaaatatatcgacgttttacttatgttccaataactttcactacatttgtagccataaagaaatatcagcaattttctcataattttttgtaatgtaaatatgtgaatttaaaaattgcatagaaaaagaaattgtatcaaaaaaagaataatacatttttcatggaatattgttgagagagtggaagtttggattaccaacttttttcaattttttaaaaatatttgttagataacaaatgaatatttgttagataacaaatgagggttaggaaataagttagtgtttcaccaactttgttgcattttttaaaatatttgttagggaacaaatgagagctaagaaataagtcagattttatgttaggcgagttttttcctctttttaaaaaaatttcttccttttaggaaattattttaaaattttgcaatggacacacaaccattacaccaaaaccaaaattagctaaaataaaactaaatttaatatatattgtaatctgattctttaaaatcaatactaaaatacaaaatccgttaatgtgaagtttgtccatgtatatatataaaagttttataatttttagagacatgaattcctacttatgatatgtgtatttaattttcatattcacttattttgaaataatgtattttagacgaaaattaagttataggaaaatctacaaaaataacacattttacaaaatatttacaacctatagtgaattctatcacttatagtcattaatatgctataatgatataagactatcagccaaaattttgttatagcttgtaaatattttattttattttactatttttaaaaatgtctccaaacaaataatacattttcctaacaatacaatacattaaaattatgtaatttctattttttaaaacatctcttaaattttatataaaagagaacttttctggtttgtaattcaatctaaattatatatcgaaacaaaatagttggataagagggaataacttcccttcctagtgtgttaaaaagaagaataaatttgtttgtgataacttttttttaaaatttatgaaaagtagaatatttgacaaaaatatttacattcgtaccgtcaagtataataaatgtatagttttaccaattttgttgtaggaaagtaaataaattattgtattttctattttgcgaaaaaaactcattttatttgttccttatattttccaatagcttgaaaatttattgcaaatttacaaggaatagttaagatggaaaaatgcgaataatttagcaataataattacaaatcacttctacccatttgtatgatgttagaaaagaaagccaataattagttggcagaccaaccataaacctaagcagagtgtgatatataattacataggcataatatgaatactgcttttcttattgcaaatctcagtctccacctcaaagtttgcatccaactttatggtaagataagtgagcatatgtacctctccttagtcatacccaccacacacaatttcaaattaaaacctatatatatgtgtacatgtatgtgtgtgtatatatactcttttaatttcctcattctctcttaattaaacatctttctttaataataatggctagtttgaaatctgacgtttacccaagtgggggcattggaggtacaattctcgttggggttg

SEQ ID NO: 7447 - DNA, 5248 bp, Cucumis sativus
  Intron number 6 from transcript Cucsa.194100.1 (locus Cucs a.194100) derived from phytozome v7.0 (chr-ID scaffold0133 7; pos 387844 to 393091)
aaactggtcaaggtaccaataaactacagattgaatttgtcataggatccatttccttttctcctgaaaaagaggatttttattaacctttagttttatttgatgacctgtttggttgcaaattaactaagttgtgtattcttctcataactttgcttctctttgctcccttgcttgtacatggcacttcaaaattacgtatcttttttgggtgccttgttgcaatgggagtgttctcttttcccccctcttttcgtcttttgtatcttgtttatacctgttcattttatgaataacacttgtttttcttattcaaaattttaatccattctatatgatgataggcttttgaaatccacctctcaactacacattttatttcatgaattaaaaatccttatacagagcatacatcatataaatgcaagcacctgttattcacttgctcagaggaagactgtgactggagattattattagagagttcttctgaataggctgcagagggggggggggtactgtgacctagtcaggcgagattctgagtcggtcaccggtggccggaaaaagaagaagatggattgtcgagaagtccaggaagaggagatgaagttggttaggtctttttgttataaatagtgggagaggggtttgggagaggggtgaagaattttgaagaaagatttccttataagggaaccttgggaaagtctcgtcctctcaaaaggctagggttacttgttacttgttattctcatacattccttatgaagatcaaacaagactttctgaagcctaacttcctcacatattctcaaacacatggctcgatattaagcatcaacactatttttggccacgaacactttgcttcttactcctccaagttacaagattgccccaagcaaaggtacaataaccggaggtagactttctgtcaacaacaaatcctgcctattttgagtcagtgtatgtctcaatgatttttctgtttgtctttctaaacattaaccctttaccaagtgttgttttcaagtatctcaaaattttgttgatagctttcatgtgttcctcatagggagcctacataaacttggtgataacactcacagaaaaggaaatattaggatgagtatgggataagtaaattaatttacctacaaggtgctggtattgttctttatcaactggaatttgatcatcaaagtttcttagtttatagttgagttcaataggagtgtcagcaggacgacatcccaacatgcctgtctcggttagcaaatcaagggtgcattttctctgagacacggagatgccttctttagatctggccacctctattccaaggaaatatttcagatttcccaaatccttgatttcgaactcaaaccctatctttttctttagttgaacgatctcatcaatatcatcctcagatagcacaatgtcatcgacgtagacaatcgctataattttccctgccttggagactgggcccctgattgtacccctgagacttgatgaaagtgaaaaatctgtcaaactacactcttggtgattgtttcaacccgtataaggctttcgaagcttgcagacctgattattaaattgagcttcaaatcttagaggtagactcatatacgcttcctctttaagatccccattaaagaatgcattcttaacatcaagttgatataggggccaatctttattcactacaacagataacaaaactctaatagtgttcaattttgcaataggagataacgtctcacaatagtcaatcctgtaggtctgagtgaacccttttgcaactagcctgaccttatgttcgtcaattgtaccatttgctctgtacttgagtgtaaacacccatttgcatccaatggtcttgtgtcccttagggagtgtgcgaagatcccaggtcttgttcttttatggggctcttatttcttcaatgatagcaggtttccacttcggacactttgaggcaaggtggatactcttgggtattgtggtagagctaagactagcagtaaaagctttgaattgtagtgtgagattctcgtatgacacataattaaatatggagtacctttcctcagtgcaataggaagatcaagggatggatcatacttactagtatttctagaattgtttgacttagtttcattttcagtatgcttagcaacaaacctgttcacatcaatcctgtcctctctgtctataatgaccccatcaatactactctactcacacgtatcttctaaaacagctgcctccgacctgttattctcatatgccttactgtcagtatgtaaattagttgaattcgtcttagacctgtcattctcactcatctattattactatgtgagttaatggaatcagtcataccttgatctcttattggttcagaatcctagaatggagctgtctgaacaacaggagattcaactccctcctatagtaggttttccaaggaacttgattgttggtaggactatactgtaagggctagggttaggtaaggtaaccacggtaggataagtagactctaagggaagcatatagttagactcttcactcacactctcccctaaagtaggctaatgagaaagaaaagacgatcttcaataaaggtgagccctagggataaatttaatttggttagaaccatggctatggacataggcagtgcattcgaacatctgaaagggaacatcagggatgaaacaagtggagagataggattctttgaggcaatctaacggtgtctggaagtgaaggacacgagaaggcatgcggttgatgagatgagcggtagtgagaatggcatcaccccaaagataggaaggaagagaagtggacaacataagggaacgtgcaactttcgaaaggtggcaatttttttgttcaacaagcccattttgttagggtgtaagcacaagaactttggtgaacaattcctttacaagataagaacttgttaagagagtcgttttgaaactcacgaccattatcactctgcaagattgcaatctttgtattgaattgcgtttctatggtgtgatagaagtcccgaaatgtggaggtagcttcggatttgtcggagatcaggaaaacccaagacaagtgtggtcatcaatgaaggtcacgaaccatcgtttcccagaggaggtagtgatcttggatggtccctaaacatcactatggacaagagtaaaaggtcgggttggcttatagggttgcgagggaaacgagacttgacgttgtttggcttgtatgcacatatcacaagataagaaaggaacatcagctttagaaaagagatgaagaaataggtatttcatatatttaaatttggaatgacctaaacagaaaagtcacaacataaattttttttcaaaagtggtaaagtaggaagataaaaggctcgtcctagaaataatgctagaggaggcatcatcatcaagcaagtaaagaccccattgtgttgggcactgccaatcatccttctcgagctcaggtcttgaaaagaaacagaatcaggtaagaatgttgctttgtagtttagttcatgaataaccttgctaatcgacagaagattctgtgaaattcgtggcacatgcaacacattgtgtaatgagaacttgtcaaaaagagaaatctgccattttccagcaatgggatccaaggagccaacaattcttatcttctcattcccagcacgtgggatgtaggacacagtgttaagaggaaccggttgaataatttgtggcaccagaattcaggatccaaggattcttaccatcaatactaatgagacttaaggactgatgtattactcgacaatagctccaagtgtggttggactaggattctcactcacataggaagaggataaagtaggcaacgaggtttccggattctcaaaatacatcggtacaagagcgttggatgtcgtccctagggtagcctcgattgctgcaatttgttgttgaagcctttccagctgttgctgagttattcccaaagaggaagcttgcacgttaggtttggaatatgccgaaaattcaccaacctcaaatgttgagtgaatttgaggattcttaacatcggtgtaataactaaggttagtgggtggcaaggcataccaatttgactgcagaagcggtgatagccagccaaaattaggtggtagaacatgaatcggcatgtgggaaacactataggttgcggatgaagacaagggtggcatagttaggttggccggcagcgtctgaacaagattggtcggcacatggactttcagcgacggtgtgtgggcggtttttggcggcatggatgacgagaaaatctgctgaacccgacgttttttgaaggcggcagagccattcgtccatagcatcattgattcaaactcgacggcagcggcgacaacgacattaaaactggcggctgtctcctttgttcgattttcatcaccagttgtgttgtttagggtttgttcaatgtctcgccttgatatcatattgaaagtagagacaaagaacgcactgatttacgcaggagaaaaatcacgatattttattcttattattttctaataaattttacaataggtacaatacaatgaaggagaataaatagaatagaaaaggaaataaaaaagaaaaagatggtggaattagggtaaatatttccatgatccttccataaatgccccacgggccaagcccactaattctaacagttatatatccttatattttgagcattaatctcttttcactatatcaatgaaaagttctaacagttatatatccttatattttgagcattaatctcttttcactatatcaatgaaaagttatattttctttgagaaaaaaccctcaaccaagcaacccctactaggcagtcccaaagaaacgaagtgatgctatgacctgttcgataccaattatagtaattgacaggcatctcaagttctcaacttaacaatagccaataggtgacttcaagtagatgagtaactaacagttctttaccatcggtaaccaataattgctctctacatcagaatgtgtaatataaagggtgtgaaaactctgcattgcttcccagtcttttgattgtagccttttcatccattcataagattatagcacaaagggaattatttcatgatttatgttaaattggaatttccagttaaattaagctataccttgtagactgagaa

SEQ ID NO: 7448 - DNA, 1442 bp, Cucumis sativus
  Intron number 5 from transcript Cucsa.321600.4 (locus Cucs a.321600) derived from phytozome v7.0 (chr-ID scaffold0308 0; pos 1408214 to 1409655)
accccggagatatttatattatagggtgagagaacatctccatccccatcctcatatttccaaattccaatagtttatatctcgtgagttactaaagtggatattttactgaatatgctttgctgctatggaaaatcttctgcatgctcatgcatatagtatcttggtttttcttaaataatccaagttacatcatgtctatttcttcaggatgaattacaaatttggtacctatggttttgaagaaaattaggatttagtccctatgtgattttaaaagttagaattttgtccttatagtttaacaaaaccctaataaatagtcccaaccatgggacctaatttgtaaatagttcctacagggagagactatttatgatggttttatcaaattatagacttaattctaactttctcctggcgacggaccaaattttccatttaaccatttctttatgttacatgagttagatatctatttagaagatgggaagagacaaccaagcaaaggaatttcaaaagtgtctcaaataattacatttatggattcttaggaatttgattttgtcttttaagaaactttgaatgtatggttactttctttaaagatccaagaacttcttgtaccaagttttgcacggtctagctcttgagagagaaaaaaaaagaggaacgaagacatgcctattctttaggatctttggttgtaaagaaatcatagaaatttcaagtgaccaagaggcaagagaaaacgcttacttttgggattcggtgtgtcaagtgttttatagcttcgttttagaattttttattcaaatatcttttataatcactctccccatattatcactgttgattggaacgtcaaggtataagctctttgatgagaagatgtcatatcttttcttcttctgtaattattttcttttaacaaaaggtctgattatgccaactactagttttacttttaggcgcatgctaccttaccttcgaaccttttgagagactaagtttcttttttcactccacccaacttcttacatcaattagatagagatttcccagatcaatttgaggaaaatctataaggttcactgaggagttagttgatggacctacttgtggatgtagaacaatgacttaatgacggataggttagtttttaagaattgcaagtaatgaaagatttggtagccaagctcaaagtttcaaggttccaaacagtgtttttgcaataaatccagcctcttgccatataatttgtattggcgttagagtttgccagctgccagaccctaggctgaacttcatcggtgttaaggccccatgtttctttcctgttatgcactattccttatcaattatgaatattccgaatttctgatgttgatgcaatcttgtcaaattggatgtttgcagtttccaagaagtagtccctttaa

SEQ ID NO: 7449 - DNA, 2336 bp, Cucumis sativus
  Intron number 7 from transcript Cucsa.312020.1 (locus Cucs a.312020) derived from phytozome v7.0 (chr-ID scaffold0299 5; pos 1515933 to 1518268)
ttgcttcaactacttgtggaagtgcacataatttagtaagttacttactatttcttcagtaactatatttgatacttctattatgattttcatatttcttgcttaactgaaatattggttcggtgtaatcctgtgagcagtatgcgcaaacacctaccaaagaaaagtatatttcattgcctcatgctttgtaggggacatggaagggggagtggggagattgattggttatttggtatcgtgtttctctttgggttttgatttcgaagaatttttgtaattattctcttgacatgattttgtatagctaggctcccttcctatagtgggggtcccctgttttttatgagcttggttttttgtatgttcatgtattgtttcattatctcttaataaaagccgtttatttcaataaaaaaaaagctcaataaaaagaaaatgcctcttgtacattttttgatattcaatgtatctggtttctctctttcaagctagttttgtttttttctttttaataaataaagattgggtttgtgaaactacagcattcacaaaaccttcaatctaccaaccaaaattcgcaaaaatcttctccaaccttgattgcaaaatagattaagatagctaatactgcgtagaaaattggaaaacaattctatctttctcctcttggatctaacgttaacttaactaaaggtgtgattagcttttctcctcctatcaatctgtccctttttttgaaacagaaacaaatctgttccttctacatagtttcgtactttgattttaatatgagtagtgtggagcctaaagcacttccagaagaaagagtgcttgaagatccttatcttttggactcaattgttgatgcttttaaggcgttttttgaaggatgatttccatgataatttgactatgacttctgaatcattattgctagttataataccttctcggttccttcaaagttttcatctttaattaaggtctctcttttactttgagtattagtcttatttcattattccaatgaagaagcttgtttccacctttttaaaaaaggggttgtggaatacaactcaaagaaattcatcatttgtcctctctcttaaagatttaaggagtcgtggtttcttgtttttgaaagatctaagcggtggaaatttaatattacttgttcaattgtgtttccttctcctgttggaaggttttagagcattaggcggaattttcttttcaagattctaggtgctgttcgtcaaaagcttcttttgtacgattgtacttgaacaggatctgttctaggttgtacaactgtgtccttaagttctcaaaagcttctttcattgaattgttcatgcttccttgaagagttttcagtttactttcctctctcttctctttcttccccatcccgctcttattagtgctcttgatgtaagaagaataggggttaattgggtaatggttttttcattttctcccagcaatatctctatgaatccacttaaccccgatttcaagtttttttgcttctttctttcactccctttaggagttcctttgctttgaacattttttgtcttttcattatatcgacgacaagctcggacctttttaaagatattttttttgaaaaggatactgatctctttattaaatagttaaataataataaagagacaaagctcaatgtatacgagggatatacaaagagcaaaaaatctaaggatcattaacgcatcgggacatctgaactaggctgacaccccctagcgtcctcattatgtccataaactacaacttactaaagcatattacatcagagtctctagcccatattcagtcaaccccataagtagagaagatacaaatttcgagcacttgaaaattaaaagaaaaagaagaagatacagaaacatgatacaaaccctttatgacacttggaaaatgaaagcctgctaattcaattgaatctcttctagagagtaatcttggaattccttggataaggaacaccatgacaaggcatttaaatgagcatactcaagacggtaattccaacttgaagacttgtcatggaatacactgatttcttccaaaccatttaatttttaagaacatttttttttatcttcctctcttgcagcttaaatatttttggtttgtatgtggaagcatttaattatattagatcatatcagtcaggcttgtaatatttataacattatgttctgttatttattcatatttagcttctgctttgatgcattttgtaacttacaaccctgtaattggcagcctgaattatctgctttgttggacacccttgaaca

SEQ ID NO: 7450 - DNA, 1850 bp, Cucumis sativus
  Intron number 4 from transcript Cucsa.032930.2 (locus Cucs a.032930) derived from phytozome v7.0 (chr-ID scaffold0042 9; pos 2185801 to 2187650)
agtaaggtacaaaactttactaattttaaattttatttgacatgattagagatttgaaatgtggaacacaaatatagattgaataatcttggattttcacagcaagggagactgcaatcatggatctcgacgtagagtcaaatagagatccatttatcatcttgattcattaacgtgacttactagtttaaagtgtgttaagtcaccagaaaagtttaaattatatatattctttaacattattgctaacttcctgtcaagagaaaccttataacatgtcacttaaaaaatcaacacgacccacactttgtgcctctttaaataaattcattcaatcagtgtaataaataaagtaattaacacaagacccaacaacaatattgattgacctagtgttatcaataatgagtgagagagaaaataatgttaccaaatattgaacaggtgacttttagtatgatattatgttacttaaattgctattggctaaattatacaaaatactcctaaactttgtatttttatataaatatgtccttgaactttgaaaagtttaaaaaatgcccttaaagtttcaaaaacagttaaaaaatacccttgtttaataaatgccattatgatcagttatgaatacaaactgataatattcgtgtcagatatcgttgaacttttaaaaggtgtattaatattcttaacattaggaaagggaatttaaaaactgcttctgctgtttgaaatgagcgttaatacaaaatactcttagttgttggaaaccattggtgtttcggttgaagctttcttgagttcgaatagaaccaagtttaaagcaatttatatagatatcatctttttatatagatacacattttgtttctcattgtccaattcttacaacaattttgtcacaatagaatataaagcataacttcaagttaaagcataaaatcctactgaactccaaaaatataaatctcctcttaaaacttaccaaaactgtaaatatccaaatacaaaaaaaaaatgtatttggctatattatcatacactcaactactgatgtataatcttgtgaaagcatataagtcctaaggttcccttggtgtttccgttattggtctttccttttgttataatctatataccttaattgaatgacacaatttttctttttaaaaaataagataaacaaaaggttaaatagttaataggacagtaggaggggcgaaaaaaaatagagaaaatggagaagttataggccatagattgaagtaggggagggaaagaaaattgaagaggtgatgaggtgtagataaacagtaagataaaagtaaacggtattaatgcaacttctgaaattttataagtatttatgcaactaggcgttactggtttctattcatatattaatagcaagggtatttttttaacttttttttataagtcaaaagggtatttttgaaagttctgaaagttcaagggtgttttttagacaatataataacggtttccatccaaactaacaggaagggtgtttttgaactcttttagaaagtttaaggatatttttggaacttttgaaagtttaggggtattttgacatggtctaaagtggaagggcattttgcaaaatttagccaattgctatcgaaacttttatatagatatccttaagaaaatgatgttacttcgatcttcaatgcatttgtgtagatcttcattgtttaattacttggggaataaaatattgttgacttagagagtatctttttgtgtaaaataatgttctctcaaaaccattgccagctttactatatttctatgagcctctttcagatatacagttggaggaa

SEQ ID NO: 7451 - DNA, 3839 bp, Cucumis sativus
  Intron number 6 from transcript Cucsa.178290.1 (locus Cucs a.178290) derived from phytozome v7.0 (chr-ID scaffold0122 7; pos 411867 to 415705)
aggtacgtttttttgggtttcagaaattacagtaaaacaaacaggtagagtctggtcaattttcttttccagcttcattattggtgtttgcctatcgttttttttaaagttttatcctgtttttttctgtttggcatgctgttactgttgtggcgctttccacagctaaacaattgcagatatctttaatatcatagaattgaattatttttgtggaatctttatcttggtggtttaagcacaaacgataggatacacaaaagtaatttaaaatcttacctcaatccaatttcgtgctttccatacgagaatgatgatgggaaacaactattcactttttcttacttttcactttctcctccaggttatatgggagagttcattgtatttttgactttaacctagatgatcaagtcagttatggagcttcccttttgtggtcataattttaagagcaagtttaattctggtcattagtttaagggtaaggctataaagaagatttatattggtcatttgtttacaaatggatattgagctttttgttcagaaatagatactaagcttttcttttaaaagataattctttgagatggaagagaattataaatgtaataaagaagttaagttttttttgaaacggagacaaacttctttattaataatagaactcagtgtataagagaattatacaacaagtgtaataaagaagcctataagagaaaatctgggaggatcaggaggcacacctggacatttcaattaagttgacacctccttagcgccaaacatcatattccaaataaacaaaacaaaaccaaactaataatatttgatgtccagctaaatgcaaaaggccgagacaaaggaaactaacaaaataaaagcagtacaaatcagagaataaatctatctcccgtgaaggccaaaacaagaagaacatgaaaatacaatgacttaagtaagaaaaaatgaagcaatccaccaagacttcgagacttcaaaactcaaaaagtggcctgctgtaagaatctttcaaaactgggaattctgcagtcaaaatcaccaactataaaactagttgagagagaaagacagtccagttgagacatgttttgaatggagtaattctcaaactccttatttaaagagcaccaagcggccaatttactctctacattaggatggactatgtctccattctattttggcatattttattttctagctttaattgggatatgttgttttggtgctaagggggtgtcaatccccctcacttattgctctctaggcttctttattatgctcattgtgtaactctcttctactttgagttattattattatttttttgaaaaggaaacaagcctctttattaataaaggaaaatgatattaatgctcaaagtacaagagaattatactaagagcaaaaaaagaaaagaaaaaacatccaaacaaactacccaaagaagatctcggccaaaactagggaaaacaaccaaaacaaacaaacgcaaagaaaagctaaaaaggcaaaatccaacagaaaaaatgaagttaaaacagaacaaaacgaagagatctaaatacaaagcataacgaaatgactctctcaaatggaaaccattcagatctagagactaacaaaaagatgcaaccgtgtgatctcaaaactatcttgccaaagtagtccaaacccaaaagaggaacaaagagatctttcaaaatatcagcatcagcaaaaggttgtactttctttacaacacctcaacacaccgtgttgaatcttcaaagacaaagtttgatgttccaattgaaaactcatatcttcaaagacaaagtttgatgttccaattgaaaactcatcccccaggcgtgtagaagtattaaaaatattcaccaaaatgtttctccgataagccactttaatagattccagcacctttttcgcccataacacgattcatgatgaacaagataatctcatagaataagcttgagaaatattagaaaagcagctgtagtttgtggcaatgaagacttccaaagatgagttgcacgaaacattaacatttttgccttttgaactaaatacttcttggcagttaccaccatgaaaagccagcaatactttaccataagaaccacaagcaaaccttttcttcaacacatacctcaaaaccgaaggtgaatgctcaaatagttgataatctggaccaggatcatgaaaaggaattgattaaagcacaccaataaaactagtgaagccttcaggattaaatcagtgaactttagctttgatcttttttttttttgtttgaaacagagaaaagccattccacccctaagtcatcccgagcaaagccattacacaaacttccaacttctctttctgctttctcttactatattggaataatattggaggtcacacaacatgagagggctaaattgataatttaagccaaaataattccacaatcattgactattgtcaataaatcctttggcagatccaagggaactttatttggagggaagccttcatcattgtacagtgcattaagatccaccccttcaatttctgagtctaatttaaggtcaaacgcgttgagagcactagctgattcttcactactaacactgagtggagaggaaatattaagttggttcttgaaagaataatcagctttgcaatgggagcctcgcagaatagaagcctttgtgttagtgatggtggatttagacaaattgaaaagctcagatgtagaatatgcatttactgatctaatgaagcattcaggggcctgaactttagagctgtatacttccagaagatccgggtttttatcagaaattgagtgcttgatgggatggatctgaagagagttcaaagggggaactttaaggtcaaatggcacatttaattccgattttagtagggcagtccaaaccttgttgaaggaggtttgcttgcggatgtaatgtttgagaatttttggagcatgagatcatttacttcctttggtacacttgaaatgattggaaattccataatctggagaaagatgagcctctgcattagcaaaatttgaaatttccgtttttgaggcaatctgaaacgttttttgcatttaaagtgttgagttgtcaccagaaatttttgggcaaaatttataattactcaatgtaaaagagagttatacatagagctattgggggtggatcagcgggctttgctgttttggacattgtttctcctttcttcaatttcagtgggttttcgatatcttcttaacagtttccagtctagttgggctctttagaagtttccctaaattgttttgtgtttgtttacattgaggttcgaggtttcttttagatatgataatggtgctatagggatgtcaatctatttgagatgttcgggtgcacctcccaatcctcaattttatgcttttcattttcctttgtactttgaacattagtctgattttattatcttaatgaagtggtttgctttttgtttaaaaaaaaaggaaaaaggaaaataaaaaattaccccttcctctggacaaccgtacaaaagataatttacttcattaaactatctccaacaccatttagcttgaagtgccaaatttctagtttccaaattgcatgttttacttaaaattagataggcttttaaacatagatatcatagaattagcaagccttcttgttattattgacttgtgcaactcatgcctctctttttgtttattttccattgcagatgacgtaagaataaattttgtattgttgtattgttttatcaggtagaggagatag

SEQ ID NO: 7452 - DNA, 834 bp, Cucumis sativus
  Intron number 1 from transcript Cucsa.142220.2 (locus Cucs a.142220) derived from phytozome v7.0 (chr-ID scaffold0107 9; pos 515469 to 516302)
accctaaaacccctcggcgcctccgccgttttcttgtaagattccctctctcttttcattctcttggacttccttatccttttacttttctgggtcatgcttaaatttctatttgggttttgtttttgcttgctgattcactcttctgtattgtgttttgagcttttttacggttttggctttctgggtttcagttgttggtgtagacttttgtattaattgattcgtttgttttgtgtcctttcatttctaggttttgatttatttaatattttctacatgggttttggattttgggtcttctgcttgtttgcatctctgtagcttgctgattcatttgtatctcgtgtttatctatttgtttgagtttctgacatgtggatttttgttgttgtttgagaattatgtgtcaaatgtcaattgtcgattcctatgttgttgaatttggttatgtcatttcgttttcggattttctctattttaatcttcctacatggattttggattttcttacttgttgtgtgtagttttagctgattttcgtttatgcttactgatttgattctgcattttcgatgattttcttacctggttttctgtgtcgtttgagaattgtgtgtcaattcctttgttgttgattttgtttgtcatttctggtttgacaatccatcaaatcctctcttaagtatactttattttcaattcatgaatttccatcacatgcattgtcggccccctgctctttttggttaaaattcttgttgtgaagttgtcacagtttgaactaattgatggtgtggtgattactttatgtaccagtttgaaagagggtaa

SEQ ID NO: 7453 - DNA, 3965 bp, Cucumis sativus
  Intron number 17 from transcript Cucsa.253700.1 (locus Cuc sa.253700) derived from phytozome v7.0 (chr-ID scaffold022 29; pos 2252324 to 2256288)
taccttcaatttcttcatcacctggagttcctgtatttttctttagggaaaaaaagcagttttcctttcatgtttatgattgatttctaacctaaattcctattttgcttttttgttgataaatttcagggacattttttatttactctctaatatctttgatgacaattctatttgtgataaagttggtcccagaaaccaaaggaagaaccttagaagaaattcaaacctccattaattcacaatgaattattgattttcttttgttacacatttttttttgtcacattaaaatgtgtcatttaattataaacatttttttacaataatatttacatgtgaagaattgaacttattgaattgataaaactatattttataaaagatttaaattttacagtgtcctattataaattaaattaattatgggaggatcaaaatcacattttataatgattatgaaaattataaaagtgatttttatccttgtcaagttcattttattatcacatttatttaattatttcagtagtgattaatccattgaatacttttaaaatatatttttattaatcaaaattatttacaaaagttaatcgagaaatatactttttgcaatagttcttcacatttgacaacttaattgattaatatttttgttagtttgaaaatactgatttgaatattcccacatgtagttgtctttgttaaaaaagaaaaaaaaagtcttcaactacaaaattgatgaaagtacttgtttgaaatgaaataaaatttgaaaatggcccaaagagagggtcgtgatgtgattaaaagcgagggtccttggagaaaataggcaaataaaaggggctccaaagaaaagaattaaaaaatttgtagtactaaaaggagctactacaagcaaaagaagggaaactattgtattactacatattcattccattggagaattaaaaattgtgaatgaactgcaacttgaatctctaaatagagttgaacattcattcattagagtcgttttttcgatcaaattaccactgaatcgattatggacggtttagtaaatgatcaaaccgatatcaatcatgaaaaagtataaaaccgaccatcgattgattggttgcttaggtcagtttaagcctttgaaattttgttgatttggattttttctaaattgacactaatcgaattcctccttatatccaatcgaccacctttcgtccaatcgattttaatagatcaaactcaattttttggtttatcatattcgtcctgttcattagtaagtctagatttttgagtaaaaaaaatttaagataatcaagaaatcaatttaacttgaaaactttcaaaactttttaatcttgatcatgctcttatacacgagaagcccttgaatcttgatcatgctcttatacatgacaatggcttctggacgatcataaataaatttaaattagcttatggagaattttacaactatttacttttactattatttcaaatggaaaaaggaaactttccttcgccgtgattgacatttgtggaacccaaattggatttgccaaaaagatgattcctttgccacgtgggtaactttttatcggtcttctcatttgtccccctcatgtttttaccttttccatttcccccctccctttttctactaataaactttttagccttttttttttcttcctttttacacaaaatagacaaattaaaaaaaacctatgacgatagtaaattgagttctcatacttaaaattatatccagagttgtaaaaattggacttatatacgatagaaattgaattctcgaacttatacaaatgtttttatttgtataaagatataaatttgaggatttaattatgatagttttatatatttgattgctcaattttcacaatttgaagtttgagagtgtagacatgattttgcaatttatcctaaaatttgtttttaatattcaaatagtgtattagaactttatggatattaaattaatgtattacaaaaaaaatacaaccaacgttaggaagaaaggaagaaaagaattacaattagaatgataaatatttggaaattacgattacaatcactattgaacacataagaaatcaaagtaacaaatgtgaactaaaaatcaacttatgtccgctaaattaaagtagcatatttgtaaactgctttgaataatcactatttatctaatatttgcttgtgtaagcattcaaatttaatatattcttttttataaacaaacaaataaattcacaaagaagggaaggcatcaaatttgtattgtagttacaaaaatgcaattttgatagtttgaaaccatttatgacaaaaaaggggaaaataatgattttttctttctttctttcttttttggggaaaaaaactctaacaataaacatatacattaaagataactaaaattactttaaaaagtaaaaaagataatttaaaattttgatccaaaattcaaaagaaagataatgtgtgtttttttttaaaattttatttgtataaatattaataaataaaaatgctttgaaaaagattaaattaacttaaaaacattgagaaagaaatgattatccaataatactaaagtgattaacataacaaattctaaaattttgaggtaggaactttaaaaaaaattataaattacagaaccaaacatttaaataaagtgcatctaaaaagaaaaactgttctcttattttaggatatagaataaggtatgaggtaatataattgtacaaattaatttagttacatatatttctttaaaaagtattatataaagttaaaatttagattctttataatatcaagagaacttaactaaaatatataatgtatttaagactatatgaatagaataaattaatatttggtggagtatttgaatttgttaaataacataagagaaaataaagttggattctaattactaacttatgagattaagaaaagaaaagttttgatatcggtagtggctaactcgagccattctccatattctctttcctcctctttctcgtaaccttttctagaactcggaatttatacttatttttattatttatttaggagtgtcagatctagacattttactgatcgaactttatagttcaataaaaataattcaaaaaatgacgtttgaaatacaagtttaattttaccatgagttaactattttaatattatatataacaaaaagttgaaattatttacgaaatataacaaagtctatcaaattctctactagcacgttaaatttttttggctatattttgtaagtagttttaattttttacaatctataagaattttttttatataaaagttataaaggtgtaggacttgatttgtagacttatactaaatttactagtatttcatagttatttagatttctttaaatttaataagatgtgttttataaaattttagaagcattaataattacaaggattagtgtaaaattaaaattaaacatttaaaagtagtaatctaatatcaattttattgaaaatagaaaaagttgagaaactaattacaatctataaaccaaaaccacactaaaatacaaaatttattacaaatattttgttttgatatttggaaataggcttttatttattttatctattctattgcgactctctctcccatcctttccgaaattcggtttctctctctttcatcacaccaattttttacggttgcagtccccgggaaaccgccattcactcaactccgcttttctccctcgctttcactgattcattccttccttacttttgattgttgtttttctgctactcaaccaaagctttcttttcgtttttgggtttcttctaatttccccttcttttgtagcttcaaacttcattcatttcagggagtgacaattcgtatgttcttctctagattttctg

SEQ ID NO: 7454 - DNA, 888 bp, Cucumis sativus
  Intron number 1 from transcript Cucsa.236660.1 (locus Cucs a.236660) derived from phytozome v7.0 (chr-ID scaffold0201 8; pos 580516 to 581403 reverse strand)
ggtctggcgctacctcaacttcttctgcaattgaggtgctttctctcttgcgcgttcttcttcttcttcatttctcatttcctttgaagtcactccttatcgtgctaaacatgcttttgtttttttatatttttatctattattactcgtgctcagttcacttgaatatggaaaaggtgacaattgaaaacgtacttttgtagtttgtaaatatttttctccattggctagtacgtctaaagcagaattcttcaattattgcgtttcggatcattgttcttttaaaaaatcgtcttcatgtttaaggttgtgtttaaaaactgatagaattgaaaggatttgctgttctctatggtgtcagtagttgtcgaggagcagagctggaaatgttcaaaacttgtggatagaatgtaaacgcacaagattctgatcattaaaacattctctcttattcaacgctttcccgaagtattttgtctgaggaaagataccaaaggaagtaactaaatcgagactcatcaaggaactagctgtgaatcagctatgtagctttgcttgtttgttaactattatgaaccaactatgttgtaggttttaataaatcatatgttgtctgtcttattaatttcatatggttaattccatcatattttgctgtgaaaactgaaactagctatggattatcttcatttaagtaatgtcataaactttgatatagcctcctttgcttttcatattttcttaatttttccgttcttaagcataagcgcatctggttctttgaacatattaattttttttcttgaatttggtcttattaaattcttctctaatacttttaaattcaatgtaggtctccaagcagtttgcagattgcatttccttacc

SEQ ID NO: 7455 - DNA, 7683 bp, Cucumis sativus
  Intron number 1 from transcript Cucsa.057970.2 (locus Cucs a.057970) derived from phytozome v7.0 (chr-ID scaffold0061 4; pos 277392 to 285074)
aataagctctgccttacttgttcatacgccttcaggttagtcgtcgtttctgaacctgtacttcttattttatgcgttttgtttttgtactttcaatcatgaatgtgtatgtgcgtctttgcatgcgacgttttcgctgtatctgttgttgttctttggttcttagaatgattttttgttccgctggttctattactactccgagagtactgtattctgtatatctgtatgctgttttgactgattttgtagttagtaggtattgttgtgtagtatagatctttggttttgaagaaaagtaaagaacaataaaggaaacgcgctgatatatatgtgtgtgtgtgcgtgtgtatatgtatatatatacactttttttttctgacggcgaatctatctttttgtgttttctttatactcgacggcatttgcttttcgtgtaatcttggcttttggaatcgttttgttctgtttagttattttcagcgtctaatgaatcgtcgtcttccttctgagcttggggatgcaatcgctcgagctaattctctatttcctcctcggatatgattggttgaatcgaaattaagttttttcccgccattttttctgagcctaataccgttcccgccttttgttcatttcttgaaaaatcattagcataacatgaggagttctattagtctggaaaatttggtaattcgggtcagacttcttcaggattatacctcacctttattcaatgaatccaaattgaatttggctttgattttgttctctcttatagaaaaagaattgaatagttgaaaatttgtttctattagtttgcttgaaaaccgggaaacaaagaagaaaaggttggagtataatggtctagaagaatcttgtttccggatgtatactgtataacgtatcgtaataaatgacgagacccgttaaaaaaagatttaaaaaaaacgggttaccgagtatcctgtttcaccactatcaaggaaatcaaataaagtaattattacattgattgagaaaaaaaacatggggatcttgagagactctgttttggaaatccccaaggaattatccgttttcgtcaagatgtgatacaactctcgaaaaatatcgttttggttagcgtgagaagacagtgtcaaaagatttattcagaaattatgtattcggccaagtgggtcagttggattgctacagaagcacaaatcccattggatcgtcataatttattttcaaaaaatttccttaacaccaggttcgtggtcataacttaaaagttcaagaaatagagaaaatatggcgttttttccggctaattagttattatactcgcgttacgtatggtttgggcaaaattttgcaacgtggggccaggggccacgttgaataattttcaaatttttggtggagaaaatattggatatgagttcctctttctctttgtaagcctccagtatttggaaattcgaggctttattttccgaatcaaaaccttccatatgttgtcaaaaggagctcgagattagactctacatgtagcccattccagcacttctttctgagggaagaaaaacgttaaaagctgcaggaaattgagaatctttcatttgtaaagtgatatttgagatctcttactgaacagtactagagactgacattttttaaagcactttctttgtaattttctttatacactagcctaactctctaggcaaggtactgtcctagtagttctgtgctcttttgggtttgactacatagctgcccagaaacggattgtcatgttttaaaaaatttcagtctggtgtgatctgaaaggccacctgccatccaccccgaagaagatttaactgcccgtccaaggaatattaccagactaaatgggtgtgaagttggccaaaggacaaaagtcagaatatcttttattttgggaccctcgcaaattcttttcatggatgacgaaattatggttccttcaaattctctcactacggtatgtatttcacgggctctcctactattagattcccatacccactgacaatagcaataattctactccacttgccttcatttaccatagaaaacaaggctgcaagccagtctgttcagtcaacttctgtctttgaagcattccttaggccaattgtcaattttagtcacgtgccatccttttgaaaaggtctaaggaaggaccatatgcttcattttcttttaaatagatattttgaagatactctgatgtttatttgcattagaagatgcgacgggtttaataccgcaattccattaatccaccgagattagtacttctttctctcaagctaaatcagaaaaagtagaatttgtttgaaatatattcttgaaatatattcttgaaatatattcttgacttttgttttattttttcatacttatttttagctagattggatttaaatattgttaaaatgtcttgacctatattaggacccaaaatgatgtgacaaggacttggattagaaataaggacacatcctcacattttattctttttctcatctttttatccaaaatatttaacaaatttttaccccataattattttaaaaacatttataagagcttagagatgatattgcaaccgtgattgaaaaggaatatgaacattttgtaaacaaagaataatgttgcaagattcaatttattcttcaatagttgtaatatagttgtaatattaccattaattttatataaaagtttttaaaattataattgaaatagaaaaatctttaaaatattggacaagacctgatatgtgtgttgtatgtcatggatttaaggcttaattgaaggaacgtactaattataatcatgcattttgggttaccgccgtgttgatttttcccaacattctaagggattatacttcaacaaaaaaattttacttaccaacctaaaaactttaagttcatgaattttggtaaattttagtaagtggaaatcaatattgagtataaagaaaatgacatcacaacaacggtttgaacacatgtcaaatcatcaaatacccataagcaagcttttgggtgataggtaaattttaattatacctcacactttaacaaaaatgttcaaacatttagcaagaattaagtgtaataatgaagattgctgtttgattttccaacctctgaacagttcccccatgtctccccatcgtcttttgtgcttcagtatcattttttataaggcatgcaactggaaatgcatggacatctgcataggttagtgtttatcatttttaaggaggaaagacattgcaatgtgctcggtttttaatttgttgcaagtattgattcgatgtcataattatttattcataacatatcagtattgaatctaaacaaagaaatagaatgtgtatgaatttaaactttttgccaaaacatgttgccagagacatgttccttgtcatcagtatcttaattagagagagatgacatataaccatcaaacttttgagaacctaaaatatttaaaatcttttcataaggagttgagttttttacttcaaaaaactgttgaatatgaagagttgtttgtcaatatatgactagccatgggtttacaattttttttattgtaatatcttgaatttgttaattgttctttggagaggatcaaggatcaccaataatgaatctttgctattaatgaacatagttcttctcaaataatcattgttctttctatgtctctgaacattgctaatacactatcagttaataatcagataaataactttgtattgattttcttctgccttgtgttctctaggtttttttttttttttttttttttccaatttcataacatattcactactaaacagtgagtggaattattatcacaacacttgggccaaatatgacagtgttataccccacatgtttttaaataaatacacttttctaaaggtgccaacagttgtttgttgcttaactaaacatgctatttaagtctaattagaggctgcacatcatttcctttcagtgttgtgttttgattttattcaaaataacttgattgactcgattcagacgaccatcttttttattcggtgcttcgaattaactgtttttgtcgaagccaaattttcaataacttttcatgcatttcatttcaaaagctcctcaactatgctgtggtctactcccatgagcaaagtgttcttttgattaaaacttcttactttgttgttgttttgcttttacttcaattgctttgaaagtgggtgaaagggcaagggtagttactttcttttctcacaaatgagaataatgttctattttattctactaatgtcactttctaactgtttaaaaatgtttatagatgtaaaaaaatatttataaatattcaaaaaattcaatacaccttgaatcgttattttcgtaattctaaaaaatttaactgaagtttttttctatgatgaggaacaataactagacttgcattattatttctaattgttttatttatatttaacttgcaattgtatattttgaaaaattaaagagagaagtataaaatgaattagaagaaacagtcctacacaggggtggactcgagtggtaacatctcactctctgtttttacgttgttgacttgtggattcctttttgaatggcactagccattctatttgcaccatgggtcattcgtcatgccatccaataaaaaatgtaagcagttttgtacatgcaacgtgggtcatgcagtttactttttgggtggcaatgtttgtgcgttgtgtttcttgaactagtacagtaacattgactgaattgattaaagcacgtttatacgcatttttgatagatttgaaaaaccatcaaaatttggtgggttttgcattgttcaaaatgttcttttaactttgttttcctgtgccgacagtgaatttattagatttaattattctggctcctaatcctatcgaattagctgcctaaagtggtataggcagtcaagattgacatgcgattatgggccgcatatcgaagaaaataggattgtttttgggaaagaaaaaaagaaggagctctctgtggacttaataacatcaaaattccgagtagcagtaacttttcaagtggttggttttgcagatgatgctaaagttttaatagttaaattttagttcaggtgttcttttgtactagggtgtacatgggtcagctgttagctggattgaaaaccaaaagaactaaataaaatcttcactaaaatgttcccgttagtaggattcaattaaaatctctaacccaacccttaacatttcgttcggttagagatttttctttaaaatttaaaataggtaactttatcctaccacattattaatatctaaaatttcattaaatttaaatataaaatatctataatatttaatacgaactttaataataaacaatcataacaatcttaaaaagaaaaatgtttaaaattcacaaatttatcgattaaacaataaaaaatagtcaaactttaaacgtatttttatatgaaatatataatatggattggactcgattgggttgagatggattgggtcaatccaaatttctttacaatcaacccataattcaatccaattaggacaaaaaaaattaactcaaatatatctatatgttacattttgggttggatagtccagatagtttgagttgtcgacttatttgaatacctctatttcatacaaacaaatattagattgtttattttaaaactattgcaaatatttacatttttagtctattgacaataaacttgatgacctagatagacacctatcaattatagtcttatataaacatatcaatataatttagttgatcatgatataatttagttgatcactaataggaagtaaaaatttattattatagtaaatactcaacaaatcatgcaatttgaaacaattttgttatatgtattttaattttaaatgaaaatgaaaattaaattaaattttactagaagttgtatctaaaatctagacaaggtccttttgagaagagcaaagtttatgataaatgaaaagtacttggcccgttcacttgagactaagattattatatactttattaatttcttcgatcttaatttgtcatgttataaatttttctcctatcaatatgtttcgtagaaatcgtaattctaaagcaacagataaagttgtagtataatttatatgtaactatcagtgtctcgtgttgcaataacctaaaaatcctcggttttgttgtggaagtctaactattttgccaatttgagtcgaattgttgagagtaacgacaataatatagtgttgttgcgccatgcatgttgcccaagtgtgtggtgatagtttcatctttgtcagtaagtgaagagttcagatgacattcgtatttcagtccttaaattttaccacgatactgtttcattcatacaccgatgacattgtttgactgttcattgacccttttcggtacggatataatagtgtaagaatctgggcgtatcatttcagttttgcattctgcacagtaaatttgatgtttttttcctttttttgctctccagattactcaaagctcaccgccttcactttcctgagaaaagttttttcttttccctgggaaaagtgcctcttttgaatacttgagattgtttggatatttatctatattggtatcagtactccttcaagtgagctaattttcaaatctttttcaagacttttgtttgtcttatattgaatattattgccaaactaaaaggaaattactttgattcggattcgtcgattattggttgaaatgaatccaaggttgactgaaagtgaaactaaacaattactgttgaacagaaaatgatagtggtcacttaaaattaaaataaattgtgttttaggtatgtagattttttatgctattatcattagagtgatctttttactttctctgcttcaacacaattcctttgccttacttgcatggctggacagctttacgtatcctataaagcttacacgaggatcatgttgtttccttgctttttctctgtgtgatagctatcggtcgtacaaattttggagattttctctttgttgtcacttattctcctctccactttctatctgacttcttgttggaaaccccgctttcaatagttgtcaatattggatcaataataggtgagaccatcgttttatgttgaaaaagtttctctctctgctcaagagtttgatctctttctcttcttttctgggattattttgtttttgtacctattgtttgatttttcgtaaaacgtgccaccatgattatctgttcacttttctattctattccttctcgcattgtttacatcataagttttcagaagaattttgatgttaaaatttagttgttggagattgcttgcaagggatgtttaaaatcttgaatactgtggtagaccccatttttcttaaaaaaaattatatgaatattctctcaatttttaattttgttgggagccgtcttaaaatcttcccacttgctagcagttgggagggctttgtcgggtggcattactacttttaaatggtaacttattgcttattaaattgtaggacgcactgtgcgattgctccaaaaggctgaattg

SEQ ID NO: 7456 - DNA, 3627 bp, Cucumis sativus
  Intron number 1 from transcript Cucsa.318910.1 (locus Cucs a.318910) derived from phytozome v7.0 (chr-ID scaffold0307 6; pos 371091 to 374717)
gagtgcttgaaaaaaggtaacttaattatgtcaagatcttaaatagtatgcagctagtctctggctgggactgtgattgtttaggcggccaaattttaagtgttatctccatttctttaaaacggttgaaacatcgaagtttcatggtccatagaggagtatggtactacatgtccatgttggttaatctcacaatgtgatttatttattatttgttctttttccaaaatgaaacaaatattttcattgaagtaattaatgcttcttcctagttctctcttgccaagtctttcactgatttcgctttcatgtctcccactgggcttcgattttgaagactttttataatcattctatgaacttgattttgtagttggagtcctttcttatagtgggattcctctttttgtgggctcggttttgtatgctcgtgttttctaatgaaagttgtgcttttcattaaaaaatggaagtctttagttgggatatgaatgcagcaagcttgccaaatattttggaaatctcgaacattagcatatagttcaggtaaatgatcagaagctataatttccccacgaagtagagttaggagtgtacctttccttcttagagcaccagtgtacctttcctgcttagagcgtcagacactttgtttactttacgttgtgtatgttcgatcacaaagtcaaatcgttggaggaaatgaatctgcctagcatggatatgactgttttcctttcgtgcttgtaagaacttcaaaggaaagtggttagtttacaacacaaattcttccccaagcagataacgctcccactgttttaaggacgtaagaggagagtagagttcttgcttgtaggttgaccatttcaatatagaagagcttaggccttgtttggtttgtggttcaaaagttattttagagaacaaagaatttagtagaaaacacaaatcttctttttcacaatatattaaaacacgtttggtttcaatttgaactcaaaattcaaaatttgtgtttgattgtgaatttggaaatgcaatagtgtatcccatgttcataatttctgaaaacaaaatttaaaaacaaaaaacgagaattttttttttttgaaaatgggctacttcaaaggtatttggaaatcgtttttaaaaataggtataccaaacgtgctttaaatttttttcttgtattttttgttttttaaaacataaaagcaaaaataaatcacgaaccaacaaaccaaacaaaggttttgctaaagaattctatggggtgtttattttgacttaaaattgcccctattcctattcgagaagcatctacaaatacgtcaaaaggtttattaaaatctgaaatcctagaactgttgttgagcttaagactcttttcaaccagaaaaactgtgtttggttttcccccatgcaaagggaactttggttttaagtcctctgtcctctgtcctcctcccccagtccacggtttccacccagcttcggcattctctaattccggcaagacaatagtttcagacagaggtgaaaagctgcaaaatccaagattcgttttacttcatatgctttgaaagaggatatttccgtattgaggatgtggattacagaaaaattctcaaagtgtccaagatccaacttgaatggtttatggaagctattacgaacctagtgaaagaaccaggatcttacagaaatgaaggacgtgaatcagcaagactaactaaatttcgaacttgttcagggtggttcgtgaggtgtgtagcacgaaagggatacagtaacttctcctttattcacattgaggtttagattctaagttccatcgcttaccaccttcattacctttccaaaagacttccatcaaacactctaaatccaagctcaacttgagaaggcataaatgcatattggaaagagatgtagttaaggggatacttgagataactgagttgcaaagagttaatcatctccttgtgagggataaaaatgtttctagcaagcttgttaattttttttcaattaccattttaccgaaaaaattactggctgaccaccaaaggggaaggccaagataaaggagatgtaaggttaccaccttacaattggtccgccttgacacttcagacaactttaagttttccacatttagaccacaaattgctaatttctccttcattaactatcagacctgatcatgcttcaaaaagagcaataatttaattaacacaacaggcattgcattattatatttacagaacagttaagtgtcatcagcaaactggaggatagaatgaattttatctcttcaaatgttgtatagtaagctccctttagtggtttctgttctcggtttatttggccttgtgttgtactttttgtctgattccaaatgattttgaatttggccttcttgtgcaactcttactttgcctttacttttttattaaccggaacttgttcttttctttcgaccttcacctaatatacatagtgtagaaggagaaacctttaactgaatatggaaaattgctattttatgagatcctcacgcttcgtgctcaattacttgttcattatttatgtttgttcccatttactaagggtgtgtttggattaacttttgaagtgtttaatttttaaattaaatcattttaagagaaattgaggtgtttggtaactatttaaaataatttttcaaaaatgagtttttgcaataaaatattttagagagaacacttggaaccaaattttaggaaaagagattatttggtgcttaaccggaaattcctctcaaattttaagcatatgctaaaatgactaaactacccttgcattaacccacctctcccatccacactccaagaaaatagttgttgactttatttaatgaattttaaatcttaaattttttaaaaacaacaatagaaatagataattttcaacaaatttcaaatcttaaatcttataatttaatgaatccctccaaaattttagaagggattactgaaatgactaaaatttatgtattatggttggagatgaaattgttttattatgattatgtatttaaatttcaagttagacgtgcttctataattctgtagtccaaaaatattttatttttaacacaagaaaattataaaattaatgtttagtttttagttcataatatttcatagacctttgtggtaatttgacattaatataaacacttaggttgaacaaaccaaacaaaaatgtgtatatgaacacttatgaaaaaatataacaaaaaattatggtgtttaaactataaacaatttttcgaaaaaatgctaaaaagaaaatgcatcttttgaaaacatattttttcatagacaatccaaacgcaccctagtttgatgattgtactggctcaagttgagttctaaactgcactattggtagttatgtattacgtaacagttaagtttctgtgggtaccttttttgcttttgttctaatatatttgttttaatgtatttgatatgcatcaattgcatgccattattttttctctgtatcttaagattatttgccattgatcttgattcacctgcagttgtacctgtggatttgaagcagactatacaggtt

SEQ ID NO: 7457 - DNA, 814 bp, Cucumis sativus
  Intron number 11 from transcript Cucsa.048530.3 (locus Cuc sa.048530) derived from phytozome v7.0 (chr-ID scaffold005 42; pos 3212091 to 3212904 reverse strand)
ggcaaactacatcaaagtcgggccctttgagaaaggtaagtctgcgatttgttgttttggaaagctaataaattttccattcaactcaacacattatcacataagtaatctgctacattacttactaaccatagctagtttttaaaggttttttatccacataactattgttctctcaatgtgttgacggatgagaaaatcttaagatgtttaatctctcaagtcaacatgtctcaagtttttttccccttatagtttatttttatttttatttttaagaaccatagctgattttaaaggtttatcgaaatttatgactgatatattcttccatggtctatctataaacctgtcgcagcttatgtacaaaacttcgaatatccttatagcaacaaaagaaaaagaaaaagaacacttgtgctaatagtagaaggtgacagtaacctttgataatataggaatgcttttaaggacatctttctaaagcagtatctacaaaactgttataagtaaaacatgtcagaagtaactattatttttaaatacaaaatgattgatcagcttgacgagtgcttgcaatgatacagcatctcaagattccactgcatgggaagaaatttgcatactagattctgttgattttcattttaatacttgctctagctcgaatatttacgttgttttattcttgaattgtggtgtgcatcttaccacaactgtttcttctcaaaaaattctctgtagcaaagcaactaattcgagcttttgttattcagcagaagctttcacccaaggacgtgaactttgttggtta

SEQ ID NO: 7458 - DNA, 1271 bp, Cucumis sativus
  Intron number 2 from transcript Cucsa.217780.1 (locus Cucs a.217780) derived from phytozome v7.0 (chr-ID scaffold0165 8; pos 26248 to 27518 reverse strand)
caattgaggttaagatctctttcttcttcctacttgtaaattaactcatgaggcatatgtttatgttcgttaatatgttataactataatgttcttaatcattttaaaatgctgagttttattctacaaaatcatatatatttttaacatgttaccgttcattccaactctttgttatgatttgacttcgattagattaaaactatcacaagtgtaagcgttaggtataatccaacatcatagaataatcatgtatttctcagcatgtaggtgtaccctcatttctttttataagctttgttttctacagtttgatttccttccaagtttttttatttaggagaacctttttgattcaaagagtaatacacctactaagacccttttagtcttgtttcttttcttctgacttcaatagtcctatactaattgtgtccttgattgacagctttgtcttgattgtaatcaatcgcttgagttttgagttttgaccaagatattgtcttcctctttctttgaaagaaacttcatcgctcacttcatgtagagtcatttctctggctcatccgtcttttttagtctcatgttttttgatgtcttctttcacacgttcagcccaaaaaaatgttgctcaaccttatacctcgtttccatttatttatttactttgaagagtatatcatgtgaatttttgctttgcatgcttccaagttacgttgctactttcagagcttgtaactatatttattttattttgtatttatattaaataaaaagtttgatctttagggggatgttttctagttttagaatggtaatcaaagaacagctttcatctaattcaagaaaactgtaacttttttaaggctacccaggagagaagtacacaatttggtttggtttggtttgatatctaactttggaacaacacggaactcgactttgtaaaatcaaaacaaattatttaagactcagagttctgtttctttcacggcttctggggtctcattgtattcaaatagttgttttatgatagaggaggttctcttccatccttcattccatgataaaagttgtatcctttgactctgcgcattatttgcaattttccaagttaattgccccgaggagatttttaatgattttgagatgttctaggaggaataggttttgtctgatgcatacatattcacttgattgcgagataaataaacatatgacctgatatacaaatacaatgtgttgatacattgtacatctgcagggagttg

SEQ ID NO: 7459 - DNA, 1786 bp, Cucumis sativus; identical to SEQ ID NO: 7390
  Intron number 7 from transcript Cucsa.212900.1 (locus Cucs a.212900) derived from phytozome v7.0 (chr-ID scaffold0154 3; pos 706962 to 708747)

SEQ ID NO: 7460 - DNA, 661 bp, Cucumis sativus
  Intron number 3 from transcript Cucsa.312290.4 (locus Cucs a.312290) derived from phytozome v7.0 (chr-ID scaffold0299 5; pos 1734207 to 1734867 reverse strand)
ttccattgcagtttgaagcttagaattttagacaggtaccatcttctactattttttttaatatatgctcatagaatttatggcgtgattctagctaaataagttgatatatctaagattttgataaccattttgtttttgttgctttgttgttttgttttgttttgttttttggaaaattaagcctatatacactcatccctaatctcacctccacatttcatgtattgttatttatctattttagaaaatctaagccaaaattagaaaacttaaaaaaatatagtttctaaaaacttgttagaatttgactcttgtagttaagaaaaggtaataagtggagagagaatagacttaattttttaaaacaaaaaacaaaactgtttccaaactaagccctaaggaattctaagaatgtgaagttccccagattacaggctgagacttcctctctataaaaagaaatttgaaatgtggaaggaaaagaaactatacgttatctgaattttacatatagctctttgttacctttagattcttgaattacatttcagttatacgattgtctaatagaaaagaaaattgcaataacaaatgacatagaatcctcatttatttgttggcagttcgatccaaatctgaattttggtggcttttaact

SEQ ID NO: 7461 - DNA, 1012 bp, Cucumis sativus
  Intron number 9 from transcript Cucsa.163730.2 (locus Cucs a.163730) derived from phytozome v7.0 (chr-ID scaffold0114 6; pos 162919 to 163930 reverse strand)
ggatttgctcgagacttacctcgtagtcctagaaggtatttctttttagaatacatataacttaatataacttcttctaatggttggatggttgtttttctttttttcctaattcgtagtgtgtgagattgggagcattgggattgatggttgaggcccttgagggtatatatttagctagtcgaggtgtatgctcaaattaaccatgatttgatgattgtttggtggtagataattcccacacgttgtattgggtgttttaagtatgagtttggaatgactttgtggagagtgaaagtgcttttgacgagttaaatgcattttcaatattttcttgccgtttggttaagttgaacaaaaggtgcttttagaaattctaggaacatctaaaattgttataaagcgcttttagagaaagtacttaggtcctgtttaatatgattttctaattgcttagaaatttttttaagtgaaaaaagaaagagaatttttagaaaactgttccaaacaaacccttaatcaatggttattttcaaattatttacaggaaaaacacttcacttaaaagcattactctcaaaactcatctacacttactttaagttccatctgacagcatagctcaaacctcttgcaatatttggtagacctatgggttcaaatgatcaattgaaaagaataaaaaaaaaatggtgtcactcagaactgatgcttactagggtgtgcaaatccgtttatggataagtagaatggggttcaataccatgattaccataaaacaaattacattggctaaccattacttctagttttcattagaaatggaacagagtcatttatatctgatgattatatgtagaaaatcatttgctgtgcagatcttaatggatgattttcttcaagtacgtgcaacattgctactgcacaactgacccacttttgaacaaaaccaatttcccatcccttttcctgttcagatatacagctgaaaattcagtgaagtttggagcat

SEQ ID NO: 7462 - DNA, 2833 bp, Cucumis sativus
  Intron number 5 from transcript Cucsa.180550.2 (locus Cucs a.180550) derived from phytozome v7.0 (chr-ID scaffold0123 6; pos 154161 to 156993 reverse strand)
cccaggtattttctttttttggacgtttggctattatacttcaatgataattgtgcaaatctgcactttcaattttcgaaataactctatagttgagggtgaatgtcttttcttttctggttggacaaagttagtagggataatgccagttgcctttaaatgggccagttgttcaatttggatagttttgactccaatatatataaatgcttgggttgttgtgcaacttataattttcacttttctaagttctctgtgatttcaaattgtccatgtgcaacatcatatgctaggaaatccaatttcactatagatggttttggttgaatggccaagaacataaataaataacaataacagtgcattttaagtttggttagagaaaaacaaaatggtattttgcaagcaatgaaaagaagaagaaagaaatagaaagagatagagttgaagctgattttgcaaccaatgaaaagaggaataagagtttttcaacacccttaattttgtaatgtgtgagtggaggaaagggtgtcagctgaatatgaggataaatagtgtaattccccatgtgggatattcattctgacgagattcatgcagtttataatgaatctcgtcagaaaaacccaacaaaaatagccacaaacagagaaacaaactctggtataacgatattgattgaaaatatgaacaagatcggaatacggcaatagaagcaaatagttcagtcttgataaacaaggaaaaacagccacaaaggaaagaaagatgaaaagaaatatatgaccagcactttcaagagtgctggtgatcctctcctccaaaagcttctctcagcttttctttacccaaaataaaacccgccctcgcagatccccaaaacattcccttttgtaacagcttctgtggtcccttaatatccctttccttaccaatgtcttctgatcttttgttttctgtgcatttcccttcttgcccctccttttgtacgtatgagtattgtgggtttaacatattacaactagagatttcaaaattgatagaatacacaaaggaaatgctagaaaagtgaactaatcttattaatacctaaactttgggaatgaataatatcataaaaagatgtaataaaggaaacatttctaaaaggttatgtacaagtattctcttctttgatactcattttataccacaatcatgtcatgaatagtggcactaggatgaattctaggacctctgatgtatcttaagtagcctcaaggagtaatcctccaagaatcaagattgttaatcttttattaaaatggtcatgtgtttcatataaaaggggaagacttctaaccagttacctgacggacctacatttccctttttaccccacgacttgtctctcaaatgagtgtatctaagggatgcctatgatggccatcagtattttaaaagggagggaggatctattgactgcagagacaggtagttgttcctctgcatcaacttctgttgtatttttcttttgtgcgtccaggggctactgtgttgtggttcttaagcagatgaaacttttttcggaactcaaacatagtcatttccttgataaaataaatttacacaataatgtggacatcccaatggtttacaaaaaagttttccaattggacaaaatattagataaactataattacaaaaggactcagtatacaccagttaagtgctaaatagatgtggatgtaagaaaagattcagtgtcctgttccttatctgttcggatacaagaattacccttcaatcttgttgaccaccaaaataaagccagagtgaaattcaactatagtatcaatctttcttgaacggatggcctttgaaactaagtggagtttatccgaacatcttgaggaaaagtgttcttccatgtgaatttttgaaagatgaaccagttttggtaaagtgacactgaaagaagaggtggctgtgcaattcccctttatttttgcacataatacagcagtttggtcagatgtttatacaagggagtgcctttggagcttgtgataaacattggacagaatctcatcttttgggatactatccttttcaaatggatagatatatctttacaggccatgtaacccatcaatgataaggattttgtgagggatttcgtagagaaaaccccattctcctctaaactccagagccaagtgtctgaagactcagggagagagagaggaccattcttcaatttcactcttggtctctgtcagatttatcctaggacgaatttccaagaggaggattaggagttccacatatcagccgcagatccattcatctttatgtgatagcttactgggaatgggaaactattgaagacgccatgattaattgttatcagtttgttcttgacatttttcctggggctggtgggttgtgttgatcaattgttgggttctgcacctccacaattatttgactcacggtgatttaaagtgatatattttgacttattactttaaatattttcaatgagttaatttgatttcataacgtttttggggatacctgtggctgccttttattatgttttcaataagatgccaaaataatatatggacaaaatgccaacaatttgtatataattattattaatatgatttcaagtgatttatttttatttatctattgaaatgatttttatgagaatttaatttcattcttttgggaatacctattgggatttgtagtttatcattgtttgacaaatttaagagcaccttctttttttacatgtcggcatcttttcttcttaaatactcacatctctatgatttcagg

SEQ ID NO: 7463 - DNA, 6482 bp, Cucumis sativus
  Intron number 6 from transcript Cucsa.159140.1 (locus Cucs a.159140) derived from phytozome v7.0 (chr-ID scaffold0114 2; pos 1179562 to 1186043)
tgatagactggtatgacatttgatctctattgtcttatgatgtactagtgttcaattgccaaacttttttgccaatatattttagcatcatgttaatagggcttagaacaaaatgttgatgaaatggttggctttcatttcaattttttatttgtttcttaatttgataaaacaatgggaacaagagtgaatttgtgtagttccttcctatcaaatattttagatgggaaaggcttgtcctcaaagatgataacacctttgagatacaagataccgattcaaaatttgacaatagcatatttatctttttttctttttgaaaaggaaacaagcctctttattaagaatgagacaaaagctcaaagtacaagagaattatataatgagcaaaaagccaaagggttgacatctcaaataggttggcaccctcttagcatcatctcctacaaacaatgaaataggtactttccaaggctaataaaaaacctattcaacagtgacaactcaaacaaagaattgaaaaagggctatccttactagtacaagaagatgaagaaaccaataaagaaacaaaaaggacaaccaatacaaggcccaaaattaagctggaaaaataaaaaggggaattgtgttgacaaaatatttaaactttgtagcaaaattgtgcagtgggtttttaccatgaagtgtagatattttgttttgtttctttatttttcttaaaaaatctgaaaataaaagctcaccaattcaagttgaacttctgaatgctgtagcagcatatgcatccttttttttaacacaacaatagcctaataaaatgcacttcaaagacttaggacctaatttttgtaaaattagggtaaacatctcgaacaaaataagtgcaaccaaatatttttggcttagtaggaaacagtgactttgttggaaagataacatgataaggaatctaacttggaagaacagacgaagacaaccaatcaataagaaaaaagtagtggaaattgcatcgacccataaatgctttggaatgtgcatttcaaagggtaatggtcttgcactttcaagaagaagtcttttcttttattcaggaacccatattgaaacggagttgcttaaggtaattgatgaatgattccatgcttatagagatacacgatctaagtgcttctaaaatgtactcacttctgaaagccataagggaaacactagatttagttcaaatttcaacatgaaaatggagatcaaaatgcaactttgaacgatttttcataaaatataaccaagtcatgcgagagtgattgtcaagaaatgtaagaaaatatcaaactctagctttggactatatgatttagctaactcaaagggagaattcgctcatttaacacctatacaaatgggtctaaaatgatgaaatttgtcactattcaataaggacaatatatgaaattggggataaatgtcagtagttgctaatttcatgcgactggatgtacgacaccatggtgtctttgctatcgaaaaagcaccaaagtaaaactttagaggtttttgacttggagtggaccttaatgcttcttgtaaatttctattggatatggtgatgtgctgcgaggtgtcaatctagttgacatgcctggtatacttttcatttcctattgtattttaagcattagtctcattccattatcttaatgaagaggcttgtttcttgttacaaaaaaaaaaaggaaaaggaaaattaataatcaaaggattgaatgtaatttcatatccacctcctctttgcaagtccaaaaagatgagctcctctgagtttctgaattaacaagattatatgtcctttaagaaatcatttttggtggaatcaaggctttttgattaaccttctcctcatgaggctgtcgaggattgttgaggactatcatacaaggaagatcaggttcttgtagccaatgagggtgttgacgactatcgtgcaaggaagaaaaaatggtggattcttgacttagaaaaagcttttgatagggtgaattggagcttcttagagtcttctatccagtttatggtattccatcctaaatgaattgagtggatcagtggttgtattaggaatcctatgttctcggtttttattgatagaagaccaagaaaattttgaagtgatccaggttctaaggtaatttttcacagcccctctcggagcccccaaaagagagtgcgagggatggcaagcattgccctactttgacaacactcaccaaccaactaatctagccccttctcggattcaccgttctgagccatctatttcagaaattaatctagaccttttggaggtttgtagctccaaaattcagacctctaatggcctcaccaggtcagtaaattcattttctcctaccaagcatttcaactattcaaaacttcccaactctaacactaagggggcgtttgggggagggaaagagttatgggggataagggttatgataatcctaggattatgataaaactagtattatgataatatgtgtttgggggaagatttattattggtagtgttttgataatatgtgtttggggaaaggattatgataggtagtgttatgatagtatgcgtttgggggaaggattatgatagtagtgttatgatatttttttaatgtatatccaataaacaaatttaatatatttattttaacaaatcataccaggaagtaatttcagccataaaaaatcattttttaagaaaaaacttcttctgggcctttaagttttcttgcgcttaaaaaagtctcctttcattcggtaactttctgttttctattttttattaatattatttttttacaattttttatagtacttagtaaagttttttttgaaacggagacaagcctctttattaataaaggaaaatgaaactaatgctcaaagtacaaaagaattatactaagagcaaaaaaaaaaaagaaaagaaaaaacatccaaacaaactgcccaaagaagatctcagccaaaacaagggaaaacgaccaaaacaaacaaacacaaagaaaaacctaaaaaagtgaaatccaacagaaaaaatgaagttaaaacaaaaccaaaacgaagagatctaaatacaaagcataacgaaatgactctctcaaaaggaaaccatttagatctagagactaggaaaaagatgcaattttggtgatctcaaagctatcttgccaaagtagtccaaacccataagaggaacagaaaaacctttcaaaatatcagtatcagcaaaaggttgtacttcgtttacggtgtgttgaatcttcaaacacaaagtttgatgttccaattgaaaactcatcccccaagcgtgtagaagtattaaaaatattcaccaaaatatttctcccataagcctctttaatagattccagcaccttttttgaccataacacgattcatgatgaacaagataatctcagataataagcttgagaaatattagaagagcagccatagtttctggcaatgaagactttcaaagatgagttgcacggaacattaacattttcgccttctgaactaaatacttcttggcagttaccaccatgaaaagccagcaatacattaccataggaaccacgagcaaacctttttttcaacacatacctcaaaattgaaggtgaatgctcaaatagttgataattcggaccaagatcatgagaaggaattgattcaagcaaaccaataaaactagtgaagccttcaggattaaagcagtgaactttagcttcaatcttttttttttcttttttgaaacagagaaaagccattccacccctgagtcatcctgagcaaagccattacacaaacttccgacttctctttctgctttctcttactatattggaataatattggatgtcaaacaacatgggagggctgaattgataatttaagccaaaataattcctcaataattgactattgtcaataaatcctttggcagatccaagggaagttttatttggagggaagccttcatcattaaacagacgttaagatccaccccttcaatttctgagtctaatttaagttcaaatgcgctgagagcaccggctatttcttcactactaaccctgaatggagaggaaatatcaagttggttcttgaaagaataatcagctttgcagggggagccttgcagaatagaagccattttgttagtgatggtggatttagaaaaattgaaaagctcagatgtggaatctgcatttactgacctaatgaagcattcaggggcctgaacattagagctgtatacttccagaagatccgggtttttatcagaaatggagtgcttgatgggatggatccgaagagagtccaaagagggaattttaaggtcacatgccccatttaattctgattttagtagggcagtcaaaacattgttgaaggaggtttgctcgcggatgtaatgtttgggaatttttggagtgtgagatgatttacttcctttggcacacttgaaatgattggaaatttcataatctggagaaagatgggcccctacactagcaaaatttgaattctccgttcatcaaaatttgaattttctgctggaaaagatataatctgtcacatggtggtcgcttaactctctgcaattcagtgctggtaaacctcacaacttattatatgtctatctttcaaatgccaagcttggtggtagcagaattagagagaattatgtgcaattttttctgggaaggacagcaaggcagcaaaataaatcacttggtaaactggaaaatctgttcacaagctttagggaatggaggttttgggttaggaaacctcaggaactcagctcttctatttaaatggaattggagattcttgaaggaaccatgctttttggtgtaaaatagtgagaagcattcatgtatccgactcatctcaatggcacacttatggaaaatccggtttaagtctttgcagcccctagatttgtatttcgaaaaaatgcagctctttaaccgccttctatcttttaagctacgtgatggccaaagaatcacattctggaaggatccttggtgcttatcccaaccattcagccttgcttttcccaattctttctgaattgctgccaatccctcgaccaaagtgagtgcattctgggattcttcaacttcttggagccctgcattctgacctgcactaatagatgaggaaaatttcagcttcttctcggtggattacaagccaaagcaattttctgtacctcagacttgagggtatggtctttagatacttcaggaactttcttggttaaatctttaacgtaagttcttaaatgcctcttcacctcttgacaaccacatttatcaagcactgtggaaagcaaagagtccaaagagagtaaacattctgatctggatgatgcttactgctaccttaaactgtgctgtaactcttcaacgaaaacttcaagctcatgctctctctcctttagtttgtccactttgccatgctgcagggtaggatttgcaacatttatttttcgattgctcctactcgagtgaatatcggtggaggctgttctcatatttttagatttcttgggtgttttagctcttgctttaaagataatattctctgtatttttagtggccctaccccatccaaaaaatcaaatattttatggtctaacacagtcaaacctttgctatcggaattatggtttgaaaggaaccagagagtcgtccacgataaacctcttgcgtggtcagactgtttctcctcaacacagctcatagttttttcatggtcatctctatctctgccctacgcagattattctattcaaaacatttgcctaacctggagtgcttttatatcttcactataatgttgttccactgatacattgttgattgttttgcttcataacttcattgtactagttctttttttttcattggtgtttcttctgtttgatgaaagtgtacataagcttcttcttcgtatcccttgtactatcaataagcttcttcttcgtacccctcgagatgcagcaaggataccactttgtggtctgttgctaggcctttttataatcatgatattggtttgattttgttggatttggactctagtttttcagcttgttttctctatgcctttgttatttttcattttatctatgaaagcttagcttcttaaaaattagataattgtttactatcgtcgataaaaaggaatattaaagaagcaggagagagagattagactgctcttggtaactttactgctcttgtatgatgctaagtggagagtgacattttgttttttacatgtaaaactttaatgtggttgactttgttaaaaaaaaactaatgtgtttgaataatcaggaactttgggatttgaaacttaccacgaatttttctttgtttgttaaattttaattataggta

SEQ ID NO: 7464 - DNA, 2381 bp, Cucumis sativus
  Intron number 2 from transcript Cucsa.373380.2 (locus Cucs a.373380) derived from phytozome v7.0 (chr-ID scaffold0372 6; pos 216709 to 219089)
tcgcgagagtaacattgagcctgcggttgtaaagggtttgtttctgcttgctaccttgtttactatttcttttgagttgaacaatatatgaagtagaccacttggtcaagaatagatttaccagttgagctacattattgcttatttttacattactccttcagttatcttgaaatggactagaacagaagttatagaacaccttcttatggactcaattacaatttttaacttaggaaggtgtttggtccaaagagtcgggtgaataggagttgaggggagtgaattgtcaactcctctccttgtttggccctaggagtttgtgggtaccattagtaaaataacacatagaatttgtaccttgttactctttagaatgtgggctttagaagttcacaactttccaaactccataacttcttcgagttcacaattccactacttggatcaaatcacgccccattaagtatttcttccttccgagtgtcataattattcctcttctagtatttatcccaatcgttgatgggtggacgttcgccaagacatgtaatcatatttcattacgaagctttttatcattttaagaaagaatgccatccttgtttgtcttttcccgaatctacgtgatatatgactgagttccagtggctgatcagacaacgcatcttaaaacccagcctgatggtgctcaggattttgacagtcttgtagctccattcttgcccttgtcgttattttggaagaatctcctttctggttcttgaactagctcagagatggcatcaatgaaccaactcaactggggtctcttgcttgaagaatttctttctaaatctacgtcttcaattacaaaaaagttcattttcgtgccacagtaaaagaactcgactactttacagctctctatttccatgtcagaattgggtctggttgaaaggcttgcttagaagattcactgaaaaagaagctcagaaggatggtggaagggcggggaggtgaggagaggagaggagagaaataagggagagagaacctacctttggaccaagaaaaacttcttacccccttctttcaaggggtgttgcaacatttctgttatgttttgctctcagagtgggaactaaactggtgagggagaaagtagtcttactcttctctactttttttcactacatgctcctttgtggaagaatggaagctatataatggtgtcccattttggatgaggatttaagaaagtctagaggcccttttcatattggaacttggaagagaataggaagttgatttttagttttgagggtaataaagtttgtgcacttttacaactttgctttgatatttgtgtaggaaaattcagcaatttgataaagtagagttggataatgtgtgtagtgtgttttatgagtggtctttttatttaagaatgtgagcttcgattgagaaatactgttcatgcaaatgcttacagaaaaatatttaacaaagggtgtttaagggaactatagaaagcgaccccaataaaaaagaatgaccgctaactaataatcacaaggttatcctaaatagttgaatacaaaaggatgataaaggacaatatataatacacttatactaatatcagcagagtagcagggatattgttagattggttgaatgcctctttgtgtgtgtctttctcttggattttatggtcttgttctttcaaattggagtttgtttgtaaggtagtgtttggacatctcctgtagggttgagtttttctccccgctttttcaaataattaaaaacatgcggttatgtaaaagttcactttcaaagagaaaagttagtcaagaagatgtcttattttcccttgggggattttggtgttacattttgtgtactagtgcttttgaggatattctcaagacatcgctgtcctgagtgacattgtttagtgcatcttcaagactagggaatttttgggtgttcacattcttgtttccctatgcaacattttccatgaaatgaattagcaaagttattgaagggatgagcctgggataagttctttgtgtctctttgataatgtattcaaggagttatttaattattctgttttattatcccttccttttatttatttttacgtttctttttttgagttagcttcttgtgtatgtagctccttgttttaagtctctttaataatttattttcatattgcccttttgttctcaatttttgcttgcttgtaaagtatttctgccctatctcttcattattttctttccctagatttttccctatcatataacttattaacttgcatcctgctatgtaaggcttaactgtagtcaatgcagattctgatcagttcggtgtggagggagaag

SEQ ID NO: 7465 - DNA, 3408 bp, Cucumis sativus
  Intron number 1 from transcript Cucsa.086810.1 (locus Cucs a.086810) derived from phytozome v7.0 (chr-ID scaffold0087 3; pos 172311 to 175718)
cgccggtaaaaccttcggcctcggtgattttctaagtaagttattctaattcccctgttttctctaattaatcatgcttcgcaatgactctttgctctctctgttaattcctgttttgatttcgtaaactctctctctctggatatttcgaattctctgtttttgatttttgattcatcttttcacgaacttgaaaattcggatcgcggtttttctaagaactcgtaaatttcacgtgattcgattttgtgaatcctctcgttcaagtttagcatctatgtttttggttttgaattaaaacttttattgcttatcgttttctcgaaaatgtgtggtccttgtgcaatttttcttgttgtttcaatcgatctctttacttctttttcgtgtgtttttctttttattgtatcgatataattcttacctaattaattaatttttgttagttttcctctctctctctatatatattgtttttacctttagaaaaaacctctaaatataacttttgtgtttttttcatcataaactatgataaattttagcataacagaaaaaatatcaaactatttaccaatatagtaaaaaaaaaattgattggtagacacaaatattcttgtttataataaatttatattcatattcatcaacttttattaaaaataatcattctataaactacttttctaatagacttctattcacatttattgtaacagtaattaataattaatgactaaaaaattatttatagtaaataactaaaaaatttatatagtttgatcaataatgttcttaattttaaagtacatttctttaaaaaaattaatttcatagtgattgagattataataacaaaaactcaaccaatattttaaacaaatcacaatggaacaaatttgactttggtacgtcactttttaacctaacgtgtgaaatttggcggttttaaatcattgatttgaataatttccactcatgcaattacattgttataatcaaataacaataataacgcgatgatgatttctattattagcattaattctatactttataatgtttgcgtcatatccacacaaccaattttaacatcataataactaataactttattgagtaacttttctttgaaggttgaattttgtatatttaatattctaaatataaatgtagtaagtaaaaaaaaaaagtacatggtttattttctgaaaatggagtttcgattttagttggttttggatagtaaatggttgaaaagagaaagttcaataatacaaagagaaaccctattttgtttttaaatttttttatatatattatcgaagtcaaaaattaaagaaataaataaatagatagcaccaaccgtacgtaccccatgttgtttttttttcttggagaatgattttgacagctaaactaacatgacggtgcctatttccatattgattttattcaaattatagatttaatcatccaactttatagttcaatgttattttctttttaattaaaagcttagaactttcattaaacatcgcattcgaacttgtatcttaatttcatactaatttcaaaactttaaacatatcataaatattaggagtaaacatttgttgattatagtcgatttttttatcaaatcacacatcgaaccaactaaactatggtcgatttgatatacgtttaaattaatctagaataaaaaattagtttgttagtttacttccttaatgaacttttttgatttaaaatttttcgactattaatattgaaatttttaaaaattaataaaataaaataaaatatctacatgttatattataatatagaacgacaaaaatccatagatttttatcacatagtctatcaatattgaatattaaaatttgctatatgcttaacttttttttctgtcaaatttgatatatttttttttcacaattcttcactaatattttaaaacaaataaaatgatttcaattagtggactaaaactgtaattggactttactttttgtttctaaattacatatacaatttcaaagtttttaaagatatcgtaaatagttttaatatcaatttaaatgtttagaggtctattaatatttgaaaagaaattgactacaattagtggactaaatttttaatttgactttatctttttttaaaaaaaataaattttttgtttaattttactttttgtttttctaatgtttgcaccatgcacgcaactgtggtattcttaagctagcttgtaccacgtgttgggatacaattggttgttaaagagaaatgtcggcaatgcacatgcatgtgattgcgtgtcatccatgtgccgctttgttgtaaagctctaaacttcgaatgccgtaaaaacttattttgatttttttttagtacgaaagttcatcccttaattttctttgaagtacaaacatttagtgaatttttaaatcttacaaataattgtttggttaaattgcaaattttgtctcgtagagatctaggtaggttggaatcaataaaaaaaaaagtatttttcaaaaactcatttttatttaaatgttcttgttcaaccgcttaaaatacactatttttctaaaatatgacattttttaaaaaataaaacacttgaggatgaattccattaaaaaaaaaaagaaccttttatcaaattaaaaaaaaagaaccttttatcaaattaaaaaaactaagttataatttaaaacaattttattacaattatagagaccccgtttaattttatagcttttgtttttattagtgtttgatatcaaattttatgtctactaaaaagaaggtgttgtgaatttgaaatatgaagaatatatttgataactagttagttttttcagaaataagctagtaattcatcaacattacttccctctctagtcttagttcaaaacaaaaacaaaaaatatagagatactattgaaaacaaagtaagtttttgaaaactaaaaaaaagtctattttataaaaatactattattaaaacaaattataagaaaatatatagaactaggaaaaacaaacacacatacacagagaaaaaatcacgtagttataatccaatagagttgaaagtaattcattgattgtatcaaatttcatgtctattgcgtggagagagaaaatcgtgaagttgagaaaattaaaagctttatttcataacccataatcatttagtttttatttttttagttatctaataatcatatgcttattttattctttagaaagtagtaatgcttaatcttaatcttcttcttcttttggataaactgattatttgagggttgaaaacaaaatttacaaaaacgttatgatattcgttattttgcagttttcaacacggacaacaaccactcggttgtgcaa

SEQ ID NO: 7466 - DNA, 3543 bp, Cucumis sativus
  Intron number 3 from transcript Cucsa.250110.1 (locus Cucs a.250110) derived from phytozome v7.0 (chr-ID scaffold0221 9; pos 214251 to 217793 reverse strand)
cctgtcaccaccttctttgttgccctcttacttaggtatacacacacctttcctaattacatcatcaaaataattctttaaattattcccttcaatatattttttttttttgcatttttttttttttgttatttggtaataacacatgtgttgttcaaacagaggataatgtttgaattggtgtgttgtaatttagatttaatttataattaaaaaagttaaaagttgttattttagtatagttattactagttaatatatatatataataagaaaaaatgtaaagtcttttataatgttaactttgtgtctatacaaagaaggtaatttaatttatctaaaaggcaaagaatttatacctttttttcgtactttattattaattaactttttatttctcacaatattaacttttaagaaaagagaaagattctatgataattccttaaagtcaaagttcaatgaaacagatataaaaagataattgttaaaatgtattttggtatacataagagctaactaatgaaaataattgttttttaattcatttggctataaaaaattcaaaatatttaaaaatgtaataagcttagatgactcattatagtatgactaattaatttgttttaatttttaatttctgaaaattattaagcttgattaataataattttgtttggttttgtagtctatccttgatacacattttgaatattgaaaacaattaagagctttttttagcaataattaattacatagccttttattttctttttttcttttcaaaataaatggtttgtgtgtgttgtttttcactttctttctcctcataaaacaattttatgacaatgaaaagaaatttttcgaagactacaattgaaagtcattttcatatgtgacctttaactttgaaaactacatttttgcataaataaactacaaaaatttataattttaatcactacttttgtgacgatcatttccaatatgaatgtaagaagtgggaagtaattaaatgagaaacatattataatgggaaaattgtcaagttgaagaaggaaatgtatattctttatagtggaaaaaccctaattttagatgagaagatcagccaaagatggtgtcaatgaaaaatagcaaaaatgtattttggaaatgattgatgggatggattcttggggtgctaagggggaaaaagggcaacaaaataacaactgaaaaagaagagaatagaagaaaaacaacattgtgaggataataaagtagtggccaattttgcctgtgtatactgtccatttattagttcagtagcaaataaaaattattaaacctgagagaattagaattaggaggggatgaattcaatttatagtaatcacttatcgaaaaaatttttaataactataagattaaagttaaagctaagctgagattccaatatcacaaaagcaaacctaatatagacaaatatgtgtatttggacaatcaattttggtgaattaaatattttttttatggaagggctaggttcaacattttttaatttatcaatgtgtgtgtctatatataaaaaaccctctgatctactttttcaaagtctatataataatcatttttctctattatatcaaatcatatacatgaaatggttgctttaacattattttttcccatcataatattttaaaattttggattattaattaaaagaattttaagaaaacattggataacagaagaaaaaggttataaatgaaaaggctatgaattaaattcttaaaaaccaaaataaaaaataaaaacattgtcaagtaatccttcatgtttgagatttggcaaggattaggttgctaaaattaagtgtattatataaaacaaactttaatccttttgataaaaaataaaaaataaaaactcaaacaagtaaaaaatatatcaaaccaaacaaaggtgttatataaataatcgataaattttagttaaattgaaaatttgatcccttacctccaaataaagttagaatttaatgttgataaatttttctaaagattatttacgagatttcatcgaactaaaaaccctaaattaacttctaattttaaaaatataaccctaacttctactttctactttcttcttgctatagaaatatgtttgtcatttaaccataaattttatcttttatgtttacccactagagaacgaaaagaaagttaccattaacgttttagtggaaaatcaagtcattaacttttaagatagtagttctaacctctcagttgaagatatcgaagaaccatgttaaaaaaattgatacatctcataatcttttataaagatgtatctaagttactttcattgtcatatataaattcgtttataaatgaaatctccaactattgaacagatcatacgtattttttagtagttggattatgtttgcagtggacttcaaattgcaatacttgaaattgattgatgtaatatagtatgtggtaatcattaaaacgtacaggtgaaaaggcattcgtttattgagtcatttcattgctgaaatttatagaacatgaattaaagttggttagtatagtgaaataaatagaatagaataaagaaaagaaaaaaaacaaaacaaaagttgattaagttgtggattggattacacacattatacacatttaatggtccattatgctttagtaaacagagatttaaagttcttgttgtcaataatgtaatcattctataaagctgatctctctctctatttagtggagtccatagtattttgtcttcttctcaacttttcttctgttttctaatttgttaaaattttctctctaatagaattttatatcacacttaattaatatgttatcttatgtcacccatttctaaatttaggttcaatccatgtaggtactttgagtgtaatactcatattttcataaattaaactttaatatagaagtatagaaatgtagaataaaagggttttggaagcaagaaagtgctaaattacaagtttagtttatgaacttaaatttaaacttacgtatactttttcattttaggtataatatgtccttgaactttagtataataggtttataacatattcaacaatttcttaacattgtaattataacgcatctattatcagcttatcactatgaattagaaaacatttattttgtctcttttcactattgtttgcttttgctatgagttgttgtctcaagctctcctcatataaattgactctttttggaatgatatatattgcactacaattctgagatataacgagaggggtattggtgcacctatacagatcccatgttgctaatatcttagaacactatgcttttaagtttgtgtagaaataagttagtgattttgttcttaaaagaaaggttgaagatagatcgaagacctatgttgaaagtccgtaacttagaggcgatttagatataattactatttaaatgttgaaaggctaaactaatttttgtactttttatatgtgttgatatttatagg

SEQ ID NO: 7467 - DNA, 3199 bp, Cucumis sativus
  Intron number 1 from transcript Cucsa.268960.1 (locus Cucs a.268960) derived from phytozome v7.0 (chr-ID scaffold0244 4; pos 112935 to 116133 reverse strand)
tcttcaggccggtggagctccgtcatctcctccgggtatgtagccctaattcggatattttgacctgatcttcgtcccgattagagatgtccacggggaaatattcttttttttttaacttaaatctcatctttgaacgtttataaattttgaaggttgtttatcaattttcttatttaaaatcattaaaacctcacattcattgggtgaaaataaaaatttcaaaatttatctataaaacttaaaattttataaaaacaataaaaaaatcaatattttaacaaaacctttaattccatcttaaacacaaccatatatttttttctcaaaagtttacaagtaaagaaaataaggaaataaaaatatcaaaatatgttttttttactattttatatattgttaaataaataaatattatatttatttttagtttatataatatatatttaattaattatatttttaatcgggacagagtcaagaaaatgtatttccggtccttggtctcgtgttgccgacgggtaaaaaaaaaaaatttcactccctttcctgtctcatctgaagctggtttctgctggttaaataaacctctctagtcctgatcttccgtagattatggttcgtttaacttttcaacttccattgaataaatacttgatcagtccaaaaatttaaaattaaaaataaaaaataaaagaaaatttgttgaacttttaaaatgaacaaatacatatagatagatatataattttttttggtgaggatgttgttctaaaataggagaattgatatttttgaaattggtcttctaagattcttaattgatctttaccttgttatattttaggcatgggtctaccaataatggtagttgatagttaatgattttttaagttttaatgtatataatagtttcttcaaatatacatatatacagtaataaataatatatcatattcattcatttatttatttatttttattgaactactcctgggtttgatagttggtttaaaatgaaatactgaatagaatgaattagtgagaatcaccatctatttctatatcttaaagttcatcaaatttggttttcatttcttattagtgaacctattatgtcttcatttattattattttcatattactttccgttgatttttattttgattataaattattctatttctagcggagtaaaagaagcctggtgcttatgctcctccatgtcttgttgattagagaattttttttaaaaaattcatatattagtattaattattttaaaataaattattaattactctattactaacattttcaaatatagcaaaaaaaaattaaaatatttataaatatagaataatatcaatatctatcaattataaacactagaggatgcttggagtagatgaatgaaatagtgaacagtaaaaagttaccaaattttggtaattgtgtccttttggtctcaatcatgccgttaataagatatagaaataatattttttaataataagaaccaccaacctcttttgggccaagtaaggagtggtgctcaaaactcttactttccaactcctttgtcgaacatacctcgatagactacgtcactcatcactacaacttataatgtttttgtaaatattttcaacaattttgttattttaaaacaattacattttacaactagatgtaaaggtatacttatgtagtaaatctgtttaacttgcattggttggagtatctgtccaatacttcacaagtgttgagtaatttcatccaccaacttccactgtgttcactattcgaatttaaatatgtattaaatagtttaatctttctttcttcctttaatttctttttctttttctccctccaatgtttcaacaacactagcctacataaatatcaatattttaaaaaataacttcaaaaaattcattaaaaaattcaaaattacaaatttggagtctgtaaaaatgtgaattttgattcatattataatccacaattcgtcccaaatcaaattccaattctaaagagtctatcttgcaactctgtgccaaatctaaacaaaattttggttagattctattatttatcttgaattaattcatcttcccaattttatgttaaatttttttaaaataatgtaaaatccaaattcaagcaatataaaattaatctcaaattaagaaaaattgttagatcaaataagattaaggtgcaaaaacaatgtatgaaatttgaaattaaatttaacatgaagttaattaaattaatctcaaattaccatgaaataaaactattaaacacttgagctaattatttcaattttgtattaataaaagctttcaacagccaatctttttttttagtatataatgggactgagttcgttgtttgagttagtggttagagattatcaatgaagttagttgggagatgtgtgttagtggtgatgtgcagttggtaattggagattgttgtgggagctagacgccaaatgttcatcactaggagttgggtgtcagaaagtggttcttgtagtttatcttctaaggtggtcttcattgaatttggttgtgagagtggttggtggaggtgttgtgcgagttaatcaccagaccatgttataggcaatgactagagttggcattagacaataaaaatgtcgaccatgattgtctctagagttggctgttgacagctgaagtcatccaaaatttgaagggaggaagaattgataaattgtagcaaaacagggattataaaaacttttatcctcatttcttaacaatacacgctccaaatggcaactgagctattatagtcctatgaaccaagtctaaattggcccaaacgcacttgactaactatccatcatgtgacttaaagtcattcttcctaactcttaggccagctcatggtggttcggttggtgtacgatgttgcaaacctcaagacggtttaattttgtttaggctctttatttcatatcatctttctatcaataagattttctgctctgttacgtttgacatttcagccattcatttctctcaatttcttcttcccttcacttttgttactttatcataccattttctccttataatgcttatataagtttcatctgacaagttctgatcttgtgccttaggtgagaatcgatctaataaaacaagcctgatagta

SEQ ID NO: 7468 - DNA, 1323 bp, Cucumis sativus
  Intron number 10 from transcript Cucsa.041810.1 (locus Cuc sa.041810) derived from phytozome v7.0 (chr-ID scaffold005 40; pos 359494 to 360816)
aggtgtgtttctattttttcttccatttgctcacttttttatgatcaacgtccaaggacacggtagctttatttacccatggttctaaaatgaaggtcatacttaattttaactaatttcaattgaagattgaagaacttggatgcacttgggttgtttataagtctttacagaccattctgtaatttgatagaaattctctaaagggtgagggctatatagggaggcagaatccatctgtaagcctttggaaatgtaagtttaacagcactcacaagagacgatcatgggagatgagccaagtttagcctcattgacctttctcttgaataggcttctaaaaggctgagtatttagagatgccattcaaggggaaccttatctacttgattggccagcattcaatagtacaattgatgtggttgtcaccttctagaatcatagaaccatcacaattacctcccaaaaatcttggtcttttatttagttatttattttcgatttttattcatttgatttaattatttatttatttatattgaggttgactgtaaaacgagaggctgcttttttaagttcaactaggtaaagaggctgccaagagatgatcaagtgttcactcatcttccttttcatgagaaatcaatgttattgtggcatgttggagtgtgcactgttgaatgtttcggaggtccttaagtgaggtgtgatcttgtattgagattcaatgttttcctttgggctttgggggaaagaaacattagatttttttttatccgctaggttttattttggtagattggagattctttttctaggttgcctccctttctatggattcttctttggtaggtctgtgtattctttcattttcccttaaccaaagtttggttaccaataaatataaagaataaataaaaccagaggacagcacaaaatactttcacgacctataaaaaaatcacaagcttcgtttgagaagacgtgggcaaagaatggagacctgcagggggatctatctagtatggaacccaagtttatccttgtaaagcccaagattttgtaactcctggttagcatccaagtagctcgaatcaactttatcaaatacatgaatggtggttgttgaatttttgttcttacagaacattattttaaaaatacttctcaaacaagtagtaggacttttttggtagcttgtactgttgcttcaaattggatgacttcctggtgtttatcgacaccttataactgactggattgtgtgatttgtctcgggtattgctagacttttaagtggcaagagtaccttagctggcagag

SEQ ID NO: 7469 - DNA, 1981 bp, Cucumis sativus
  Intron number 2 from transcript Cucsa.363900.1 (locus Cucs a.363900) derived from phytozome v7.0 (chr-ID scaffold0361 1; pos 1482469 to 1484449)
gcttcagttttggtaattgttttcttcatctcttccgtatatatatatttttttctgtttatacgttccttgagtttatcatatctatttcttttagatgtagagagtaggggttacgtactggaattatatatggttgcttaagattatagtgacattctcttattctcaagtttggcctatgatctggtattctctgtttccattactggtcttatcatctcctgttttaagaaggttcctaccatctttagtaacttctgtttgttttctgctgctgtccatatgattccttaagaaataataacactctcaagtttcatcctttgtctaaatttgtacactttcttgtccttcttaaggcacacttctaattcatatcttcagttcttcctaattatggaatagaaaacgtaactgtaatttgtactgaatatacatggctataatcataataaataataaaataattataaataataatgattagggggtgggagggggtagaaatgagaaactaatatgtatgtgtataaatgtccctattacaaaattattagattatttagatatgtcctcctgaacaacaaccaaggttatgaatagaatgatctccaggtggctcgactgtaaaataggttggttgcaaaatatgagggagggaggctcaaaattaaaagatatagctgatttttattgcataaaataactggatatatgtttttggagttttctgaaactttacattttacctaaataaagacatctcactatattatatcttttctaggttagctttagctcatttactttttcaaccaaaagtatgtgattgaaaattggtagagaactatgtcgtgtggtatggatcaaacatcaggcagaatgcgcttgcacactaatcatgaagagaggttaattgatgcattgaacgactgagagttttaccgagtataaaacatcttagtgatattgttaggaaacatataactccctaagtgatctcattattaatcttgttgatgttgtgaactgcttcctgtttgaaaaaggaggggaaactaataaagaaaaaacagtgttgctttgtaattctgggaatgttgtatgtatataactgctttactgctttgagcactttttgtattaaagttcaatggcaaattgttggagtaggtaaagcttaaaatttattggtaaattgccattttgttattgacggtttacaaatatagcaaaattttattgtacgccaataagagacagcaatagaaattgatagactactatcatctatcattggcacactgtcggatcatttatagacttgaaaatatttcttacaattttttctatttaaaacaattataatctcttttggtattaggacttttggttcctttagtttaatgttaaaagtttagtcacttaattttcaataaatcttaaaattagttccaacaatttgttttcgttgatttgtttcgaacaaaatttagtctctactagcactccgttcataaattgtgaaaacatattcatgtagtgtcttctctggtatgaaaataatgtcattatttaaccaattttgatcaaaattaaccttgagggtctaaaattaaagttgattgaaagtacgaaggctaaagtaactttactgaaagtataaaactaaaacttgaaagtaatggactgaaatttaaccaaatttattattataaaaatttggtgaaaagtctctatccgactgctctagtttggtattgaaacaagaaaaagtagctatgggtctgaaccactaagtttgaagtgcgattgtgtagtttgataactggtggaggaaaattgtaggtcgtaatagtgatcattacatttgatttatgtattcagaataggctgctcgttggtcatttgtttctaattatgtatacatcaataccttgcagccacaactttaacaggtttgcattttgcgacgacc

SEQ ID NO: 7470 - DNA, 4551 bp, Cucumis sativus
  Intron number 2 from transcript Cucsa.174800.1 (locus Cucs a.174800) derived from phytozome v7.0 (chr-ID scaffold0122 1; pos 549917 to 554467)
ttaagggtctcctgttgtccaggttcatccattcattcatgttccgttgcatcagcttatgaattatgctttttggccctctttatcatgctaagtaacgctggtaatgaaatattgtttatcaaatgcagtatatctttattgaaagaaataagaaacctgtaaggctgcaatcatattaacgaagctctactacaaaaaataggacaatatatgagttcttccgagctgcaataaagcatacaaaaaaagtggttcaattggcagttataaaatgcaagtgagaagtcttcttcttgatagtattctagctttttattgaaaaaactaaaagaaaaaccagcccataaaagcatccctaaagaaaggggctttaagcaaacaaaagaagacttatggaagaaatgttttttctccaaagtaggaaggcttactttgataagattggtgcttagtggtattgccgtgtatttttgtccctctttaaggtgcttagctcggtttcaagtgcttggaaaagtgtttgagagactttctttgggaaggaggggaggaagggaaggattctcacttgttcagttaggaggcgttgggacgctctattaactaagtagggttgaaaattggcaacctaaggattagaaatagagccttgttggctgagcggttttggcgttttgccctcgagcccgaatctttgttgcatcggattattgcgcataaacatggtaaccatccttttgatttggtggagaaaggggttaaaggcacacactggattctgtggagagacatttctcttgagctgccctctttttctccttttgttgtgtattgtggaggatggtagggacacttatttttgggtgtgagacaattccctttcttctacattaccgcatcattatcatttgtcttccttaaagaactgtctgatctcgaatttttgagttggtttaagagttgtgtctttttctttcgagtttcgtcgtcatttaatccatagggagacaatgaaggttgctaccctcctttctcttttgaaggagtccacgtataggttggggaggagggatgttcgtatttggagttcaaaccttcgtgatagcgtttcttgtaaagcctatttcagattgttgtcgaatcccaccccatttaaggagtctattttttatgtggtttggaggattaagattcctaagaaagttagactttacgtggcaagtcttgctgggtcagctgaacaccttagaaaggctcgttaggagaaggaccttgcgtgcagggcctttgacagaaagcggaggaggcctttgattgtcttccatggggttgtcagtattgctcaagtggtgtggagttttactttgcaggagttcaaggtttggctagccgaccattgtgacgttcgtgttgtgattgtggaattcctcctccatccacctttcggagacaaatgtcagtttctgtggtttgtgagggtgtgtgatgtgttacgggatatttggggggagatgaataatagagattttagagcgagggatagggacccttgtatgtttggtccttagttagatttcatgtgcccttttgggcttcggttttgaaacttttttataactattcactcgtaacattttacttacttggaacctcttcgtttagttggggtgttttgggaggattgtttttttatgccctcgtattctttcattttttctcaatgaaagttgttttcataaaaaaaaaaaacttaatgagtagttacaaaaaacaattgtcagtaatgtccaaacaacactgggaaccctttccacttctctaaaaattctatttttcttctctccctataagatcccacgacaacaaggcacatattccgacttgacactaagaacctttccttctcccgaaacagtaaatggaaaatgaactcaatcatctcagagtagcttcgtgtcaagatacaagattactgaaagtcaagcaccttgaaaaaaaggaaggaaaaagaaaaagaataagaaacttccctatagactgtgcgaagccccgactctaaaaattcgatacaattctttttttatcctttgataaagaagttaacaaagagcctaccaaagaagaaaactttttcaaaagttgatctagagtaataaatctaaaaagttgatctagagtaataaatctttcgcgaataacttagtagaagaacttaacctcatttgggatttcaccttccatagtgcaggaaaaagaaaatttctagagagggtagggtctagcaagtatgaaagaaagagctacaagtgaaacccgcacaagagaaagctcaaaatatatcttaatggtcaaataacaataattcaaaaggatcaaagagtgcacctagacatttgaactaggctacgaccttacttgaactggatctgttctacaggttgtacatctttgtctttgagttctaaagacatctgaactaggctcacaaccccttagcactctcatcatttccaacaaaatggaacaagctactttacaaggttttgatttggattcgaggatgaatcctttaaaagaaggaaaggatgatataaaccatatgggcgtcaaattactaattaatttttttaataattttgattagttttaatattttccaaatttatcctttttatgacaagtaaggttaattttgtcattttactatgtttgcattagagttttattggaaaactatttaaatttttgtctttagatttttcaaaagttaagttttatggtgaattgaatttagcctttgagcttttctttcaaggttagcttagagagcttcttgaattttgcaattcatgtatgccacaacattcaagatcgatcatcctattgtgtggagtgttcaaatcttgggcaagggaacttgttctttgtctcaagatatttgatcttaaagcaatccgtgtctaacccaatccttagggttgaaattgagctaatttgagggttatagtgattcagaattagtttctttcattcatttgtattaaaaaatttattaacttccatggattagattgaattctgctcaccttatagcgtcaccctggtgcacactttctaagctctttgtagattattcaattcaaaatatttgctgaattggattgcatttattgtctctctgtcatattttcatatatgttagttatctttggctttatgtattaggttttcttacttatgtttcttgtactttgagcattagtctcttttcattatttcaatgaagagatttgtttccttttcaaaagctaaataagatatattgtgtgtctagtcatcaaaccattgcaagtgaataaggctctattagaattttggcttctaaagacaatgattgcttgacatttatttgaattcaaaatcaacttgaacggaaaattaaattaaaaaataatctaatcaatgcttcagtttgggatcccatagttataaaagtagaaattataaaactttaacaaactgtatatcttcggaagaagaaaacataaaattaaatgtgaagcagttcaaagcagaatttaagaaccaagctattttccacggcccttcaaacaaattctgtcgtttgcctaagttctgtttttaccttaaatgaacatctagaaaaggaaaagtattggcatgcttagtaagagacctgactgttgggatcaggacatgtacatacaaccaccatgactatgcaggtataagtatggtggaacccaaacttgcctcctcccggtgctcactcctctttaataacttgggatgtgcatctcttttatacacatagttatgtgtacatctctctcatatatacagaatccattgagcgtgcatctctttcatatacacaaaacccactgagatgcagtttatgcaatgattaaagatggagccatttgggttttatctcaagtttgatatgtgaaatgtgaaagaaaatggaaaaaatgaagaaggtggctagttatagaggataaataaatgaaacaaatttacctttattgcttcggaagaaagaggttcttgtggctctaggcgaaaattgtaagggattttaagaaaatcatctaaataccttggagctgttagatttacaaggcacttattagaagatactgcattctagtctggaaacattttttattaagattctgtgattgctcacattaagatacacattacttgaatgtagtcgcttttacattgttaatgctagcttgtaatagtggtgtgagtaattatatactctgttatgctgtacatatgggcaacaaatgatgaaaataaattactaattaaaaataaaatggatagggttttgtttctaataatgcaactaaaaaaattataatacctttcgggaatttgtacattgtactagtgaaaaactggaaagtaggtgaatttgaagaatttgtttgcatttccccaacttttttcttatgaaaggagatcagctcctaaattttccttatctgaaaagaatgtattgttgcagtg

SEQ ID NO: 7471 - DNA, 560 bp, Cucumis sativus
  Intron number 1 from transcript Cucsa.234140.1 (locus Cucs a.234140) derived from phytozome v7.0 (chr-ID scaffold0199 9; pos 109232 to 109791 reverse strand)
tgttaactgctgtaagctctcttttttggttttttcttcatctgggtccactttcttttcagttttttccatatgggtttgttgaatttgttgatgaggatgttgaatttttcaaatttatcttctttttccttccttggaatctgtgatgggtttaagtcttgtgtttcaatgtgaagacgtagacttctgtggatggatattaggctgactaaggaattgttgaagaaaaatcgcctttgacctcttaattcttccccctcccccaatctgactttttccactgttaccggccatattctacatgagttttgtttaaacaggaaacagaaccggtttcagattttcccaattgaaattaactgtatgctttacctatttctcatggctctctcgttttgattggcaaaatccatattcatctgtctatgttttttatttgatgttcttattcttattggttgtttttgtagggtgtatgattctgtgattttaaacatcagaacagctgaagaaactgaattcattgagtttaaattgattttgttccttgtattcag

SEQ ID NO: 7472 - DNA, 3677 bp, Cucumis sativus
  Intron number 1 from transcript Cucsa.005320.1 (locus Cucs a.005320) derived from phytozome v7.0 (chr-ID scaffold0005 5; pos 423504 to 427180 reverse strand)
ttggtcagtttttcactcccaatctcctttttaccgcttttcaacttcatactatctttctctactttccccttcaaaacgcttcttcttattaattattcctattattattattatttcctctccctaatttttctatccattatatggattttagatttatgatttttagtttagcactgcttttttctagtcttcgtactaatctaatatgcatatcacatgcggagcggaggctaggttagtcaccgtacatggttgattttggggtttacttcgtttttatgattcatagataggtcaaatttcaattctgattagcgttgtggccgttttttagcatccttgccattatatttgttcaccttgtttgtcttatattcttggctgttaatttgatggatatagttcttagtggaggtttagtttgacaaggctgcatttgatcgcgctttatcagatatctgtgttttgaaggtgtaaaacctccttaaaggcctaattgagacatttgtctaagcacaagtcatatgttcatatacccagactaaaacgaaaatattctattgaggagtagctgtaaatgttttgtgcaaactgttaagtgattgctgtataaattattgggtataaaattgctacacatagagatgaaagaaaagggggggaaatgatgggtattctaatatcgacaaaataacaaaggaaatggagcttaaacgaagacagatcatagagaaggaagtcaatacctgcataacttctttgacattcacttttgttgtcttcacttgatggaaatgttattctccttccaaaaactgtagtttatacactcctttagccttcttggttgaccatgctaacatgttaaatcggtttgcgacgaagtttccttcgcttgctgggtctttttgttgtactatttgttgctaggcggaggaaattttggactatattcgtttacgcttgttcatcacagagatgctagtgcgattatcaaggagttccttctcaatatgccttttggggagaatggttgttttttatggatggtgtgggtgtgtgtgatctttggagtcttgtggggcgagtagaaatgtagaatagtaatttgtttaggggtgtggaaaagggccctcggagatttggtcccaatgggctttggtttcacaatcttttttgtaactattttgtatggttggagtccgttcttgtaaagagagctccctttttgtaggcttgttctttcatatgcctatgtattctttcattttttttctcaataaaagttgtttccatctcccaaaacaaacaaaaaaaagcactcctttagccagtttaattggttcctgtcattccaattagcttggcttggggtttggttaccccaccaaccaacccaccccattttatatcatcaacctatgaaattgtttcttacgttcttttaggggaaaaaatgtgaattttattgtagtattctctcattctttttcatagaaaatttggttacagttggaatgtttgccataagatttgcattttctttgtttaagtaaagatttatgtgattaattggtgtagttgtcaaaaggataacacgcacctagatgttttttagatctttggcttgtaagcctttgttgaacaccaacttttgatgaaatcttataagtttggtgatgataaatattgtagaatgttgttggattaggagcaagttatcatttggaatgttgtttctgaagaaattttatgatggggatacctattaagatttgacacacattagaatccattgtttcaagttttgagtggtctctggttgagtagaatccttaaagatacaattggtagttttgaacttattttcattgagtggtgtcttgtgaaaagcactttgaaaccatggagttaacccccagctttgggtagtatgttggtgttcttcgcgtaccatcaattgaccatctgtgaacttgtcattttgtatttagccaacacaaattagaatctcctaattatttgttcatgttttcctacactgaaacaacattgagagactgcattgaacgtgtataagtagaagtgttgaactttgtccttggcacaaggaagccttgatcctttaatgtcttgtgattggtgggctccttgcctatcttccctcttgtgtacagtatttctcatataaataaaaggttttctttcctagtaaaagggaaaagatggaagagcatgaaaaaggttcataggatctggcttgtaaatatctatatagtttgccttggggtcaagaaccccacagtagttgaacaagatttaggactagtcagactttattttctgagtattgtttagtaggtccgacaaagggaactttctccctcactcaagtttcatccgacaccatcatctccatccctctggagatgaagaactttgtaaatcccaaatttcaagattttgagacattgattttttttttttcattaccttttgctagtggatgtgtacaagtaaatctagggacgatacgtctatataaggttagtgcaaatatggagatcagctctttgtttgatcatacggcttgaaaaacttaaagtgtacctcgtaggataagcatgctgttgggatataatatgggttagatatgtactttttgcattttggtccctagactttgaaacttgttcaattactttcaaatatccaattctagtctttctaatttttttttattattatctatgaatctttccactataaagtttagaaaaattttatgtttattttctcgcatgaaaattatcattattatttaaccaaattcgataaaattgaactttgaaggattaaattaagatttgtggaaagtatagagattaacattggacatttgaaagtacaaggactaaaattaaaccaatcctaaaatatatgggtcaaaatggtattttaaccaccttttcttttctttttttttttctttttttaatttccttgttagtcaagaatactaaattctgtagattatgatttttttcttcccacctttatgtataatcatcccttggcagggaaattagttttataaaatttttaattttgtttagttggaagctttttgtatcttttctttcttaaccatcttgagttggcctcttggtaaatagaagtaattgagcttgataaaggactaagatgtgatgtgttaaatccatagtgactacctacctagggtttaatatcatatgagtttccttgacactcaaatgttgtagggttaagttggttgtttcgtgagattagactatgtgcatataagttgcatggacactcacggtcatggatatttagcaaaataaaaatctcttatttcttgtaatattttttttctatgtcaatgtgttatttgttttccataaaaaaaaggaaagatgattgttcaagtgaaaataatcaacagatatgttcctcggtttctagtagagtttgtttccctttgaagaaatgtattgttcaccgtcttctattgaatgatgtgctaggtagttgatatgttgaattatctctcatgtgcaatgcacttgtattgtttgctcattatcattaatcaatgtatcactggtgcagaccgtggatactattctgtggagactgttacactt

SEQ ID NO: 7473 - DNA, 1873 bp, Cucumis sativus
  Intron number 4 from transcript Cucsa.100920.2 (locus Cucs a.100920) derived from phytozome v7.0 (chr-ID scaffold0092 7; pos 200303 to 202175 reverse strand)
catttcaggtgcagttagctgctttatcttttcaatgatttcttgatttgactatgatgaatgaatgcttaaatttttcttatatctgtcatgaggtgaatgattatccttatagaaacttgatatcttctgaacaaaagaagacatgcatttcagcagtgttaaatacatttgcattctgattcttggaatttaaatgaattgattttatctttagtctaataataccttcttttattgtgcttatagtttcaatttctagtgtcctacatggctattattgctcatacattcttcatcatcatttgtcttcaaaggataattattctctctggatttgaatttgaatgatctgcagaatttgttgaaatgacataccggtatattgtcttctgcttctttatgaaaacaatttgcatgcccccttctcactttttctttgttcattagaaaatgttaatatttttcatgctagaatgaaaaaagaggaatgaaggtcaagagcttaaatttaaggcgaggatttaaaagttacatcaaaatagactgcagctctaaagtagtaaaccttgaacctcagtgagtttacttagtggtcattgtagctagcgagaaagcagagaggctttaaaggaatggcttccactactggtggctacctagctaagatttaaaacccttcggcttttctttcttgcttgattttcataagtgttcagttaaggtgcaccaagttggctttgacacttcatctttacttttcttgaatccttgtcattttccaatgtcttgcaattgttccctaatctagtcgtttggaagtttaagtgaaatacacatgtgtgcagaccctggctcctaggggaaggacaaaaattggtaaatttatccatccttacttttcttgaatccttgtcattttccaatgcctagcaattgttccctaatctcgtcgtttggaagtttaagtcaaatgcacatgagtgcagactctggctcctaggggaaggacaaaagttggtaaattcattttggtcaaggagtgtttggttcttatatgttcatattttggtaatttatgtcctacatggagttgtagttttatattcagcattattatcatcatgatcttttatcttggagtaagtttggtcctatatgtaattacagcttgtttactttcattactcagtcgaagtacattttataattacacttgatggcaggacctatcactttcttcttcttttttctttcttgctttccttttttttctttggtggagtacatgatgccatgcactccatatattttagttcactgtcgtaagaacaaagccttgcattattaagcagaaagcctattttctatttctttgaaatggaaggtttacgtggtggtgtgaaaacccatttatcattctcaatgaaatctgaaagccagtgatgatctttttagaactgaactatttgaagcaatgagatggtgatcctattaatttaagctctgttttgttgttgttgcgctgtcttttcgtaagaactatatatatatatatatatcttcctttaaattgagaatactgagggcgcaaggcattgcgacaacagtctgttttggagcattgctgaagtctcccttttgtgggcttgttttttgtttgtacttgtattcattcctttttctcaatggaagtagtcattaaaaaaaaagttcgttttggaaatttgttatgatcttttgcattctaagcgtgtcctcgaatttcaatctgttattaatggggtttacttttgagggatatcttctaaccattgaacacatgttgtggcttacaggcttctgctggcgctccaatacatacagatcaagt

SEQ ID NO: 7474 - DNA, 2712 bp, Cucumis sativus
  Intron number 1 from transcript Cucsa.195200.2 (locus Cucs a.195200) derived from phytozome v7.0 (chr-ID scaffold0134 9; pos 151647 to 154358)
caaaggtacatatgttttaatttcaatattctatttcttttaacttttaaaattatatctttatatttgttgcatgaattagggttactacttagagttcttttcgtttacgttattttcgttttgtataatatccaatatgagcaacatcttcaaagattaagtatgtactaatttgtctctacatctcacctcaagtaatgcaatactctcggtatgtgaactctcatgtattttattttatatattctaaactttaattcttagataccattgtagttgattattctttatccatgtatactgatatcttaagacactacgtgttgtgatgcatgcaacttcttttttttgtatcagtaagaatttatttagtccttgaatattatttgtctatttaattcatttgctttaattttgtaaccaaaattttagtgcttctttaaattccataacagtttagttctattgttaaaacatagattagaatagattaaactaaagtactttcatactaaattactttaataatcaaaacctcctttgataatcaatttgttgtttttttttttgtttttaaaaattaagcttatgaacgatttttctccttcacgaatttttcaatatgttgttatttagattctactgatgtttaaaaatccaaccatgttctcaatagttataaaaagaaatataatggttctttcaaaaactagattttatttttagaatttaaaattgatgaaaaccataattgaaaatttgggaggaaacaaccatatatttcaaaaagcaaaaactaattaaaatgaacatttatatatcaaactggaattaattataaattatactgttacatatttgaaatatatatgaaataaattagtattcactaaggcctcacttcataactaattttagttttcataaattctacatattttttcgcacttgattttcgaaaacactcttcataggtagatgacaaaaacaaataaaacaataggcagaaagagtgggttacaaaattaactttttaaaaactatcactttgttttattattattttgttttttaagttagatttgttttctctcaatttcttctaatcacttacatcattttattagaaattacagtattttattagaaattacagtgagagtcttcaaagcactttttttttaaattttgatttaattttttaaatcatgaattatatatataaaaaaaagatgaaatctaagaaattcagaagtagaaggagtacttagatacttaatttttttaaaaaaaaaaacaaattgaggttaatgcttgttcattagtaattgtctatttgtatatttttacgtttattttctcctttacataaacaagcattagtagaaagtgaaaaacaaaacggaagagaaaaatttataaattgaaataatgtttataactttactttaaaaaaaaaaccaaaagtagattaattattaaacgagacttttattatcacaaaattttcccctacactttatttagatatgtgaagctgcaaattttaatgaaatgaaggaataagaaaatatgttgaaataggaaattcccttctgttcaaaggaataaagaataaaattattatctcaactctaatattctattaataattcatcaactccacatttcattttcacaacatgtcaatattcagtgcattttctttcgtcttaaagttgagatgagattttttaaaacccttacaaatcattctgaataaacactaagtttatcaattttgtcaatcactctgatgtgaagaaggtgtgaaggtgttttttgctatcataaaaaaattctgaaacaaagaaaagttattttctaccatgccttctttcatgtcatcactttcttagcatcaaattttcacaaccaaagaattggtttgttctgaagtacatcctaatttgaaccacttatttcaattgctcctttaatcaaatccctgcaaacaagattttactttctctctttgtattacgaacaaacctctcttgagatttgaaccatccctttcattcaaaaacatgaaagaaatttttaggaattttttacaaataaataaataaaaccacaagagcaacaggggaattttcttacttttcaacccagttgtcctaaaataagtgtaaaaatattcctttggttaagaacattttaagttgttactagagccacaggttactgagggaggtcagattttatcccaagattccaaagcttttgattgtaagtttgtaactaataataatgagaccattttattccaaagctcgtacagcaaaatcagtatataaagcacatacctttccatgagcaatgcacaaattgccttttcatctcaatatctctccaatcctttgcatagtattcaccttaatggacatgtttgttcttcgtcaccatggcgtgtagattccttaaagttgataaaaaaaaaaaaaaactgcagcaatatattgttgtattcaccatcaccatgtgagcaggagagagagcttccatgcgtttcatcaattcctttgttttgtgttttgcatgtttttctgtagttgtaactgaagttttgcttcataatcactcagtctgcagatttcaaatattgcttctctgtgcacttaaagagacacagacagagtggctagctgattgctatataaaaaagat

SEQ ID NO: 7475 - DNA, 710 bp, Cucumis sativus
  Intron number 3 from transcript Cucsa.321000.2 (locus Cucs a.321000) derived from phytozome v7.0 (chr-ID scaffold0308 0; pos 846979 to 847688)
tagcaaaagaagcccacgttttgctcgtaagttgacacagatagttaccatcaatctctcttggaatttggcgtttcttttgtaattgattgttttttcttttgaatagtttattcattctgtgatctcatttcaaaactttttgatttcttgaagttggaaagctgaattttttataaaggcttgtagttaagggtttaattaataataagtactacgaagtctgtatatctgctaattcctgaggatttgttggcttgtagtggtgctgttgtccttttccttttttggtataggtcacccatgattttttttttttaactgcctgctcattttttatatctgtcgtgaacaaagaattggcatgcttctatttctatgcagaactttttcaaggaacttctcgttttaggcacttcttccaaatttcaaaccaagtggactctattaagaatttagactccttaatgcatgacatggttgtttagttgttaataattagttaagttactttgcatttaacgaacggttcttggctgtcagtattttggtgcactgcttagctgctaaaattggtacttttgaaacttctcagtctatgcttacattattcattctgtttatatttctagaatcttatgtaagcattaactccccccctccatattctgtgatttgaaattcagctgctgttagtgagaggtcatcaa

SEQ ID NO: 7476 - DNA, 2620 bp, Cucumis sativus
  Intron number 6 from transcript Cucsa.005300.1 (locus Cucs a.005300) derived from phytozome v7.0 (chr-ID scaffold0005 5; pos 382515 to 385134)
atcttgctgctagacattttgatccacaaactcaggtatacaattgattttccaacgcttgttatccttacccttgactgaaggtcaatgtgattttgttaagtgtagcattgattcttcttcctgtctttcacttttgtaaattttaattctgtttggtccttttatttttcatgctcacaacacacgttcttcattaaattctgctagaagataaatgatttacttgtagttatatggtcattaacctccttatttgcatcacattatgcgttctattgccttcagagtgtaagctttagaatttccctgcatttgcaagaaagatcatcgttgttactgttattaatcttaaattcattttacggaaatcttaattttagacttgcaatcaccatattatctttccttctcatacaaaacagttgtatgattaaaatcagacaataaataacagttgtaaaacatataacttttcccacacaataaattccattactttctccgttgagaaattttttagatgggaatttccattctcttgttgagtttgtatcttgtagcattagtctcttttagtctcttcatttattcaatgaaaagtttcatgtttattaaaaggggttgtcaatgacaaaagagagactacgagttaatgggttattggtataagattaaaaaagactttattatttgtttcctcttttataagaaacccaacttccattatcataagagagaagtacgaaatgaggagatgagttatccctgcacacttagattacaataatgaggtccaattggtgtagatctgaattgggctacaactacaaaaaaaaaaaagaagaaaaaggaaaaaaaaaagaaaaaagaggaaaaccgagtagaagaaaaaagcacaaccaaatcccaaaagacacccgaagcagattctgtattttttccacctctaaccaaagtctccgttggagggcaaaaccctcattgaaccaaagtattttcaactgagctttggagtgaggggcttcaatgagttaagggagggcgtctgaagctttgttaggtcaactccactaactattgaacaaactaaacaacctgtcccaacaacaatagaagatacacatcaactattcctcctctttttacaaagaacacaccaattgggagaaatggtggagtttcgaagaattctttggactcgcagcaagtattcaacctctcaaaagagaaacgcacaagaattccaaaacttccagctccacaataagattagggtggaaagatttgactaaaaagagccatgattttcaagcagccacactttcaaatcttccccactattaggtctagcaagaattccaaagcttctggcttcacaataagcttagggtggaaagatttgccttaaaaaagccatcattttcaagccacacttttaaatcttccccacgaataggtctagactcgtgtagtttttttttgagagcggccgactcttcaacctcaaaattagtgaatctaaatttctgatcccaatcaagctgagaatcttacggacattgactaaccatggagtctttgtcaaatgcaattctaaacagtccagggaactccatgaaatccatcaaccatttgttcttccaaaagcgtgttctatctccttgactgtttttaattttgaaccattcctcaaagagaataatttttttcatgatttggaaccaagggtctttaagcaaacgagaaccacttgtaaaaagccaccaaaatttctcattccatctgtacttagaagcaatgacctctctccataacacatctccaactctatttagctgagaaagttcggtttttagttgcaacatcttttatcccaaacctcctgaattgctggaggaaaagtggttttctcgttaacaggattaccaacacctttccaaaaattctctaatcaatttctccagtgtattaagaactcagaatcaaatgaccacataagctttggaaaataagatcggactagattttggaatgaacctaaattttttctgaaacaacttcaaactcgagcccattctgaccaaaataagcacatagatggattgaaaataataaatatcaagaaatagcaaatgacagtgtccggagaagattcttgttgtttatatgccctcacatggcagtgtgtgggataggaggtggtgacttccctccacatttggggccacacacagctgctatgctggttgaattctgcggttgtgcacttgtggtacttggtgggctggcttctttttcgcttgcttggtaacaaaaaattagcaccctaagatagttttcccgtccccaaattgttcacagaatcctaattgccttaggaattgataccatcttaatgtgagacaaaatataggaaaactcaattttatacacctttatatagtctatgaccctacattacttttaagtaaaacgacaataaaggactgtttacttacatatacatatactataattacatgcttatgttctcttcatatttaaaacgtgtttatgtctgtggttttcagatgctgaccgtccggtattgtattgattcaggtaggagcatcacggg

SEQ ID NO: 7477 - DNA, 880 bp, Cucumis sativus
  Intron number 1 from transcript Cucsa.135230.1 (locus Cucs a.135230) derived from phytozome v7.0 (chr-ID scaffold0104 4; pos 102415 to 103294 reverse strand)
tgagcttccgtttgctttactctatattgcttctggtaatgggtttttcaagttcctttgcttcctgtccttgctaaactacttagctttatcttgttcggttttactgtaaaggagtaactcgatctcagtgcttgattggtgggtctagaattcagatgtatgttttgtagtttgcgtttttttgaaacggaggttggggaaatacacgtgggttttgattttattcggaatcagattagtaattaaagaggatgaatgtagtatgctgggaaaagcacgagtactctttggtgtatactggaggtgctatgttaaacagaatcaacctttggttggactcaattgattgtgaactgaagactctctttcctaaattcttaaatatttgaccatttacataagttgaagtttcaatatttggaaagatgaaatatctcattacttgttggttttgagatgaaattttatgtttatcttatttattattaaaaaccatgaaaaccaaatgtgatttcaatcaaaagaataaaaaatgaaatccaacccataaatgttaaactcaaaaggggaccattttgagaagacgaagaaactctcccattatctactagatttgagatggaactctatgtttacctaataggcactcaacattagtttaaatttaattgttttttcacatttcccaccatgatttaattaaatttcatggtgcttataaaacttcaaacacaaacttaagcttagtgccgtttgggatagggtgggggtaattgcaataaacaaatttacttgaacttcattgccactttaaggttgagctgttcatcccttccatgtaggaaatcacgatcaaggtcagaaggtagccgctgca

SEQ ID NO: 7478 - DNA, 3267 bp, Cucumis sativus
  Intron number 2 from transcript Cucsa.237930.1 (locus Cucs a.237930) derived from phytozome v7.0 (chr-ID scaffold0202 3; pos 622708 to 625974)
atcaagatattaaagacgtaagtaaattctcttgttctcactacttttagttcatgtttgattttacgaatagtaattgaagtagaacttggagtagtagtgcggcggccggacgacgagattgttgtgaagctcgtcgccggccagcggtggtggtgctgtcgattatatgcgagtgaaaacgtgtgaatagttttggccgttagtcgaaccgctaagctctcttgctctcatcgcagatggcatgaggcagagaaaacgcccagcctgctaattcattcggttaaattagaaatttagtttataaaatttacaattagtccccataatttcaaatattacaatatagtccttaaaacgtaacaagattttataaactatctttaagaatcaataaaattctcactaattaaattttaattttctttgaaacgaaatttataacttattatcattaaaaagccattaactatttatcgttttctagaaagaaaaaaaaaagaagtcattactcagttaattaaacactttcgtttttgtctttttaattaggaaatgaaatagagacagccaccagccagctggttcatgtaaactaaacttttattaacattttgattaaggattccattatattaaccaatattccattatattaaccaatccaaatccagattgtaagacttaaatcagttaaatgttaattgtccaagtgataacttcattctctttactaaatttttcataattttgaagattttttcttaagaaataccataaattaaaagacattgaatcataaaaaattaaatccttcctacatttaacaagcaaacaataccattcacgaggttgaagtttaatttctactaatgacaaaaatgtatgaagatcacatatcggattttgatcgaaaactttcatattaaattgtaacatattcttggtatttaatatttttcttggacaaatatcttttttttaaaaaaaaatagtttaatttttataaaaagaattttactagaaaagaactttattgaacaattcgttcgacggaagcgacacaggaaggattgcgtccaagctctttctaggaaataattcaaaagattttgttgtccagaaaagactgaagcatgaagtttaaaaaagaaagataatttgagttgggcataaacataattcaaaagactaataaccaaaattgtgttagatttatgtttaaaggaaaagagaaagtacatataagtgataagttgtggtaatgtaatgtaaaagtggaggtcgcttgaatgcgatttttatcccgaagtagattggtacggtggaaccacagcggcagccaagaacgtgtccccctctctttggtgaaaataccttcctttagctgctgtaatttttttgtgccacaccctacgttgcggataaaaagctttctatgtaattttttacaaaataaaatacattttactccaacacattttcataaataaataaattaaaatatttgcattagggtagctaaactaccctacctatattaatatatatatatatatatagttaaacattgtagaaagttaaatgatcgtatgaaaagttaccacatcctataaaaagtaaagcatatttgaaggtaaaaagttaaacgatcatataagagggtaaatatatatatagtctaacaacccaatccaacccatattttagaaaaattaatcttattattcggaatgccaaatcaatcattccgaaaatatgggtttgggtcgagagtgtctcccaactcaatccattcacacctctaatttacctaacatacttcttatgcatcaaataataggtattataggtagatttaaagttttctctctttttttctttttaaattttaacttagataaatttaatatctaattaagattaaaacattcctttagaagaatatagagtatattaaaatgaaaattaagaatgtaataaatcattatgtgtgtaatgtgtataatggtagagtgtggatggaatatcttttggtattatattattttgaagtaggagtcaaaattaggatattaggggagttggggagtgttgaaagtccacaaagtaatagtgtttagtgtgctgaatagaaggcgacaagttcacagttctcacgtgtgcactcaaattgtattctatgggttttattattattattcttttgatgatgaagggaaaataataataataatacaaaagccattctatttctaattccctattgattgggcacaggaattcctcctgctctgcccatgtggcccaatctgatatggacatctcttgtttattcaactctattttctttcttttccctttccattcctacattattcaatataatagtgtcccacctttttattcctctccctgctcatctgcttcaaatctgttgatgtgatttttccaaccttgggtttgtttgtattaatttgaagtgtaaattattttaatttaaataaaatagagagataaagtagaaaattgtgtacactaatttaaaaaaataatactaatttgattacttataatatagtgggagtttcatatatggagttagttatggattccacccaacgctagcccaaataagtcttctagtttttccctatctcacttctctctaatctctacctaccaatccggctcggggaaacgcttcggaagcttttgaggcatagaaaggaagaaaaagagggaagatttttttttactagatatggcaaaatgaaaagaaaattgttgacaaccacatttcctcactttatggtgattgattgaagttgagctgttgaaagagagagagagagagaattgggtttttctttttctatttttttaatgtataaaatcgatgcatttttagatagagacacgtgtgttgtaagcaataggggagtaaaaaatttccgatgtcttggtacacacccgtgtaacctcctccctaatctccatctatagaccttacataattagacattttctagacctttaaacaattattaatttatgtgttgacttcataatcaattaatgtgatcactaacagtagtgtgaaaaataggggatttattcttatcacgacacagtaaacaatttcactcagcagtggagatgaaagatagaatcatattctaatgaaatgttagcttaattatcattaagctaaacttattttaattatgatttttaatgtgtagggagtgccagatttttctgaat

SEQ ID NO: 7479 - DNA, 3497 bp, Cucumis sativus
  Intron number 5 from transcript Cucsa.185590.1 (locus Cucs a.185590) derived from phytozome v7.0 (chr-ID scaffold0127 4; pos 1085766 to 1089262 reverse strand)
ttggtgaatcttgcactgaacttgatcagtgaagggtaagttcatcactctatttgttccacctgtccatttgatttattaatgttaaaagggaattaacatgcaatacatttgcacgtgcaagatagagatcatgcaatttattgcttctctgcaattattttgtccttgcaactgcttcaggaatctttctggattgtctagtctatttagtaagcatgctcttgccattgtgaaaagtaggtcaatgatgtaacttaaaaaattagatttgggatatatgggtgcaaagaacctcagtggaatgacagatttcctgacttttggcgttgattgtgacataaaagaggataatggtgatcttctttccttgatcaaaatggtgtgttacttgtgtcaattgttttcttgttagagcgggctacccttgtacatttatcctactatgaattattgattcttctggaatgcgtataatttgcaggatctatgcacgattagcatgctcgcctatttgatatacttagctggcggattgatttgctgttcatggaaacttttgttttacaagtgaagtaattttaaccatgaatacacctgatcggcttgatacttggtgtgaatgattgccaaggagcctactgcaccactttctatcttttcttaacaaaaaaaaaaaaaaaattccaaccctccctggagcgtcaattgtttttataacctagagaagcactgccaatgatcttgttttcgctcttatttcactatgatggatggtcaagtgagttgagttgagtagagaattttttttctgatcaacttctttggacgagcttctatttagcacagaataagtcacgatagggatttagtttatgatacaattcttctcagtctttccttccaagtttcaagaatcaagtgtacctatgacataaataacatgtcaaaacgccaaagtgagcttagctcaagttacataaagcatctatccttgactaaaaggtttgagatttgaatttccctgccccatgttgaactcagaaaaaatgaaaaagaaaaaacatgtcaagtcactgggttcttgatattccattagcacaaatacaagtaagcccctgagttgaaaatcttaatttgtgccaacttatgtttgtaagttgtgtatttactcacatactttgtagattaccatttggtattttcgtcattttgagtcagagagggtggaactcatctgtggtgttactttgactggttcaagacaggcggattttgatgagggatatgggttatctaatttcttgataggcatggaatgcaaattgtagaaaatcactaaaaaattaaaataaaatgattatggatctttccctcacactaggagaatataaaatgtatgcattcttatataattgcgagtgagcaggctattttcctttacagtgtatgcccccttcatgttccatttttttcccatccttgattgttatagaatatataaccggagctttttaaacttgtttttttaagatgatgttttttctctgtcgtattttcatcacaatggaacctgaagttttgtagtttcacgtaaatactgacattattttatgacataaaatatattttacactgggatggtttgattttgaaatttatttgctgatgtatatggctttttttcccttctcacaggagctctatcttttcttgtccttgcattttcacttataagcttttggtgtcctctttcccattttgcttttggtgtattttttaaaaattatcatttaaatacctgcatctcttggcaatttttgaatgttcaagaatctaatttttaaaaagaaaattctcttaacaattggcattcaactgatttgtcttctctgcggtgctcctgttgtcaaataaatatctttctcttgttatttgtcattctggattttgtaagctattaaaactttgaacttattgtgaaattgtttcaattttcttcattttgtttctattggaggattgaactcttttctttctgtttggcttttatttttaatagtttattatcttattcatggcctttttaatgtatgttgtataaatttagcaccgacctatagttggaaagatgcatgcttggcctattttatcctacactagctaagactattgaatgaatctgtaatattttcttttttggttttgatgtatctattgaccagtcattttatattttgtgattttaggaaatcctgaaggtgtaaaattttgaaatattcagtgacatcaaggttttgcattcaatttgttgggcttagaaattttaaatttaattccactcaggtgatgtttgttacattttttatcatgtttagaatcactatcaccaaacaaataaagtgtgatctgcatgcacgtgtaaaggtagctttgtccatgtaattccaccctctctcgcccgcccaccaaaacagataaagaaccatatcctacccaaagactgagcaaaattatcttcaaggtacacacgttacaatagatgcaacttcctgtgtccagagctagttttgtttgtagaaatcccaccctccccaaccagtctatgttcctaactaaaagaggaacaaaactgatgtcccagcctaaagactcgaacgaattacctttagaatctagttaaggttcaagctttacaatagatgaaactttccatgaacctgagttcttacaaatagtacacagacgaaacaactcatgcagacaaccagaaaaatgtaatgaccagtacactatatacttatatacgtacatgcaatatataagtgtgtggaagaattatattttcttctgatgtgtattttgtacgacggtgggaattttgggttgtatctgtatgtggggttagcttgcatgcgttcaagcacgatgagatgagagtgcttgatgacattccagtccagatcaacatttacgtcgtttagagctgaagatggtgggttgctttgagaagtttgattgtttgcgacttttagtttgggttgcattagtctctggaatcaaaagcccctgctgccaaatttacctgggagtttgatgtattctgtatatggggtataacatatgtcatatgataatgatactatcggcaatcttccagacattcttggaaatattctacctgagttgctgctttttagttggtaagaagaaatgacttgcttttattcatttgaagtgaacgcttgaaattactttgcttctgctcttagttttttgttgttgcataaaattgtgtatttggagctgatgctttttctgttttgaagtactgttagacaatgccatcgtatttaataatggacccagatggtttgtttaactgtttgatgcgttcttcaaccaagtgatggtggttgtggtagttgtttcgaggctgacatgtggtatttttctttttaggctaaggagctcactttggcttcagtttaagcccc

SEQ ID NO: 7480 - DNA, 1233 bp, Cucumis sativus
  Intron number 2 from transcript Cucsa.366430.1 (locus Cucs a.366430) derived from phytozome v7.0 (chr-ID scaffold0362 5; pos 55109 to 56341)
tattcaaagagtcaaggaacactggaggtacgcgaattcttgatcttgaagctcaagaaagatatagaaatctttgccattgttagtacttgttcatgtagggaactgctatgaactcgagatatcattatttccactgcaattaatgttaattcttgttttggatcttttataaatttccaagcttacaggtgaggtggttgttgagtaagagttgttgatataattatatataatataactcataagcttaagcttctgggttgaatgaggattattatgataccacttgtgagggataatatagctctacacatctctacattggtatgatattgtacactttgggcataaactttaatgacattgcttttggattaacccaaaaaatctgatacccattgctatattaaccctcacttgtatctcatgatctttcttttgtttagccaatgcaagactttagttgcattcccaacaatattatatcgaacataggactgttgagctttccctcaaattcttatctatctatatacctcttatctaaatgaactcctcttcaattaagcacactacctaccaatcagatggagctgagcattggatcatatcatgatatgtagagaaaggaccagtgagtattttagtaaaagtttgtttcgattgatttgagaaaaaagttttattcaaagaactcatttttatttaatttcttttgatgataattgtttaaaatacacttcaaaagctattttaagtggttactaaacatatcctaaatgtgattgtccactatgttcctttggactcgaagacttttagacaaatggtatcttgagaactttcatatccatttaaggattcttttctttttttcctggttcttggagtttttatcttccaatcgttctgtgttgaagcatatcaaaccagaaggcagcaacctcatttttctaaacattttttttacccaatattgcatttccatctgttgctgagaaaattcttgatcatctaatctctaccctatgaattctcttctgttatcgggtttctgcaaagttgaaccattatatcgaacttattaagcaaaaagagaggggagtctgaaagaattatatacacttattcaatccttcacaaagagttaaatatacgattcgtatcaggtacaactactcttaacaaaatgtatatgcccctcctccccccatcatcccaggttgaaag

SEQ ID NO: 7481 - DNA, 3655 bp, Cucumis sativus
  Intron number 11 from transcript Cucsa.174800.1 (locus Cuc sa.174800) derived from phytozome v7.0 (chr-ID scaffold012 21; pos 572278 to 575932)
aaagccaacttacaagattctctggggaataccaggttctcactattgaaatatgattcaccatttaatcctctcacattttatacattccccccctctcattttttaaaacttatattcttccattttggataagagaaacattgttttcatttaattccgtaataccattaggcacttagtatgcaaatatgagaatgtgatgcctagaaatatgactgtttagacatggaaataattctgtgaaacttgatctcaaattttatttattttctttataaaatccaatattttttcttttttgaaatggaacaagcctcttcattagtaaaatgaaatgagactaatggtcaaaatacaagagaattatacaaagagctaaaattacaaaagggataaaggaggcgcacctgggcatctcaactaggttgacacccctttagtgcccacgttatatccgaactactaaaactgaagaattaaacataccctacataagaccaagtctcccaacaacctgtataagtgagtaacagattacacacacaacaaaattcaaaccagagaagctgaaaaactccaaacaaagataatccaatacaagtgatatgctggaaaaaacaaaagtgctccaaaagtctaggatcacgaaagtagctgtgaaacacttggagaagatgccccaaccagagataatctggatgagccaaaacaatgttgaagcacaaaaaggaactccattgaggataaatctttcaggcctcttaatatccacgagagaatcttattcaatagaagtgaactgattttataaaattccaataaaggattccccaggaattcctagaattctttttatattggtaaactaaatctattaataatgtttgatctgataaaccacttcctaatatattttaaacaaattattttaaaatacgaatgaattcttaaaattataaaaatttaaagtaattaatttgttaagttaattacgtttggtacgtttaggatgtcaatgtcgaattgttgaaaggaggtcctatgaagaaacactctgctctagcacaatgccctccttgattatgaagtgatatttttaccaatttaaaacaagtttggcatcttagcacttttgcaaaattagagatagattagcaagacaaaggtaaagactttgtgtgctttgtttgcaattacatgtaaaggcttttatgtaaagtgggaatgcaaatgagataattcaaaccataaagatctggaccagggattcggaatccattcattcctttggttgttacaaacttctcaagatatgcaatttttgccaattttaactctcagctcacgaacctaagtcgtctcaaggtacatgtcctaatgttatggttaatttcttagccatcctagatgcgtaactaattaggtacagaaagcgtccatattaatcaagcaactgtattaagcaaggtatctagttaagttgatcaaataaccagatagccctacttattaattagtcggttcttgaaattagttaatcatgctttaaaagagctattttaaataacctataaatcacagcaagcatgatttaacttgtgcccttgagataatgaaatacgaagaaacattgcaatgaattccaagaataaacgagagttggccaaaaattcaaatattcaatgcttagaattagaactctgttagatacctagattaatatagagtaggggtataaaggtaattagatttattgttagatagttggttataaataggaagttggggaaggaagaagggcatgaagaatttggtgaataaatagggctgcaacattccttgaaagagaggaagggcaagggcagagggttagggttcttttacttgttcttttacttcttttaatattttctatatttgtattttccttttgtggtttcttcaggtctatttattttttatgtaaaaggtcatatgtactctgaattacttttggtttattgaatatattatataaaattatcaaagtggatgtcaaatcgacattcttgaatgtaattcttgagggtctatgtggaacaaccattaggatttgaagccatgggtgaagaggataaagtgcttcaattgaagaaggatctttaaagtttgaagcaagcaccgagatcatggaattcaaggattgacaagtattttagggagaggaagtatgtgaagtgtccttatgagcatgccctatgtatcaaaatgcaagttgaaaacatactaataatttgtttgtgtgttgacgatccttgcattttttatgaatttaaaaaggagatgacgaaggagtttgaaatgacagacattgggtgtcatgagttattatcttgacaagtgaagatgggatttttatatctcaagagggctatgctagagaaatgcttaaaaggtttagtatggatgatgctaatcccgttggaacaccaatggaatgtggagtcaaaattaccaaacagattggaggagagaaggtaggttctacatatttcaaaagcttggttggaagtttgagatacttgatatacacaagacgagtcttctttatttagttggaattattagtcgattaatggaggcgctgacaacaatgtattgcaaaatggcaaagagtatactttgttacatcaaagggacaatagagaatggtctttcctatgtctcttctagcaattttgatattgttggttactgtgatagtgataggagtagtgacctggatgattgaaagaacactatggggtttttattttttattggtgaaacagtgttcacgtggatgtcaaaaaaacaaccgatagtcacattatcaacatgtgaggcggagtatgttgcgacaacttaatgcatatgccatgcaatttggctaaaaaacctaacgaaggagttgaagtttcaaatggaggatccaatgaagatttttgttgacaataaatcagccattgcattagccaaaaatctagtatttcatgggaggaacaaacacattgatacctgatttcatttccttcgggattgtgttacaaagaaagaagtggaactcaaatatttctagttgtgagaccaagcggtggacattttcacaaaagcctgcaagctggtgtgtttctaggcgtagcaaattaagtttgaggggatgttgagaatatgaaaggtttcatattattaattagattttgacggttttagaattaaattgatttgtaacatttttttttataaccaattgtgtccattgagtttttttgggagtttttagaaggtatgacaactaaataatgttatggtttcttaaccatcgaaattctattgttacattttgtaagttaaaggcacgtttagttgaatcaaaatatcactttcttcacacctgtgtcatcactcttttctcttctagcgcagcaaacctaaatgacgcgaaattatgttttgttgattatttccttttttgtattatgttttattgtattggttgtactatatttaccaaatttactttttccttctttgtaatgggttgttcttctatttaagaacacatttctctctttgtgaaatacatgctctgggtgaggtcaaatttattttgtcatgtttgtagggcgttcaa

SEQ ID NO: 7482 - DNA, 2179 bp, Cucumis sativus
  Intron number 1 from transcript Cucsa.397220.1 (locus Cucs a.397220) derived from phytozome v7.0 (chr-ID scaffold0414 6; pos 53283 to 55461)
tcgctccacttgagcgtgtcaagattttattccaggtgatttttcttcgtttttgtttgcttgatcgtgtttttttttctttcttaatctcgtcttgtaagtgattcaattgtgactttttttgggaatcgagctcaattctctagtgtttcgaaattagttgcataatgggtgtctcttgaggtatttggctttggagttcatgaatgtatgttttcttttacttattctttgttctctcttggaaattagaatgagattctacaagaatgagagatgttgtggtgcatgtttttttttggaatttaacttttaatttaccaggaataatgggtttcttatagatcagtaaaagatgcaactcccattaattttttttcagttctgattttggaaaaagcaagatgctttggagtccataacttcattgcattttacttaatacatgggaatagaattccccactggctattatgaatcctttttgtttgttttgttcttgaatgacaaagaaacttcaatcttaggtaataaagtaaaagatgctcaaaatgaggggagctcaagtctaggaccaatgagattacatggagactcttttaaattggctgaagtgaaaaataatggcttaaactctaccttattagtggaatatctggaggaaatttttattagcaattttctcttctttaacatctataaaggtttctgtacctaaagaaccatcagtgacataaaatggaaaatacagagttgattgataaaatcttgctctaaggaaatatttgaggtatctatctattagataaatccaacgtttctcctaaagaattattgtcaagtgatatgaaaggaaaaaatgatttggatctcaaggctatataattcacacagctcacatatttagaggttgagaaatcaagaaaaggaagagagaaatcctctagcatacctttagtgttgtcttccaaatgaagtacttgactttctttagattcttcggattctaaagaagcttggcctttccttgagaaatggattttgatctacctaccaaagtgttattcatcgatttactggaggacccctagggtctggatgccaaagctttgattctaaactcagggctttcaagggaattccccaaggattctaaaatgaaagagagcaccattctctttttttcttcgagaaacaaaccacttttcattgaagatatggaaaggtacgattaactaaaagaggataaacgccctgtgagattaggaaaaaaaatgctttagttggcagtaattttgaaagagtatttccaaaagttaccggagcaaactgagtataactaaatagtgcggattagtttttcaagatctgcctcttattctatctaaagatcgacccaacataaaaagaaaatgaggaagtaggtttctgttgtatatgttttgagaagcctaaaagtggatctttatttttcattgataatgtagaaaaatctgctgatcaagaacagttatagagcaaaagtttacatttagtctcaaaacccttcttttaaagaacaaagccaatattatccttctccacaccatcatacgccttctcaaagtcaattgacgaatcggtccccgtgcttttgtaacttctcgcagttatggttgcattggcaatgagaatgaagggcattaactatatgtctatcccacaactaaagtctttgattttctccacaactaaagtctttgattttctccacagctaaaatctttgattttcttgttcattctcagttaatattggtatatcagttttgctcatctcattttcataataaatataggattaaccatctagtatacactgttcatatttaatgcagttctttctttttcaatttgtttaagcaaagtttccccccagatttttcaagcatgaatttccctttccaaagcatgtactgtggaattaaccagctgttaagcactttttatcattttcgtttttggatgtagatgtttttgttatattttaaataaggttaagatttgatcttcgatatatgattctgaagtccacccattttttctttttcacggtgaagtattttcctagaagttaacatctgtacttatttttcaacttgttagaccagaagagcagagtatcaaagcataggactact

SEQ ID NO: 7483 - DNA, 2219 bp, Cucumis sativus
  Intron number 5 from transcript Cucsa.205540.2 (locus Cucs a.205540) derived from phytozome v7.0 (chr-ID scaffold0141 6; pos 609391 to 611609)
tggtaatggttgactatcttagtattttggccttataaattgttgagctgtgtttgtggctgatatttttgcttggttttgttctggtggaagaaatagctaaaaattttgggttgtaggacttgttgctggaacttttactctgactcactgtgggattcaaagatatagaaagaggaatgattgggttagtcacactcatgaaatgattcattttcatatttatcatttgtttgaatgtatccactgtgaaggttgcctagctgtattcccagaacttgaccttccttagttcatcgtgcattagatgggtaacccaaaaatgcctccctctttttgagtgaataatacctcaagaaaagatgagatttctggtgacagacaaatgtaaagggtgtggaagaatcataatacttcatatcatttccatctaaagccatatcattggaaaggctctgattctgttgaactctatgtttatcttagaacctctacaggttaccaactaatatattatataccagttatggttaatctgataatagtgggctccacctcataaccaaattacaatgagagaagtaattcatgtatcttataaatactgcgaggtatattaattcttctaatatgggtacacaaaatgcatctcaagatggtgtctctttgagttcaccgttgttgggtcagattcatattatagggttgagtccatctccaaaaccaatggcagtcgaaggagtaactcataaatcatacaaatatcatgaggtctattttatctttttgatttgggttcataacatgattagtgtttggctttgtattatacttacatcctaatgttggtatgagtctcatcttttcagttactttcgaaatatatttattgggaatctcgccttttttactaggttttgagtgaaggttgcctaggttgagcagtttttaccacctgattacctttttgtgggaaaaaaatgggtgagtggaaatatagagccatccaaaagtatttacaacactatcaagggttttgattcagccattttgaaaagatttacttttctaaaatataaattaattccttgaaccatgaaggaacaatctagcatttgtagaatttatcttgttaaaagtgtcttaaattttctttattagtttatcattacgttgataggaatgctatcaggatcttattagagtattaaggatacatcagtaatttgctaggggtctgttattcttgttggttgtaaaatactggggagagaaatgaagaagataaccattattgtggtgaatgaattagaatttgagagagatctcaagaggggagggttcaaatttctcaattacttggcttattttgtaagtttctttaccttttatactacaatacattacggtcctattttagtttctatcatacttttctttattttggttaaatagaattttaacttcaatgaaacacatttaaaaacttgatgtagaaatcctgtgtcacttgcgggatccaattctgaaaattgttgacaggagaaaataactgacctttttacttggaattgttactgcaactcttggtagatgaacactcaactgtatttggaatttgaggaccatttatgcagacttgtattttcattgagaatttattgtcgatcaatgtttcttcttaagaaaacaattaattgctgcctgatatattgaaacttgcctaacataaactatttccttgaagaaaacattgcaagactgcagttttctttggtgtgcttagaggaggtttaatcctggctaggttttatgtcttgtgagcatttgcgtcattatattttttaaaattcttctttaggcccgatacttttttttttggactggagcctttcttgtaggttagtttctggtttattttctctcaatgaaagtttgagtttcctgatttaaaaagtgtggcccttagttgttacacatcttatagtcaataagcttggcttacaactatttggatatcagatatgcattgtctttttggaaatgtatgtttactaaataggttgatcttttgctttcatcttgaatacatttcatttctcatttcttgttcgaatgattttcatgccagaaatacctactcctccagcgaccaagttaacagaaacttaagtgaacaaaatatatctttacccctcttttttccatttggcagttga

SEQ ID NO: 7484 - DNA, 3514 bp, Cucumis sativus
  Intron number 2 from transcript Cucsa.112140.1 (locus Cucs a.112140) derived from phytozome v7.0 (chr-ID scaffold0095 3; pos 845272 to 848785 reverse strand)
gtgaaatcacaaaggttgagctcagagtactgaaggtatcaactaacaagtgcacgttaaattttcatcaatcacatcaataggagagaaaaaagaagcagagaaaggattccttaattttttggctggccgagtgtttagaaaataatgtgggcatggtgcactattaatctttgctaatttttcgtaaagagagaaagaaaaaaggtgaaagatatatcagatgaattaagaattctgttatgaaactatttcggcagtggatatccaatccatgtcatgatacttcactgattatttatattaaaaaattcgaaatcaccatgtaaaaatatattccctctcttaaaatctgtaatctcgattgttgaaggaacaaagctgcataaattctgcttgagttgaatcctgccttcactgcaatttgtgagtttagagtttctgtggcaatgttcacaggaccccaaattgatcaccaataacctcaaaagtactccttctccaataatccaaagggaggttcttgatttttaatcatcctccatagcctttcaagacaagcggccgactgtgcttgggtttgtcccatttttcaaatttaaggtgaaaagaccccatagtctgccactttccttcctcactgatataaaatccttaattgacccttgattaagactaatgagggcattctcattgaatacgggatttatgactatctttgcttgagaataatcttccagtagtttttggatcactctccaatcatcaaaagcaaatagtttagtaacaatccagaggcttccaaagttagttgggagcaatttcagagttcttaatcacccattgatcctgatatctgatttccaggctgaggaagtatcactgtccactttttttaggctcagaccgacctactgaactaaggaatgcctatgaagctttctttgagacaggaacgttgcccttccttgtgttgacttaactcgggttgcttgtcaaagatggaagagtattctttaaatgattacgagaaaaccaattaacatattcctctttactaaggaaattttccagcatgttaaggaacgacttccaaccctgtttgttttcccctgagcatacccttaaatttgaatgaccttctaaagaaggcaagaaatcacatcttaacatccaacctccctttgttttaaacttcgaaattttcagtcttcctctatccacatcacccaacttttgaaagaacttatcctctggtcctcttaataaatccgaaacagccttcagaaaccattctagttgatttcggaaactgacagtattctgctagattccacattttcaacatgaattcgattaccttctttccaaatacattagtgagactggaggactttgcaattgaccataatgagggtttaattccgtcagtagggagaaagcagggagaaagcgtcagcaatcagaaggggagaggggagaggggagaggggagaggggagagagagaacttaccttttccgtatcacaatctcatttttttattacattacctagacaacattactatactgcattggtaattgaatctttaacggtttaaaatttcttatagcctattggaaaacctttttgaaataatctaaataggtctcattttataatttcatttaatcaatgaaatttattgtttcctctcaaaaagaaaaaaagaaatttattgtttcatctcaaaaagaaagaaaagaacctcctctaatgtaaatccataaatttgttactaaccactatcacttcttgtcaaatggattgtgcttaaatgttatatacatatttgatttgttgttaaattgccacagtaacagacttgtaatcactccacagaaaaccaattaacatatttctctttctcgtggtaatcactccattggatgtaaatggatttaaaaggtcgagtataaatgtgtaaaatgtattctcttatttcattacgaaaaaaaaaggttttcttaaatggaagtaataccccatggtaagaaaataaaaaataaggaaaaaataaatatacaaatatatctttaaatacaatgaaattattaacattaaaggaaaaaattaaccaagaaaacaatcaacactccccctcaagctggtttgaagatattatcaataggcagctattgaattgccactttggaagacctttagttaacatatctgcgatttgttcccttgtctgaagataggggatgtatattattccttgaacaatcttctccttggtgaagtgtttaacaacttcaatatgtttcgtcctatcatgaatgattgaattgtgggcaatggacattcctgtcttgttaccataataataggcattgtctgagagaatctcaattcttcccatagtcttcttatccatatgccctcacaaataccatgggctaatgctctaaattatgcatttgcactacttcttgcaaccatgctctgttttttacttgtctaagtaactaaatttcctccaacaaaggagcacaaaaagtggatcttctcagttgtgctactcacccaattagagttagtgtacacttcaaaattaaggtggtcaggttttctaaacaatatgcctttctctggagtacctttcaaatatcttaggattctgtaaacaacatcaaaacgagttggtgcaagagcatgcatgtactgacataccatactaactgaaaaggcgatggcaagatgtgtcatgtgtgtgagagagatatacaagtcttcccacaggtttatggtacttttctttttcttttatttcttttccagtagcaactaccaatttcaggttctgctcaatgagagtttcaactaccttgcagccaacctgtttctttaagaagatcaagaatatacttcctttggttaaccaaaatgccacttttagacttggcaaactgcatgcataggaaatattttgaagttcctaggtctttgatttggaaatcattagctaactttttcttcacgaaagtctgtctcatcattacctataagaatgatatcatcagagtaaactatcaaaaccataaccttgtcatttcttgtatgtatatagaacatggttgatggtatgatcagcttgactgtgtctaaatccttagcttgtgactgccttttcaaaacgatgcaggggtttgaacccaggacatcatgaaacaatctactttgattccatcttaaatcatcaatcgactcaaaagttgtttaagctgatgagtgaagccgaatttaattatatatcacttaacaagtctgactcttattaagttttctactttaacttttcatccttggtaatgaaaaagatgttgcactttctttctgtgttgagtttatctatagtattggggcaagcattcttatgctttttctgttgaaaaatgtctgtactttgctcttatcgtgtttttttctctcagttggccaacgtgcagtgtcctcgagatactcattt

SEQ ID NO: 7485 - DNA, 1681 bp, Cucumis sativus
  Intron number 7 from transcript Cucsa.135850.1 (locus Cucs a.135850) derived from phytozome v7.0 (chr-ID scaffold0104 4; pos 648355 to 650035)
tcatcgccccagatcttgccattattagaaaacacgtatgtttttaatttcttatttcctactgtctggtaacatgatgcagacaggatgatgcttgttcatattctcaccagttctaacatgtcatacatttgtttttcttacatattaaaaaaatcataagtaagaaccagtatacaacagaatggaaagatcggataatccttggcgaagccaaagtcaaatgagattggaagcaagcttcaaattaaaattattgtaagtcaaagtatggcgtaattaccgaaatcttaggcacttaacaggacaggaaaaaataagagtcccatgaagtgtcaaacttctgtcttcccctaagaaaagtttctctctatccctagctatgctaaattccaaaatgaagcctcacaaattcgaacctcagaatatatgaagcaccaaaacaagagatggatcttagatcaatgcaatagtatcatagtatgtatgcaacttatttctttttaaatcagccatccacaacttatagtccatgagccaagtctaaaggatgaaattaacattttcctaggtgatttctttccaaagcaccttgtagaattccacgtagagaacctcatcttatcggttatggtcaaattagtaaacaggaatgttacaagaaaaatggtatgcaagaaccaatttcaaactgataggtggcatctgaagatgcaaacctccaagaattagagtcagcctcaatcactcttccaccacccatcattgacgtttcatctcaagagcaagtgttatccttcagggttttaataattgttggagtacaagatttgttaacagttagtctaggcagaggaaaaaaaattccacaattgtttttgaagtttgaccatttgttcaaatcctgttcataacatcctttacttcaaggaagctaacccatggaatagtcacctcaatcctatgcatatacatcaagttaaagctaatccatagttgataaactagctttacacctaccatgcacacaaatcaagatagtatgacagaggatatgttctttctctgtgactacaataatgaacaaagaaattcatttaaaaattcttcatatattgacccttgattcagaagttggaattttgagtctgaacaatgtgatgttttatcacttagagaaaagggtaaaatgtattgaacctgctttttcaccctctcacaattgaatgtttatagactagctctatcatgctctttttatgtgcttgacttgatactggtttaagacctctctttggagattctgtgttcttgcttatatgagcatatttttggttccttgtttcatcttccctctcttctccaaattatcccaaagactgtagcatcagtgttctctcaaggagggacttttggaggatgtttggaatgtgggttagtgtgactgtctttgctacccctctaaattgcttaggatttcaaattttttattaatgacaattggagttaaaactttttcccattttcacagtccttgtagttggttgaagtcttttctgtgtagtatcttccttccttttgtacttgtatgatgccttatttttgttttaaaagaatacatttttaatatgtgcaaatcctgggcaaagtactgactgcactggcaataacaactaggttg

SEQ ID NO: 7486 - DNA, 3047 bp, Cucumis sativus
  Intron number 11 from transcript Cucsa.025330.1 (locus Cuc sa.025330) derived from phytozome v7.0 (chr-ID scaffold003 45; pos 192952 to 195998)
ccaccaggttcgttttcttcaacactatgcttcctttaatactatatattcaattgtaaaacaatagcatagaccattgggttgaaaactttgagatgcaacttagaagcaactatgttgactcggtatataaacacaacatataacgtcgacactgtatttcccaataaactagacatattacgtgacactgtgaacccaaatgtcctacaaaataaatgaagtgaagctacccaaacagaaaagtcctgtcattcgtaagagttagagccactttcctctcattttaaggataaattagctactttcaactatcctaacagaagcaaattaaaggtttaattttaaccgtgtttgtggcttaaaagtgtaagggtatcttagtgccgagatatcaacgaaacttcaatattatttcacacaatacagagtcctctttgtaaattggatttaaaaactagtaggtcatgtatgctttaaagccgatgctggggctatggataacctaccaacttttgaggtccatatactcgatcatatatggagatattttaccaaagtctagatccttatggggaaattacccagccccgtatttgtttttgtgcaatcttagtttgtgtagaaatttgttttgaagcaatttcagtcttttcttagattttcaaaacttctttttttctcttttggtagtggcacctaacttcttgttcattttttgtttttttttactagtttatcagtttatttagatttttagtagtttttttcattaaaaatatctgtatttttataaatattagtcagcaaaattatcaaaaataaatttcatatgtgattatattcttattttttattgctatggtgttgtatggaacgttgaattttaagttctaatgaataaatagagtgctattcttgtttcaattaataggattttggcgaaccatagcatgtgctggtgtcgtttctgtgtccatcgcaatatgatgtggaacatgatcacatatcattggttggaaaacaattcttgaaatgttcttttttaagcatgtccaaataattttctagaggatatttatacttgatctctgaaagggaggtctcctcgaccgcccttagggttatactagtacatccaattaatgaactgcacagttttccacaagaaaaaggagaaataggtcctgtattatgaacgatttttgtacgttataactgatgtcttagatgcacttactagttactacggacattttttttactgacaatctgtctttaagtttttgttgaatcaaacaaaattcgcatctgataaaccgtccaggttggtatccgtattcaaaacacgtatgaatggaactataagacatgtgacatccactttattcattccatcagatttagatgacagctgcaagctaacagtattaaaaagaaatacaaaactaattctaatgcatggagattttcattttggtttctttgctttttcccctccctgaaattattaaagggtctttttcactagtcactcttctctcattcggcatacttgcaattgcaaatttccctgcaaatgggctgaccaaatttccaaccttgcacacgtccaaggagatcaaaattactgggttgaaatccttaagagtaaactgcaacgttaactggagtcatttcgtgctctttcacgtttctccctctatattttttatgcttatgacatttgtttccgaagaatttattagtggtccaatacaaatgttaatgcagcattttagacatatcttcgttatttggtgtttgagaacattgccaaagctgctgcttatctgcagggaattgtatcacaagttttttctacgatggacatttttgttgtttatttattgttgagagtctacgacttttattcttttatttcaaaggacaactcaaaagagatggtagatgtgattcgtctagaagcaaatatggaagaaatacggttttttctattgatcgtaaagtaacaaatatatatatatatatatatatatgtatgtatacttttctcaagcaacttagggtctccttttatgcaggggagatgtctttgaatttatctcttagctgtccaaattgttcaaggacattgagtgcggggtcacttgtctgtaatagtggtagggggtgttgtttggtgtgtgcatggaagttatgttataggccaaatatgctattatgatggaggagtagaattttagtacactcagttttgaagccttaacggtttccctagatcttggctgtggtatcttcgacaaaccagctgattaatctcaaccccttccctatataaaggaagatagcaataaaaaaatcaatgacattttcttagtacaatacaatggattatggttatgataagctagtttcctgccttaattttggaaatgtggtgtgaatgtgtgattgagacataccttgtacataagtttgaactgtcttatttggacctgaggtactaattgcttgtaacagtatcgaatgaacagagaagtgaaataatcaagagaattcccaagtagtgttttccttttgcaaaaactggtactcaatacaggaaagtgtgtcaagtggcctcaaggtgtacacaacaatgtgatgttgcctgcagttgaacttcaatgacagtatattaacaatgataaattagagttacggtgttgtctactcttgtgaacgtgtacatgcgaagaacgttctgtcaattaacaaaccatcatatgaaatgaacgagtgttttctgtttagtaaaagaagagttaaaaacagattcggtcgttctttgaagagttatttcagttcaccagttttttggaatcagtagttcaatctacattcttcattctgtatcacgttaaacctcaattcatctaattttttttaagttcataactgaccaaagatattttttttgtcaattctctggaactactttggttgtatatcttttttgcttataatttcacagatgtcctcgttttatttctatgtatgcagaa

SEQ ID NO: 7487 - DNA, 440 bp, Cucumis sativus
  Intron number 3 from transcript Cucsa.089630.2 (locus Cucs a.089630) derived from phytozome v7.0 (chr-ID scaffold0089 4; pos 1040320 to 1040759 reverse strand)
aggtatgctggtgtgatgaatcaaaaaatcgtttgtctttgtatactgtaatgaattctgcctagaatgttatataaattcaattcgattatagtttctgcaagttttacttttttttggataagtttgcattattttaagggcctgtttggattggaaaaagtattttttaagtagcttttttttttgaactcttttgataacaacaatattctttggaagtgtttcaaaagattttttgagtaatggaatgcaccctaaattttcatggtgtgacaagttcgaagtgattttgaaaactacacttatacattgcttgcttgtccgaagatgataatctacgcataccataccataagtaacaaagaactcttttttttttctttcggttctttccttatgtatcagggtcccactagcaaaaatccactggcatataa

SEQ ID NO: 7488 - DNA, 3322 bp, Cucumis sativus
  Intron number 7 from transcript Cucsa.051380.4 (locus Cucs a.051380) derived from phytozome v7.0 (chr-ID scaffold0055 7; pos 538276 to 541597 reverse strand)
tgacgttactgaagaattttttctccctgttcaaggtatttccattgattgctctctttttcttcttctttaaaagaaatgaacgcaaagaaatcacttttgatctttgaggattgacttatttgggagtgattttaaaatggttagaatcacttttctcattttaaaaattattatggaacatgtttttaaaattatactttaagtccaaataacttctcctatttgccatcacgagagcttctctaagccttttttttctcttccctttcttgtttgataagagtatgggggttgttgcacttttgcatgttagttagaggttagagcctttcgaaatgtgtcaaagtaaggtgtctaaactagagtattatttaacgcgtctaaaatcaaacaaaaagtgattttaaattaaaattaacataagtgatattgacaattttaaagtcactcctaaacatgtactttggcgcactttggttcttgatttaacaaactccacatgttagtcattaaattttagtgaagatatacttattaggtgtcacaccctgtactaagttaccctaccaaatctaggaaatgacatgatgactagtattcaattaaattatgaaatttatgttgggtaccaaatgtcaattgttgtttcgtggaagatcccactaccttgaaagcaaaattcgacgcaacctaggtgtaaattaggttgaaaacctaattttcatacgcctaattagacattcatcaagttcaatcctagtttgattagaacaatacaagatctaactgtttttttgcaagctaacttaacttattacttctaattgaattgcatataatttactaagagaattgtacataatcaaaataatcaaatgcatgaattaaagagagattgacacatacccaagttaagaaagtgtaccttagcctcccatccacatgtcgggtgataaggagatgttcgagtgcataaaactacactgaaaatttaagaaaatagaaaaaaggtttattagaatggctgaaatttgagatgtcacaacctaggcggcaaagacttcttttataaaaatgaagcggtgcagccaccctagagacaacaccacgacgttgatgaaactcaacgcgcacgtcagtggtcttcttcctcctcttccaaatctactaaaaagatgaaagcctatctttttccttttttttcttctgaatttaatccttttttcccctttctatatccccttgttcctttaatctttttattccgtttgatccgaaggagtagttttcttcttttaggtgctttccctttgaaatatccttttattcctttatttcgaatccttaagtttctcttgctgactttatcttaaacttccttaagtttctcttctttcccttaaaaccgctctgtggttccctcttgttgcaaagcccaattattatatttcataggatgaacgagtataaataatggaagggataaactctactatagttgaatcctccccacaccgtggtagaaagaaagaggtagagtgaagggacaaactaaagattcccaagaacaggcacattggatgacagggaatgaaggccaaggtaggtccaagagtaattctatcaaagaaaaggctataataggctagtatttgtaagacctatgaaccatggggcatatgcataccaatctggagcacctaactaagtatgcacggaggaactttatcggcctcaactgaataaccgctacatgggtctcgtcgctttgctcctctctagtctcattcaagggtccttagctctcgtattgtgagttttccactttgttcagttacgtgagtaagctcatctggccgtgtgtcatgaatctgattgagtcttatctcttgaaaaaagtagtagttgtgcagaagttgcctcatcttctataggttagggagctctctctctttagtaaggcaggtatatttcttaattaataacatatcttgtcccctcactcttcaagatgagaaaaggttccaacttgttgccaccgcattcacaagaaaataaggaaaactgcaggtcaaagcaaaggctacgtacactgtcgccgcctcctgctatctctcataggtaggttaggaagaagaaagcctatcctacaagaggaagaaaaagattaaagcaataagaggatataggaagataggctttcgtgcaaatagtaggttttagaagaggaaagcctatccatcaagagaaagcttagagaaggaacataaggaaggttttatatgagaggaagaaaaagaggacaaaagaactcctacgaagcggagagggatcagattctcaatattgtatacaaactcatattcccaattagagaatgatttgagtgccgtggcgctttgtagggtgccgctatgttgtaaggcaaaggatcaaatagccctttttcttcactcttttgtctcggttgatgcctctcgacttcaatttgacccaattaagtttcaaaatgacatcaacactgaattctaccttcaaattgcttaaaacctataaaatatccattaagatatccaaataagaacgaacgtaaaatcatggaatgatctcaaattaggctgagctagataacacatttttagtgctatcaatagacttataccttgttgatgttagaataattactttaaatctatattgaattgattaatcccatgatcattcataccaaattgttaagagtaacttactggattccgttgaaaggttaatgatgagtatactattgtcttcaaccaaaactccaaattcgaacgctcttggtgggatctctctagatgggataaagaaacattgctgcttatttttctggtatattggagaccatcgtccttagctctctttatgtactagttcaattatggttcccattaaatcttaatcaatctagaagtgagtttctacccatttggttcatattcaattatgaatctattctacccatttggttcatattcaattatgaatctagggccttgattaaatatatcacataatagggttcaatctaatgaattaacttaatgtggtaaattatttatccacatacatagtccccactttaattatatgtattattattatttaaatacgtctaatagttgaataataccatttttataatttctcaaacgtcctaagacccgtgatgataaaacatttcaccttttattcttctcacacacttctcttgatctggtgactgctctgaggtgccttcatttccttgtgcaacaggggttcttcatagtcttcttca

SEQ ID NO: 7489 - DNA, 4671 bp, Cucumis sativus
  Intron number 2 from transcript Cucsa.240160.1 (locus Cucs a.240160) derived from phytozome v7.0 (chr-ID scaffold0204 7; pos 95903 to 100573)
gggttcctgaaggtggaatcccagattggaaagaggtgactgttttctgccatcttttatacctataaaaataaaaatgaagtatgattgagaaataatcaagtactttaaagggtttatcacatatgcttaaaattaagagtgagtgatctaggattttgtattcttaatttgaatgatatctcgattctgtgttgtacatgatgtcaccttttctctaaggcgtgtagaaaaatcattactactactattactattactattatttattatttattatttattatttttaaagtttatcttacctttttgctatcttaacttatgatttggaaaatatctttgtgtaaattattatgtaatgctagccgtttattggtttaattgatgttttttttaaagatttgaagattaatgaatttgaaaatctctcataagcttcttgatgcttttgcaaatagagctaggggctttgaataaggagaaggtattgatgaggggaggggatctcatttggttagctggtaggttgtttagcaccttgtgaatccgggaccgtcatatattggtaacttgaggttgcataacaaagcctggttaagtggctttgatgttttgtcctttgagttgctggcgaaaggggtaaaggcacacatcgtactccttggaaggacatctcacacgagatcccttctttctctccttgggttagatgcttggtggggatggtaaggagacgttcttttggaagatgaatgggttgagggtagccccttttgtttggcctatgctgatctttatcgcttgtcatctcttaaaaaccatcccatctatgactttttggtttggggggcaggaagactagtgtctttttctttccggttctgccaccacttatccaatagggagacaacggaaacaacttatcttctttctttgctcgatgggtgtgactttaggaaagggaggagggatgttcgtgtttggaaacccaacccttcgaaaggctgttgaaaagaaaaagaaaaacacaaggcacacgttgaaaaccctagtatagggagaaaaaaaaatcaaggagagtatctaaaagggaacgttgtatttggatcactattggaagccataatccatggatcaacttctttatgactaggaatggagtttagggttttcaatttggtttttagatgtaattgttttgcattagaattatattgagttttggacttattgctctcaaaggtagttttttcataagttgttttatgttgagaagtattgtaaaatttagatattgcaagaaaaaaatattgtaaattaggaagttcatgttttacatgttttatttcattttttctcttcaatgtgttctttctttctttctgcttcttcttttttggctattactgaaggaattctacattattcatataatgcatggtttatccattcattgtgtgttctttccttttgtttttaattttttggaaaagagaattttattgatgcgtgaaataaaggaagttagtagtctttcagataccaagatgtgaactatatgaaagatcactaaacggaaattaaaaaaagtgactatactaatacagagcataaaagttaaccagctctataaaactatcaaaagtaggtgaagagtcctcaaaaatacttcattatgatgtaggggacttttttggggtttctttgagcatctatttttattttactgtttatgtattagtttagttgctggtagttgtttcttgaaaaggaaactggcctctttattgataattttttttgaatggaaacgagcccctctttattgataataataaagctcaaagtacaaaaggtttatacaaagtgtaaaacaaaaggataccataagatcagtaagtgcatctagacatttcaactaggtttacactcctttactgccccaaaatgtccaggtgcacctcttgatccatggtttacatgctcattgtataattctcttgtactatgagcttttgtctcgttattaatatattaataaagaggcttttttcttttaaaaaaatggtccggaaaattgaaggctcgccaattaagactaatttctttgatggattaagcttcaaaattttctgtaaagtacaccaagcagcagtgtccctattagctgtttcaaagcagtctagccaatgcatctcattattatgaaagattctatggttttgttcaaaccaaatttctgccatcactgcctgtgataagttttcccagattagtctctaactattctttaataagggcccaacaaaacttgctctacatttaggctaaaagattctccaaaaacccaaaccacaaaaattgagaataatttccaccaacaatttgcagagttattagcaagtaaaaaacagacgctgcaaatcttctccatttttcttgcacagggggcatattgaggatgaaagcaactgtttggtaactttctttgcatctgagtccgaaaatgataacccatacaaggatgtctttgggtggtgtagaccaaagagagaattttttttgtagagaattaaaatcaaaataaaatcctaaaaggaggctaatatctaaataggaaactaaaatggatttaatcaaggattaaaccaagattattatgaatttacccatttttcctaatcctattacatcattggggggtatttagggaggttaagttagttatagtttaggtgtgaacaaacccttcctctttgggtctatttaaagagggatggttatcgtttgaatcattactaaaaattctagctttcttctccaagatttgtccaaggttcatattcacgacctcttcaaaaacaaggagaatataagagagtttcaagacaaggacaaacccacttgaaaaggaaagaagaaccataggtaaacaacacatagagggttatcccatgcccacttgtcttttcgaaattaagtattggacccttctatgagagtgtgaaaggtatgtagtaagattagtatggtattagtaaggggttttgtgggtaactaactagtggtgtatttgctattggtatatccctatcattgtgttctccatttaggttcttttgttaggtgatatcccaaaatttttacacttacccacaatgcaactaatgaattgagaaaaggaggttctccttggtcgtgctagcacaatggataagcttgtgaggaagatgccttcacttgttgggccttttgttgtattctttgtcggaaggcttggattatatcctttggtgctgtgagcatgcaactttcttttcagagtctttcttctgaacttttagtgtgttgaccgttcaacacaagaatgttagtgcaatgatggaggagttcctcctcaatctgtcttttgggaggaagagtcatttttttctttttcttggggtggagcgattctttaggtcttctgggtgagcgatataggagggttttggagaggaagacatcaaatgtttggttcctcgttgtttttacgtttctctttgagcttcgattttagaggacttttgtaattatatagccattttcttctttattgctctctttgtataaatctcttgtacttagagttcttattaataaagaagttttttgtctccgtttcaaaaaaagaatttgttacatagttggagttccttcttgtagatggatttctccgttcttgtatgtctgtttattctttcatttttctcaatgaaagttgtttccataaaaggggtgggtgagagttattctttgagtcttgtgtggggcaaataagagtggttaatgattcagagagggagctttctgatgtttggtctctcatttgttttcacgtttctctttgagctttgattttgaagaacttttgtaattatcctctaggcactttgttacagagttggggtctcttcttgtagagggatctctcccttttttgtatgcatatgcattctttcatttttctcaatgaaaggtgctttgattttgggtgggtgggggggggatgagactttatttactcgaattgaccttatgcctcaagctggctcatgaggaaactgcctgaaccacttagcctataagaccttgcaatgtgcctgcattttcccaccaccccaaaatccattgggttagattaacttctcaactaaccatgtgaggacccttccctcccctctacacaccatcccatgtaaatgtgctttaggatttggatcacacttcatggtgatgccattttgtgcactggatatgggataaaggctcacaatcgatcttgttgctcgattgatgtgctgtttcacacactatttcatggaatatctggctttagaggaatagaagaatttttggaaggtttggaagcctagctaggttttagcatggggctgtcattttggtgaagttaaatcctttattaagaatgaaatgagttgcaaatgtgttcctaataatagatacagttaatgtttgtaagtatctctttccaaacttttctgcacttgtagtctgacagtattttgcacttctaattccctgttgtatttccttttccaatggctgtttatctcatgtataatttatttaggtcccacaaatagctaatagtgaagatctcccaga

SEQ ID NO: 7490 - DNA, 766 bp, Cucumis sativus
  Intron number 1 from transcript Cucsa.118500.1 (locus Cucs a.118500) derived from phytozome v7.0 (chr-ID scaffold0099 8; pos 409265 to 410030 reverse strand)
atcctgatatccctgtcgtcttctccaagactaaggttcgttaaattggttcttcgttcgtttctattatagatgtgggactagctaatttgaatttggttagtattgaaaggtcagatgattaatgggtattggtagatgaacagaaatgccatatatttttttacatttgttttgaaatgaaacgatgaaagggggaaaaatcatccaagttctacatggggctaatggctaatgagtgagaactttccagttcaggagttgagattctgagtttttttcaattttgttctattgcacacaagacgagatatattattggtggtaactaagataaagaaagtgattttttatactatgcttgggagtgattgtgaaattgttaacttcgcttttgtggtgtttagatcacgctctgaaaaacacttgcaactaattgagcatttaagtttatacttttaaatttaatttaaatgtcatgaaaattggttttgaactattaaaaacatgttttcaagtgattttggcatgaaaattggttttgaactattaaaaacatgttttcaagtgattttggcttctttttctcatgcacgaggaagctgtttgttgtttcatagttgcttgtcatgtttgtaacgttcatgttctcatatctgcataaccccataactgcaaaacttctcatttttttttggataatgaccaagcagctcatgttcgtgacttttttattatccattgatacttcagttcttagttctgg

SEQ ID NO: 7491 - DNA, 3758 bp, Cucumis sativus
  Intron number 7 from transcript Cucsa.102790.6 (locus Cucs a.102790) derived from phytozome v7.0 (chr-ID scaffold0092 7; pos 1746578 to 1750335)
gacaagctagaatttggagcaccaacggtaagctgtgtaattaatttgctacctagaattttatcttttgaacatgaagtataaataagatacgtcactgccaagaattactaaatgaatacatcaaaggtgtccaattgcatgaaaacatcaacatgccatattctcagaaattaggacgtgaacctattttgacacagtttaaataaacagagtatatgaacatttgaataaatagactgttttaagttgtgatatttatatttaacacacaaaaagttgaagaaacccaaatctgatcttgtatcttatagtaaagtttctaataaaacctaaaaccaaaattttgtatatctgatttaacatccattgagaaaagaaaacatttgtacaatcttaggtttaaagaatgagcttgatgttcggttgtttttttttctaaaattcttttaataaataataaaaatgtattatgtgacttatgtttggttaatggtcattaagagccaatgtaaaataataaaaatttggtgggaatgaatttaagctctattattaacaacgggaagaacctaagccctttgcccctaggctgttatttttaacttttattttaatgaatatatacatctctcgttctcttaaaggaaaaaaaagaaaaaggaaaaaaagaatgaatttaagccatgatgaccacctgtaggatttaagtacatgtcccacataagttgaggcaagaaattcatggatgacagtgggcatgatcgttaactaactaaaggcttccaaaataagaagtttgtgtgatgattggggagttcctcttccatctgcctttccaagggaaagatcatttttctttggcttgtgggggtgtgcggtattttgtgtgaggaataaagtgtgttttgaaatgtggagagagaccctcgtaaagtttgttccttggtgagttttcatgtttatcttggagttttggtttcaaaaaccttttgtaattattccttaggcaatatgtttggtttttttgtttgcgcttagttttttcagtttttctcaatgaaagccatttctataagaaaaaaaaaaggaaaacttctaaaataagtagtttgtgctttatacctttactagaatataggtccatgtagttcttgaattaaaggtcacctgctctaaaaacttaatagtaaaatttcgttattggaaaaaataggcgattactggatttatgcatcaaacatcaagttggacttgggttttggtcgtgcatcattgaactacaaacagatttgcaagagaaccactcacctttagagaagggagaaaggttggtgattgtattggtattggaagaagttgatgaaggtggaactgaggaacagaagcaaagcagtgttgctgagctaacactattatcgcaccgaaccgaaaagtaaaaaaaaatctcatcgaaaccaaatcgaactgctcatctatgtcaaaccgattcgaaaaaaacactattattgttaaccttttcatagacggcattactctgcctcaaacagtaatgttaaaggggatgctttatggaaattggtaatggtgtgagcctgtgaagtaatggataacttcattggaggaagttagtccattatttaagtggagaaggggtctgttgaggagtgagactattaccggaacaaacttgagggggtggaggacttcttacctcttcaatcaggcaactataacattatttttagtatgcggacggttgggcaccatggagaaatgtgaaacagtttttttcttttttaaacggggatgagcctctttattaaagataataataaaagacacttatgctcaaagtacaagagatttatactaagagcgaaaagaatgaacataaacaaaaggacaaacgagctgatcaaaaccttttaaaccccaagaatacaagagaaaactaataataaagcagacaagaaggaaaaagaaaatccaactagaagcccaaaatcagcttgaagttcactggaatcttcaaaagtggtggggaggaaacaccaagagaaagctaacatccatgctgcttcagtatggtttgacaaaaaacaatcctgtgacctggagactttgctgaaaactttcaacccacaaaaaagcgataaaaccacaagactttgctggattcacttttccaaatggaaaaactctcttatgtccactgggtaatgttgaaaaaatatgcctcctctcatgctccactaaaatagacttcaaaatttgaatggctgaaaaaacaagatcaagtctattttatggtctcaaaccaaaaactattccacatttctcaacaattgacttctagagatccggaatttcacagtgctgagcttgcgagcctcctctgtttaaaacatagcattcatgtcagattctgaaaggtctttaatcgactagtcatccttctcggctgtcaacaagtatttggctcccttgttgctcacattaaaaggagagtcaaaatctgttacacacttcttttaagatgaaggtatcagcgtttcgctaggagaacctctcaaaaacttcaccttggaattaggcagagaaataacatagtatttaaattgaggatgcactaagctcggagggactgacctgtttgattgagaaggggtttgaatttgggcacattttgcctctaaattacaggattctgatctacaatcaactttgttttaatttttaattttcaatttttattttatgtgaaacagtttacaatgaaaaatgtctggacttgctcgcagaccaaataaagtaagactgtcgaaaatgtgggctaagtaggcaacttaaggtcactccattttagttgacttgttagagccacagactccttccaaactctggtttagatgttgcaatttctttctttgattccttcggtggactaatagcaacttgtatgaaagagatgtaatctttgatgatcttaagtgccagcattaaaagatcacaaactatggaaagggtacgtggacgaacaccaaatgaatgttctgatgtagtcgtttacgttgtgatgtaaggttagatattggggattgataaagtcttaggaaagattggaaggatgctacactttgtacttattcttttgatatgaatacagcttcctacatttcctctgtgagtacaccattcatctatgagatcactttagtacgttagtatatggattgcaaacttgccgaatagagacttagtaaattcacagaatgatcctttgcatatgacccaaaataattgccaagatgtgtaactacataagtagattattcatctacctaactattgaaagagcaaaatgcctcatcatcaacaaaatgaggaaaagggcagtatcggaactgagttgaagaagaggtggaatattcttggtagtcggtaccaacttttgtaactctcaatctcgaccttgatcactatttgaactagttgactaagaactgccaccattaagaggacctccttgcctctcacataagcattcacagtacacacagaagaagatttttataaggaaatgagaattaaaacaactctgtgcaacacacacctatttggaataatttcatttttccttaattgaactttgttgtactcactactcagtgctcttgtgttctttcataatggttgtgttactttctatttatggtctaggtgaattaaggagcacattaagtaagcacaaagga

SEQ ID NO: 7492 - DNA, 656 bp, Cucumis sativus
  Intron number 2 from transcript Cucsa.277760.2 (locus Cucs a.277760) derived from phytozome v7.0 (chr-ID scaffold0260 4; pos 357604 to 358259 reverse strand)
gctgtcaccgttaggtatctccttctcccatgctccacttcttatttctgatttattggttcttgttttagttctattttattttgggtttatttttctgacgtgagtttggatgaaaaatcagtttgaacacttgcagttagttaagtaactaattctcagcatttgaacttccagttttgttaattgagccctaaattttttcaaaactacaaaattcaaaattactcaccaattaagtacttaattatacagatatcgacaaataacataataagaaagcaaccaaaccacaaaaattcccaaacccaacttcggaaaggtaagaaaccatgctacaaaataaagcaggtgaaaagacgctccagctataacttaaatgatgaaatctaagttcatatttatcaacaacctaaagggaagaaatgaaaactaaactgagggaactaattttgaataattttaataaaattgaaggtataaggttaaaatgagtttattgagcttaattcttatccagcttagcatgagttaattacagggataaaaatgagttctccggcgaattctttaggcttcttattcatataactcttttgtcatgcatatgattgatgacaggaaagtcatcaaagagaaggcttctggaggaagag

SEQ ID NO: 7493 - DNA, 2912 bp, Cucumis sativus
  Intron number 1 from transcript Cucsa.282930.1 (locus Cucs a.282930) derived from phytozome v7.0 (chr-ID scaffold0265 3; pos 210029 to 212940 reverse strand)
gacggagcagagagccattggacacgctgatcaaggtacgattgattgaataacgagttgctgttgctgtttggtttctgtttgtctgttcgttcggttacacgaaacattgcatttgctttattctatgcattaaataattgggaaaaaaagaaatattttgtttggacctaagccactaatttagacttttatttaaaaaataaattagtgatacatatattagttgcagttttgttgccattaaactttagatagtttgagcacaaaataattaaaatgatttttaaatataacaaaataaacaataatatttataaaatatatcaagatgtcacgatttattggatgacataatacataaatataatgttttgctacatttataaatattttttgaattttttgtttgatgttcatttttaaaaaaattatacaatatttaaatttatataattttatatatttgagtattcaaatattattatttaagaatctaatttttacaaactatgtaagtttttgggtcaaatttcataaataaagtttaaaattactatgctacttgtgagattattatttattagtttgtattattctattttcaaatgaggacttgttacacaaaattataagtttaccattttatcgacaatttttttttgaatttaacttaaaattttaagttgtcttaggttaatttttttgaatttgctaaatactcattagaggttaaatttgaaattcaaaactctagagttaattgttaaaccttcaaagttaaatttagcaagaattatttttaactttcaatattatatttaatatatttttttatgaaaaattattatgaataacattttacaaaaatatataaaaaaaaacttaaatgaattaaatagttacaaaaatatatataaaaacttaattaaattaaatagagtttaatgagtatactgtaatttataattagtttgaatattttactattactctatattttaatgttaagaaatacaatcttcaacttttagtttcatcaactaggtttgattcgtgaaaaaaattgttgtgtttaaagattgagatagttgcaaatttagtaattagatttaaaataattaagtatataacaacattttaaaaaatttgcaaatatagtaaaatttgtcaaattctatcaacgatacaaatctattagtaatagttttgctatatttgtaatttatttaaaattttgttgtattcttaattattgttgaaatgattatcaattgtaatttccgattaagatttattaattccaaatcatgtttaaaaatctataaaatatgtatttattgaatattaattaaaatttatccgttttattttatttatatatatacaatgaatcaaaatatttataaaatataataaaataattttagattttataagtaataacgtttccataaaaatggatagaatttaaaattttattagatatgatagtttgttaatcttgccttgttaaatatccttcaaccaatataatttagatgtggagatatttttatttttattattattattattattttattttgagaagatgtagagggaaattatggcaagtggggtggagtataatataaaataaaaaattacgaacaaatttaaggttatcggcatttaattaatcccgatcacttgttaattggaatattaggataaataaagatgggaaagttcctgtagactgcagaggcatctgcgcaaccctatccttaatactacaaatcccaatttaaaaaagataaatactctttatttttattttttaaaagaatattaatttttgtttataattaaactacgttgaataagttcataagattcttgttaatggtatcacgagagagattttagtggggaaggcagagtaggattcccatagagaatttatcaaatgcatgttatatattgaaatgtgtggattctcttcccaattctatattaccttattctaattactttattcctactaattttaatatgtttttatatatatatatatatatattatttgcttttactagatatattttttgagttcatggatgaacttataaacttttttaattattatttatgttttaatatgttgttggctgtacacttgagcataatagttggttggagataagagaggttgggttgaggttggtttgaaaaaattcaatttgacaatattctaaaaatattttaaaggtttaaatggactcaaactgaccgattgtccaaccaatattcgatttgtacttcttcgtagttaaagttggtttgaatatttactaaactactagtgtcggattagtgtcgatatggttggaaccaaccaaccgatactcacctctattgaatttttgtaatatcaatagttagtagaattgatataagtttatagactatatactttaacgtttgaacaaaaaattctctagtacaacaatcgtggggatggagatcaaaccttctgcttccaaaatgaaaagttatgtcaattaatagctgagtaagttgactttggtgtttgagtctgaccaaatattattctttgacaatttgagtttaccgagcgataaattttcttctattaaaccgacacttaaaaggtatttttgataaaattttaactcgtatatggttttttgtttttacttttgaagtacaaatttctttgttttgctattcacttatggtatgcacggagaatgattcctaatttcttctttggtgagccggtcacaatttttttagtatgaactaattactgattttagagttgatttcaattaatttttttctgatgaacttagtttaagatacaattatcttaaaagttaaagttgaatcagggactacacaaa

SEQ ID NO: 7494 - DNA, 1296 bp, Cucumis sativus
  Intron number 2 from transcript Cucsa.050040.1 (locus Cucs a.050040) derived from phytozome v7.0 (chr-ID scaffold0055 1; pos 182955 to 184250)
aagtatttgggatactttcactaagaaccacccaggtctcaccttttgatttccccatttaccaaaactttaaaataacttttttctttaggtttgataatttttaatttaattagtatatgtatggaagaattttagggttcaatatgttgtatttactaataatttagttttatttttttctcttataagttaattaagcttacaaatacttttctaactactaagtttatttcttatctagaagattttgtttagtctactctaacttgaaacttactggaaaaagtaattaaaatataatacatttttaatattttatttaaagatatgaaaaccctagtaaaaaaaatagtgatagaagtaaaattttagaaaaacataaaagcaaaaaataaagttgcaactaaattaaatgggtctacataacttgattttaaactatatagtagttgatttacataatcaactaaacagaatatcggatcatttctacataaattatgacatatttaaacttaaatttgagattgaaattttaatatgtaaagaacaaatcaaaactataaaggatttatcatttaacttgtaatgttatcatttatttgatcaacatatacctcaaccaattttatttgattaaatcaacaaacaaccaattttatttgattaaatcaacaaacgtatagtttaaagttcttcaatttgaacatttactatgtcgatcgtcacctaactcagatctactaatgtttatctctactagtattataaataaatgaaaagtgagaagaaataaaatgtctttttaaagtactcatcttttatgcaaaaaaaaactattttaatatatattttaaaactaccttagaagtaatttttccttttttaaaaagatttttagatcacaaaagttggtaaagaaaatagtgtaatggtaataatttagacaaacaattatttaaacttagttaaaatgttggttatttattttagacttgaattaggtatagtttgtcaaattttttatttttagaaatatctctcatttataggtataattattttcaaaactagttttttccaaatctgaaaacaatggtttttttaaaatatgtaattatattaaatgaatattattctctgagaagatatataatattatgttatatcaataaaattctttacatttattagtgtttagatgtgaagaaaattaatttaattcttttaaaaattgtgacggttctatttttgggatattgacgaagagaaataaatgaacacagaaaaaat

SEQ ID NO: 7495 - DNA, 4163 bp, Cucumis sativus
  Intron number 7 from transcript Cucsa.005270.1 (locus Cucs a.005270) derived from phytozome v7.0 (chr-ID scaffold0005 5; pos 332651 to 336813 reverse strand)
cattctagaggtagacttatgttcagggcataggtttttcgacaatttcatatttgatcaggatgacaactatttgaaagctgatggtaaaatgtttttggtgatatctttgcctgtcatatcttatttcatataggcttatagcagaatggtagggtgtgcttttttaatataagtcctggacaaggagaacaactaatcttggggattggtagcacaattctctggttttaagtcaacgtgtggtagttgagaaatgtggttggtacaattgaacatgtgtttggatactcataaaaacgagtgtgtaccttaggaactaagaagcatggacactgacacaggaaatgggataccttaggaactaagaagcatggacactgacactgacacaggattgagtacacattatttttttattttatttttattctatatatatatattcaaattctctattaattattaaaaataatatttcttttaaaagtaatgtataataaagaaggaaaagacattttaaagagaagtccaaaacctattttaaaatgacccaaagtgaaaaaatgtaggcccaaaaacctatttaaaggtaaaaatcctaaccctaatgttgtttcctttcccttcactattctctttaacatctcgcacatctctcctcccttattctgcttagtgctttccccctttcctcctagattcttctcaatgacgccaatctcatcctttgtcatcgttcaattggacaacaccgacttcccctcccttcaccgtcactcaatcgagtaaaaaatggtcgtgttaaatttttaacaaagaattacagcttcttgtgtcctgaggtgtcatctgcatgtttggccatgtcgaggagtgtcatgcctttttggatactcaaatttcatattaaaatatttgttgtgccagctggcataatgggcacgtgtgcgaggcgtgtctgtgtttgatatcgacactagaccattttaggagtgtctatgcttttcagcttaagaaccaaggtagtaagagatgcatttgttccacattggttagaatgggatgaccaatgtggtaattaagtggtttgactctcccacccgaatagttgacttttggggtgtagttctccaaagttcctaacagtggtatctattaaaccactaattcacccaaaagctcaagccggtggttgaatgcaaatttaattatatatcaccaacactctctctcacttctaggcatgaaatatttggaaaggctcagcaagtggaaatcgattttaattggggaggaaacaagaatgtaggggcttgaacacaggatccccctggaccacctgctctgataccatattaaaccaccaatttacccaaaagcttaagccagtggttgaaggcaaatttaattatatatcaccaacaatatcaaaggtagctctcgatgtttcgaaggtggaactggtggagggttctaactgggtggttgagtgaagtaccatcgtagtagccacttggacatcgggtttttgggggatgggagtattgttaggaatcaaagtagtgtggaatgcctttgtcataatggttacaatgggatgaccaatgtggtacttaagtggcttggctctcccaccccaatatctagcttttagggtatgattctccaaggtgcttgagtacctaacggtgtagtctgtcaaaacttgtaaaccaccataaattagcacaatgatcaataaggataatgtaaataatgaaggtttagaccaaaaagtaataagggtttattggagggaataagttaaacacattggtggccatgcacttaaaatttaaatagcttacaagttatcttgggaaccaaatgtggtagtgtcaggtggttttcctatgagaatagtccttgtacgtaagctggcttgagcatttatgaatgtcaaaatgaaaaaaagagaaaaatggcatgactatgtttgatatatgctctataatcttgtctagccaatgtgtctacaagaaagtaaattataacactattatttgaaattaatttatgaactaaaataaatgcatttactttttccatatatattctctaagttgctgagtggaagtggagatgtgtccagagaacttcccatgttgggagactcccaagtctcgagtcttgttatgtgtggttttgataaagctttgatcaatgaagtgttctatatgcccaccatgcatacatgcatctctcctacccctctttctagcttagttatatggtgatcatgtgagttaagtgccctttggaagttcatctagtgtttcgagtgtctttgtaggtgtattaggcaaagttcatgttggctggtcgagggataccttgatgccgcacagggttaaagggcaaaaaatctatttttggatttcaccccgttgtaagtgataatcgagccaggtttgtcaaacctctaaaactgaccatgagcatgatgggaggttagtgagtggtgagaggtgccaccagggtaaaaaggttcgtcagtcccctgaaacatagaccatgttaagactaggtcaaagagacttgggggagatcaagtaaaaatgtgccaatagctccacttgatggcgggcaagtggtgggatgccaagagcctctgccttgggggaggtcgagcaggacaaccattggcccaaggagtaggtccaagagggacacatggcaccctttgcagtggtccaagtggtgacacgtgacaaagattcgacggagctagagaggttagtggtcagggcttgtgcttctatggcctgggatattttttctctctagctccattgaatatttgccacattttcaccactttgaccgcttcaaatgatgccacatgtcacactttgatctactctgttgggcttaagaatggaaagcgttgggctccaaatgtcccttgggctcgagacaaagtccatgtgtgtctgcctatcagcctctcatagcactgtctgagcacacaattggctcccacccactctggcgtgcaccatcctttgatgtgtcatgtgtgtcttgcgggtgcctgtctagctgctcttcctgatgtcgtggtttgcgaccctgttggcgctgtgctgtgcacctcccatgactcatatgtcctgtccaacctcccccaaggttgaggctcctgccatcaggtggtgctctggcatgtcttgacttggggattactgtgcacttgagttttggggattactgaggaaatgttgaactcatgtccattattgaaatagtgctgactgaaagctcatggtcatgataagtttccagaaattccaaatacataggaaaggcagaacgagtgaagttgataacttttgtcacgatcttaacatccttcttatagacttttatatatctgaatgtctgtcttgatatactcttacaaaattggctgaatgtgttaaatgttttgtcctgatgcttgcaagacaatgttattgttctctgtagatgttattgtccagacatgaatagttatttcctctaagtggaaaatattggaagttcctgatagttgcttaataacttccctctctcgttttctttccttcttatttcctcttaacaattttgtttaaggttacagttatagatggtatctttttgcatgttggccttgtgagttttcttatggagtatcttgcactaagacctgcaaattagaaattattttggtcgaatcggagcgacgaagggctaaatctcaatggatcgtggcagcaaggccactctgccaattacgataccctacaaagtagaaatgattgtgattagtattttcttgtttgtgttgaatagccttttgtccggtttttctctttcataattgaagtacaaagaatatcttgttggcccgaggcttaagatatagacatttgattgaaaagtatttttattacttcgtggaaaatatgaaagcaatttattatgcaaacactataattgataacttgagcttaatcgttgcaccccacccacccacctgatgacatttattttctggaagtttgaatattgacttgatttttaaacttgaacaaatattgcttcccgttgttagcagttgattttaaagttttcttgcttaactgcaggtcatagtc

SEQ ID NO: 7496 - DNA, 686 bp, Cucumis sativus
  Intron number 4 from transcript Cucsa.153630.1 (locus Cucs a.153630) derived from phytozome v7.0 (chr-ID scaffold0112 4; pos 661945 to 662630)
acgttgcagaaccggtcgtcctcctgctgtgttgggtatatttatttcctaaccatcttatttcaaacattttttatagttcatataaagattcttaacataatcgatcggttcttaacacacgacacatcactagcttgataaattatagttgaacaatttaatgaattacaaaacgatggataccttcttatgtaatctattagttagttgtgtcatcctagtttatcatgtgacaaattcctccttcaacagtaacattaacatccaagatctaccaaaaccttactcacatacaatttattgtgcgaaaatgatgtttaagaaagtggccaaatttcttaattaaaaaaaagataaaaaaagaaagaatcaactcaagttgccaaaattgatcaccacacattatgacgttacgttgttaattctttaatcatgtttattttaaaatgcagggaatctaaaaatgaaagtaaagtttttgtttgatttgacttttaattagttttaagttttttgtaaatcaattctacaaaaagaaagtttgttgttataaatagtcagaaaataagcaaaatgtaaaaatcttttttaaaaaaagacacataacacattataattaattgagttacttttgatacaattgtttagatccaagttcagaacgaagagttgagggaagcttt

SEQ ID NO: 7497 - DNA, 933 bp, Cucumis sativus
  Intron number 1 from transcript Cucsa.252350.2 (locus Cucs a.252350) derived from phytozome v7.0 (chr-ID scaffold0222 9; pos 1272570 to 1273502 reverse strand)
atatctgaatctttttgctggaagcttgaaataaggtagttgattatttgcagtagatctccacggctctgcttcgctctgttgatcgattgctgatgattgtgttacttgaagtggaatttctagcttggtagcttcggatttttttttcttctagatatacgattttcaaatacttggattctgtttagttttagttcatttcctgtatgccacttgaatttgtagttgagatccttcgctctgttaatcgaaagctggcgcctgaaattggtgcttgaagtggaatctttacgatcccaatagcttttggtttttttttttttttttttctataatatatgatgttcagatatttgatttcggtttagctttagcttatttccgatatgcgttcgattttttggttaaaatcctttgctctattaattgattgctggcgccttacagcgttgcctgaagtgaaggaaattatagctataatagctttgatttctgtttcttatatatatgatgtttaaaactcggattctgtttggctttagctcatttcctgcatgcacttaaatttgttgtgaagatcctcggtgattcttcgattatgtgcatatggtgaaattggtttttcacaagccagggcttcattatgtgagttaagagccgccattgaaaataactcggggacaaggaagctctggacagcttatgaatttgtatctgtgtgataatttgtcatgacgcccatgccccatggcagtcaaaacttgttgtaatttatgaagggattcatttttttccttatctagtctagattttgatgatttgaaaacaatttagtgcaccattttgatgtgagttaaatattaatgtctctgatttgaagcgtaactctgagtctctgagtggcgaggtatgcattcacttgtttgcagg

SEQ ID NO: 7498 - DNA, 3778 bp, Cucumis sativus
  Intron number 3 from transcript Cucsa.022890.1 (locus Cucs a.022890) derived from phytozome v7.0 (chr-ID scaffold0032 0; pos 194816 to 198593)
gccttgggaggcgggtctttgatatatatattcaggttatctttcttcattcttaccatatagtttattttaccataaatgtaatatgaggagtctcctactgtttggcaatggaaagaagaaacttgttatcttaagtttggcttacaacaaaagacttaatctacagtagacactggttctagagagtactttaaatgcgtatgattgtattttcaagtttggtgcaattgcttaacgtttttcttttagagtcattctaaaccaccgtagattttaagagaagcatacatttttatttgtaagattagaatagaagtaagctgtcatttgtcgtctattacttttagtacaaaatgcaccttcttaaataggaaaaaaattggacaatctaactcaaaataataacgaatctagcatcgtctaaacatatttgtaaacttctgtctttacctattttgtgtagaacttcttggaggaggattagattgaatggaaactatgatactttattagtgaagaggtcaaagcctttacaggcaaattacaacaaggctctcagccagccaactaaccaacaaataacaaacttaaaaaacaaactcgatcatgagtttatacaaacaaggtataatcatctagagcatagtaaggaaaaatatcagtcacgttgaatgtagagctgatgttcatcgaggaagggaggtccacacaatagacattttccccaaacttttccaatgtagggaaaggtccacagtcttcttgacatggataatagaccatgacaaaatcctcaaaattctgattttttgaaggtaaaagattccctaggcaaaggttcttcatcttcaattaggctaggcattcagaatgcaaaaatgagtaccttgagtgcagaattgattttagatcaaaaccctgattctttgtaggtatattgaacacaaacgcaaatttcttctttcaaccggaccagtctctcagagcacttgccatccacactttaaatattctgtttttccttaccttcctcaaaagttaaatttttgaaaggctaccattggcaaacttcgggacctccttcaagaaagaaatgcgatacagattttgactctccttttagcgtgagtagtgaggaagttgatcatttggtgaagtcaaatgggctggaggatcattctttgaaggaccttttagaaaatgatctcaatgatttgtttcagtatgtatgaagagaaattggatgttgaaaaacagaccactagaagtcgctctcagtctcagcgttaacgatattccaacccatttttttttaaacggaaacgagcctctttattgatattaataaaaaagactaaagctcaaagtacaagagaaatataccaagagcaaagaaaaactaaagaagtagatgcaacataaatctagataagagagaacataataaaattacaacgagctggataagatcctctggaacccgagcaaaacaagaagaattagatacaaagaaaaatgaaaatctttcaacaaggagccccaaaatagctgaaaacttgaaattgcttagaaaatgaatggaaaggaaaacaccaagaaaaggcaaccagttacaagcttcaagcttgatttaaaaatacaagcctatgccatggaagacttactgaaatctttcatcacaccaataaaaactgcacgtttactactgaaaaagcccactaaagctccaaatcgttgaactgaattctgagaggaagaaagaaagaaatacatagggaagggccaaacgtaaaatctctcactttacaaaagccattatcttgcttcaacaatcctgccaatgcgccctgacaatcactggagagccattcaatttttcttttgttttttttgaaatggagacaagcctcctaaattattattaataacagaggcttaagctcaaagtacaagagtattatactaagagcaacagaaaagataaaattctgtctacagctacaacaaaagctaaaatacaaattccaaacataagagatcaagctaaataaaaccataaccgaagaaatctaaatacaaaacataatgcaaaattctttcatcaagaactaatttgaaactcaaaacttgcaagaagatgcaacttggctgacttaaaactacctagccaaattattccagaatctagaggaagctcgaaaatgtcttccactacttcaacatcagcgtgaaggatttacttgccacccatatgaagggaaatccaaaaaaaagtgaagttggtctaacaatgaggaggaatacattaaactcctgaagaatcaaattagattacaataattccacgattagcaactattgattttaaatgatccgatattttgcaagaccggggacaagaacgagtagcaaaaggcaaatttgcagatctaattttacaattagatctatttctagaggctcaaattgtttctgactttcaagctaggttgacctatccaaattctctaattcctcactactaacgttgatactacaagaagtttgggatctcccaacgcataaagtcatcgggagatatacgaaaatgcgtcaggaaaagatctctcgacgcataaatgtgcgtcgggatggaggtcgggcaaaatgcatcgggagaggatctcccgacattgagaaattcagcgtcgggagattctgacaactctcgatgcagttttcagcattgggagttgtgtaggatcttcgatgctgaatattaatgcgtcgggacatcctattttttttttaaaaaaataccttccaaaacagaacaagcagcagctaccaaaataccttccaaattggtaagcaaacttccattgattaaatgaaatgtacaagaaaccaaaagtatgaagaattgcccgaaccattcttgaagcacaacaattatgctactaaatagaagcacaattatagtgctacttaatgcaatagaataggataaaccaacattaaaggttcctaaaaagtgtctacgtgacaatttaactctcaaaacagtcaacaaaagtatctaaaaacaccttgactcccaagagttgaaatacttacaagaatgacaattaatttgctgagatgggcacaagtttcataattggagctctcaaattgtttagcctgaataaaaatcaaacacgtttaattctagaatcaattacacaacccaatgccaaccctcattctacaaatggaatccagtgtattcaaacacgtttcaatcataagaagcctaattatccccttaccataacaaatttaaaacaccctaggacaaaatccaaacacgccatattgaaaggaatgctttcatctcttcggtccaacatatgtattattggcatcacactttttgttatttttggtatgttgtatattttagtgctagactattttctctatatctaagatgtttccatttcaaaaagggaaaacaaaaaaaaacaaaaaccataagcttttgggtcaattggtggcttaacaataatatatgtttttatgtgtagttgtccttgtgattgtacattccttagtttaaggttctcttgtagacctatatacatgtggctttctaatctaaattacgagtgagaaatttcttacaaattgaattctcacttgaaattataatgttttccatctgtttttgctttgatctattattctgtcttgtttgagcttaagatctttgtttctagggggaacttttccaggaggattttagtattcaaaa

SEQ ID NO: 7499 - DNA, 787 bp, Cucumis sativus
  Intron number 1 from transcript Cucsa.278220.1 (locus Cucs a.278220) derived from phytozome v7.0 (chr-ID scaffold0260 9; pos 44918 to 45704 reverse strand)
gaattacaagtatgaatattattcaatttcttcttctcctctgctttcatatttcgagacgtaaatttgaatattggaccaatgattatatgatttctttcgtccatttttgtagcttgaaagttgaaaatttatatagatctcgttgattattggcatgagaatcgagaaataatagggagaacgtgttttacattcctttttccttctgtccatgtgatgaattagatgagtttttttttggtcaatattgaaatttcaaccaatagatgtgttcattcacgcctcctaaaattactcgtgaaagcttttcgattatccctgcgaaatattagacaaattttttcctcgttttcgttctgaagtttgtcatgaaactgggtagatatttccctcttggttaacaagtatatacagggcctttttggagagtgaagaaacattcaatctttacttatctcatcacccatttttccagttcattatccttgtttttgttcttgatcttattcttgaatttggaaccgtgctgtataatcgtcctatgcaccattttgttttggataattctggaaatatcaacatggtaacattctggttcgagttcaagtagtttagttttgattttttgaacagaattttgtgtgaagactgaatttctggatatttcttaatatatgggttttcattttttcttctattgtaaaagaatgaaaacaaatgtttgttaacttatcctctgattcttgtagaacactgggggaggtctctgttctgacaacattag

SEQ ID NO: 7500 - DNA, 3969 bp, Cucumis sativus
  Intron number 2 from transcript Cucsa.058620.1 (locus Cucs a.058620) derived from phytozome v7.0 (chr-ID scaffold0061 4; pos 739353 to 743321)
ttccccacaggttacttactctgtcactcccatcttggctcctcaattgtaggaaacagcactgtgtgtgtacgcgcacgcgtgggtgtgggtgggggttaactgttatataattcattgttagtgggatcccttatgcctatgtattttatccgagagcttccaaagtatgtgtgtgtatatataccgaaatggaaacgtcactttttattgatgaattgaaacagactaatgctcgaattaaaatgatatataactatatggaaataataataaaaaactatgggatcaacaagtgcactcggatatctcggctaggtcaacacaccaatagcaccttcatcacatcccaatacaaaaaaaactactaataaagttggttcctcttatggatgaaggaaattgtttttgggaaaatgttccttgcaggtagtgattttttaggccttttttgattgtcagtcaggtgttatttttatgaactggaatcaccttttgtaggttgaggctcctcttatgtttgcactatttgtaatgttccaagagttttacgaaagggggattttgaacagctctttgatgaaaacttttgtctgtttgatctcgaaggagactgttactaaagttaaggagttttgcccaattagtcttgttacaagtgtgtaaaattatggggaaggtgttaactaatcatttgaagagggttctgctgtcaacgatcttggctgagcaaggggcctttgtggctgggaggcgaatccttgatcaagcgcttgttgtcaatgaggcggttaaggactatagagttaaaaagaaagaatggttgttgttaaagataaaatttgaaaaagcctacgaccacgtggactggaactttttgtataaggtattagaaaggaaaggtttcagctataagtggcgcatgtggatgtggggttgcattaggattatttttttcttatcaatgggagccctagaggtaaggtgcaagtgtcgagaggtatgaggcagagtgacctactttctcctttccttttttctcatagttgttgatgttcttagcagactcgtcagcaagtgtgtcatttgtaacttgattgagcccttcgaggttggtgaggacaaaattcccctctcccatattcaatttgcggatgccactcttttcttacgttcgagaagtgagagctccttcttgatgttgaaccacattcttgttttctttgaggagatgttggagcttaagatcaaaagtgaggaagataaaattcaaagatgggttgtgggttgagaagttttcccttttcttatcctggcctccctcttgggactagtccaaagtgtatttctttgtcggacttgatgattgacaaagttaggagtaggttggcttcttggaaaagtaattttttttctaaagtgggtagtctggttcttattaaatcgatcctaagtggcattccgatctatttcttctctatttctagatccccgggggaggtgtgcaactgtttggagaggttgatgtgtgatttcctctgggaaggtgttgatgaggggaaaggaaaagaggctcatttggtcagataggaggttattgagaagctggtgactttagggggtcttgacaatcctagggcctcaaacaaagccctcttaagcaaatggctcaagcgtttctcctcgaagcccaattctttgtggcgtaggattataactagtaaacacgatccctatcctttcgagtggttgggtaaagggattatcgacactaacctgaatctttagaaagatatttcgaaagagcttcttgcttttattccttgggttcattatgtggtgggggatggaagaaaaacatatttttggaaagaccactaggtgggggaaagatctctttgtggttctttcctccgactgtatcattattgtcgcttaaaaatcactttgtgtttgatgttcttatgtggacaaggtgctcttgttctttttccttttggctttaggttcagtcgtgccttttcctaagggtaacagttgatgtggttgcctttctttctcttcttgagacccacccttttcgtcttgggaggagaaatgtgagagtttggagccccaatctctttggatggcttttcatgtaagtcctacttccagtgtttggtgaactcttctcttaagggtgagtgtgaggccttgtttggaatagaagggtcaaatggaaataagagtttagttagaacttttgaattaggcgttttgggaagaatattttgaagtaggcgttttgagtgttaactggcattgaagcacgacaacacgaggtgaagaagtttgcaaacaagactaggaaggtggtatgaggttcaacgcaagctgaagtcaggctttgagggataggaattttctgggaaatttcctaactatacttaatgggccacgtgtaagagtttaagctaagcatggtttgaaaggttattaagcttacacgtgtagtactttaagcaggagttggcgagttaataagagcttaagggtgactaatctaattggggattagtatatataagtgaaaaggtcagtagaaaggaggattaagttgacaagcgtgtctgtgtcctgtgcttgtgtccgtgattcttagccaacaagcggttcggtcgatcggttcaagcttctaacagttagtggtcggtttcacccatttggtcggtttttcggtggcggttattgtacaaaaccgcccccaccgaccgatgatcacccccttgtgcacttttttaaacaaagagtttagtgcatataaaattcaagatttgtgtttgcattggccagctttcacctattatgttttttttgctttttatgtatcaatctcatgtgttttcctgatgtttttctttgtttcatgctttttatgaatttttattatataacagttttctgtttggacatgatgtggtcgctagagggatgtcaacctagttgagatgtacgagtgcatcccctgatccctaggtctctctatttgtgctcttagtatatatgtcttgtacttcgagtctttattcaatcttaataaagagactgtctccttttcaaaaaaagaataaaatccaaggaataacttgtatgcatatgcttcatatccacgtgcaatttgctccaagaaatatagtcgtccctaccccctcacgtcaatcccacaagcctctatccattctcatttgatcatgaagggggagcaagtaaagatagaaaacttacattgggtttacggataatcaagctcaaacttatggtgtccaccagtactctttaaggcaaagggttgagaaccctacaccattattcttgaacaacttggaattgaacctttcttctttttttctgtactattacgaatatgaaaatgaagataatgggcaaaattggattcatttgtcaacaactcctgtctcattcttttggattggagcccttttgtgcagttaattttgagactctttctgcaggctttatttttgcaatgttcttgtactttctttcattcttctcaatgaagacttgatttcttgaagagggaaaaagaagaagaagaagaagaagatgatgatgaagaaggggaatttagaaactattcaaccatcggcactaatttttttggaagattgttttgagtttatgatatattgtcttaaaaagtttctcgtaacaccataaggtgggatcatattttgaattataattaagagtagttttgaaaattaaaataggtcaaaatttccccaaacaaccatttttcaagttttccctctttgttctaacttgtttggaattcttgaagttgcttcttgtaggtcctagaagctcactgtttttctttattccctaaatccttagtgatatattaactttgtgaagttcggctgatatttagaggcatctttatctggtgttgagccactt

SEQ ID NO: 7501 - DNA, 2545 bp, Cucumis sativus
  Intron number 2 from transcript Cucsa.131260.1 (locus Cucs a.131260) derived from phytozome v7.0 (chr-ID scaffold0103 2; pos 117812 to 120356 reverse strand)
cagcaattggcatctcaaatttgcttcctcccaaggtatgtatatcgaaattaaaattaaaataacaccctacatataattaactttgttactattttaacctacattcaaaattatatagttcactattgtgatacttgtgtatatgttatgttcaccatccaattacatatatatatatataaacacatatagattatagtaaccagtatgattatcaatctttcatatacttacaagatattcaaatgttgtaattatgcatcaattattcttttgatttaattttaagtttttgaaattaagtttgaagattcatcgatagatttcttttgctttattatacactttctattgatgttttatcgttagtagattttaaccctcgttttattcttccaaataaatttattaatttattaattttctatcgattttgatggttagaaaaagaaaatgttaataaaagtaattttaccttctacttcatggataattttacatataaaaaaaaccacaaacattaaaaaaaaatatattacgtatatataattataatataatgagtagacatgttaattgacttatctaggagttataaagtgtttggactgaggtgtgaatttactttttgaattttttgttttttataattttttaaaaatatatattgttaatacatttggtggatatttttatgaaaattaaaataaaatataatttaatatttttattactaccagcattttaaatattgatactgacaatcaatcatatatatatatatccattgaaatgagggctttagaatgatgtgtcaatattttaagaatttaattattacagcccctataactcaaactcaaaggttgtttttgcaaaatcaaatgacaaaatttgagaatatttttagggcagatttcttaaaccctacaaaaacctaataataaaataataataattgtattgaaaattatattttacagaaatttgtgatgtgagatgattattaatgtgggtttttgtttaagacttctgacatgctattcttttcttttcttttcttttctttttttattttttggaaatttgaaaaaataaagaaaataaaatgtgcattaatgatttaaaattataaaaaaaaaaaaaaaaaagaatgatgttggatgggatatgtttcatgtttgagttacaacttctgctttgtctccctctctatggacctgatgtgatgctaacctttgctttttcccccctaaatacatatccactctatttctttctttttgtttcaaaaaaaatatataatataatattcaaaaccattattataaatcaccaacagcaagaatgtaaacttctatacaaggtttattttaatacttaggggcttattacatctaaaacacaataacttacaatttatttatcaaatccagtatccaacttatttatgtctacactaaaacttatcaaacactgatttgcctcatattacaactcattttttcttagaacattgtttttagaacttttatttttaaatttaacataccaaatccaaactaaatcttagtctaggtgtgagcactcttttaagttgtaaaaatatatttatatagtgttttttctttcctttttttgtagcattaagattattattattttttagacaacttcaataaaatgaaaattcattttaaagaattaagttgaaagattttgattgtgttgttagggccaacacttttaagtgggtagctgttggccggtcctatgttgagtatgaaggggattatatgttatcattagtgtgacagaaaactagaagattatttgttactctcttaataacaaccaatatgattgattattaatacaatctaaacgtttgggttgtatatatattaaaattattcaatatgttttttttgaaaaagttaaaggttttatttcctcttcctcctaaatttaataggtatcttttttatataatttctaccttttaaaatttaataactaaggataattcgagtgaaaaaaactaaaatgacgttgcaaggtacgagattacaacaataaaaagaattaatacttataataaataagaaatatttagatttgaaagttattattattctttaatttatgtactttttggaagtgtttgaccgttatccatttaagttgggtttattttgttaaaataacctaatttgacccacggatatcctgacttagtgtttagataattatactcaatcaatttaaatctttcttaatcaaaaggattacacggaaattgttgattattatttaaccattccctattatcccaatacctttcttaattaaaaggattataggagaattaataactcaactttgtgtctcgaacacaaataatactatatgattaatttattttggtacttgaaccaaaacaagtacactgtctttaaactgatttttttagaaaaagaaagaaacaaaagagttaaatttgaagaactaaatagaagaatatggaatgcaggtaaaggag

SEQ ID NO: 7502 - DNA, 4047 bp, Cucumis sativus
  Intron number 2 from transcript Cucsa.124780.1 (locus Cucs a.124780) derived from phytozome v7.0 (chr-ID scaffold0100 1; pos 601865 to 605911 reverse strand)
agattgcacgttgcctcaatagctctcattttcaggtttgaaattaaatatttcaacgttctattcataagcatgatttttatgcctaataatagaaaatattcccttaaaattttgtctcaacatatatatgcatatactattaatttgtcttgctgacagtcatagatcttatccaaactgtttgcccacgctcttaataagagaccaattctaattgttgacatctgggagtaaaattacttatttagaattttctttgttttgtttcttgcaatattagatgttttattttgcttctgtagtttgattttcccatattagaatttgtgtcggatccattttgtctattcctttttatttaaatcataaatgtactttctctttctcccttagggacggagagggaaagagaggggagggggggagctacagttgttttttaacctctcaataagaccaatgcaatagttaccatccacgccatttataagaccatattttctttgtttcttataaagaaaaattctttgtttttgtgtctcgcaagatttaatgttttgtttatcctttgttgtttgatttttcatattagagtttcttgtcagatttttttgtccctgttttttaaattataaacatacctttaatagttattatactttaagttttccttttcttcttgctacatttttacgttagtaattttacttaaaaaatattgttagttttttttattgactttggtgggggatgaattggatgaccgaagtagaggcaaacagtgatgtagtctgagtaaactcaaggagaagtagtcggttgttgaatttttattagaatgaataatgtgtttcatacaataagactcctatttatagaggtctattacaagtgggggaaaaatggaattaacctagaatattacctaattacccaattaacccttagccttcttacataaaacagcctctggacttgtggtcgcttcaatccttcctatttcctgatagacaaggccaaagatggttaaacaaataaacaacaatgcactctagttctaccttacctatttttttaagatgtcttttcttgttatgtacatatatttctttatttttggaaggctgtttttgttgataactgtagatgttcacccgttctacgtttattggttggtttattcgaggatctaaaaaaactgaaggaaactcctaacacgtgcattgtgttttcattgagttggccttgttcctttttggcacatattaacctatttgcattagtgttattttcttctgcttcataaaaaacctgaagttctacccagatctggttttaatgaattttgttgtggtgttatattttttgtaatggttggaatattgtgcctttgattacatatcagttttcttttcttctgcttcatggaaaaaccggtgttcttccccagatctggatttactgaatttgatttttgtgttatatttgttgtaaagtatttgggactattgtgcatttgatacatatttcgtcttttcttacaataacactttaatcaatttcatgaattccttttggtgatgattattgattataatccttctagttgtatagttcttcttcctaattgaaaaatctcgatcaattctgttattgttgaaacttagatacctacatattttatctggggatttactttagatttacggggattccttttctcccagtttgatgaccattttgtaggtttcactaactaattattgtggggtttttcaattcttatcccctatttggaggtgtttttaatgtaggaactccaggtgttgttattgtaggttggttgctattatgtgacacaatagtattggctggaggggtgatgaccattattttggtctgttaattggaaaagaaatatttcggtggaacatatgataatgaagctaaaaggccaaagctgtatcaaaatctatcttcaatcacctcagtgaaaaaagattgtaattataaaaccctgtgtttgactaaagggagagatggttagcatctcccctgagagggttgggaacagcctttgggcttccctgtttaacacatacggttatagaatcctttgctgtgagagcaccaagaacaaacaaaaactataatatgattccaaatttggcccaaccctctgcttgtttttttattcatctttttaactgactttcgtgatgaagtatcccttgaagcattgaacccaaggttgaacatttttttcttgaaatggatggctgggtaaagaagtggtgaaactgtaaaaatttctctattgcaaactacttctcgaccaatctgggaaccctagtgccagaggatagtagcaaaatggtaacaaaaggaataggtggtcttttcctcccttgttctgcacaaagtgcatgagccgaggacaggttcaaatttagtctcacatctccttagaagagacacattaaagccgaggatagattgaaatttaggaatctaaattttaacttcaggcatctcacgagtctagtctcaaaccttagaagggacacccatgaaaggtgactataggttcaaaattcattctaaatttgatcttgaagcatctcacgagtctcaggccttctaggaagggacacccatgaaagaccattaggatccatttcatttgcagcttgcattaaattattctggatgccaaagatgtttttttactgcaaatccttcaaagattgtacataaataattatatgcagttattttaattgtgtaaaaacatttataggccacttaatttattggtctcaaaaaagtaattttttaaattgttaataattaggacatcatgttgttaattttaatttacattaattaatttatatacatgagaaatcttatcttcaaattttccatcatttaagtttgttctcaaggttttaaaacgtacattattaaatttttttaggagttgtggactctaacatcaagtgggtggagtgggttataataatccactccatgttttgagctccagttataatagttggtgctacaattaattattgcaatactatttcaaatcccactttgttagaatatttactacatccttttctactcatcctctcccaccctctttatacagcgattagtacttcttccaatccaggctattttagtctgtatctcaaccaaactgtcataacccacaaactataacgaccgactcaacgttctaaatacgtcttaatgtgtaaaaatggtggcagcctaaggtatgttcttttggttctgacggctgttaactttaccgattggtttgtgggatagatgaacattaggacttttaaaaggtgaacggcacaagaatgtttcccttttgggtagacatccaccactagaaaagcataagaatgatttgtgtagctttttagttaaagggatgcttgagattgagtcatcccaaaataatctgttattgggaaggagatattgatttgatcagtgtgtaatttaaaaggattaatctaagatggtgttgatggagtcttttgtaccttgatataaacaaaagtcaggattgtttggatatctcctagggctttctttggtgaacaaaaataacgtgtgtccttgttgttttgctgacaaaaacttgaacgaggatatcactctctggaaataactttttagaagtatagacaaaaagaacaaacttaaatttcattttaccctatttctcttctcatgtctgaagtaagtatgcatgagcatttagaatgataaacaatgtaaaactgaagaatttgaaatttttgttctgtgtgaaattcagttatccatcctttcattaatgacaaactgttgctttctgaagtctttttgtgtattgtgtttcaactgcgttgtctgtttacctgcaagtttgttcggcagttgagcaaagggttgtttttccccttgttttttatgaggctacttgtgaatatgcaatgcaggttgctgaaagagctctgtttctgtggaaca

SEQ ID NO: 7503 - DNA, 2102 bp, Cucumis sativus
  Intron number 3 from transcript Cucsa.001290.1 (locus Cucs a.001290) derived from phytozome v7.0 (chr-ID scaffold0002 0; pos 14695 to 16796 reverse strand)
gcagaatttcattacttgagaacacaccattattggtaacaattttagtaatcgtacttcattttctcatctatattcttattattattacttcagaggaaaaaacaatcattgaggagcgaaacaatataaataagccaccaaagccaaggtatcagaataaggtttctgtttgggtttaaatcatgagaataggaaaatttcgagaagactaaaaaatttgttcaattgtttttcttccttcttttgtttactgctgctatatatcatagtaaaaattcaatagtatgagagccctaaatttttgggggacgtgagaattagtgagataatatcccagaaagaaattgagtgatgcatctatgagaattgagtgaaatagaattaggagaagacaaatgtgaagtgtaggtgtcatttaatgatgcacattgaaggaaacatggcgacaatgtggactgtggagcacatgttgcatgacaacaagaagattatttatttgtgggtgcttgttacttatcggtcactccgtatgacatttggttggttgacagtgggtgtaccaatcgcatgacaggtggctaagtcgtcttaagagattgacaagtactcaagtcaaggatgaagatagagaatgatgagtatctagaagtgaaggggaagtgcacaaaatcaatagtgagttgtgcagaaactgagttgattgttgaagtgtttttggttcctaagattgatataaacctacaagtgttggtcaacatcatatgttggagttgggaagtttgtgtttggggcttagacgctgcagcgttgtaagatgaagttgcttgataaatctacaaagtagagaaagaggggaagacatagttcctcggtaaatgtgaaaagtagagaaagatgggaagacgaagttgcacgataaatctgaaagacagagaaacagaagaagatgaagttactcaatacatgtgcaaacatcaatagtaaaactttaatagtgtttacaattgaaattggcccgatcgttcaacttggtgctctggctcacctattttttttcccctattttggtggaagggggtttttcaaaataaagatgcaacaaagtagattctcattttcccatcaatgctagcatcatcaactccaacaaatccatcgagatccgaaattttcttggcgagaagaaggtgcgaaaagtagatatgcttgatggagtatctattgttcgatcttagaaagtcaaggatgagttagtcttggatggtaacgatattgagcttgtatctcaatctactgccttgattaaccacaaatgccatgtgaagaacagagatatcaggaagtttcttgatggtatttatgtcagcgaaaagggaaccgtcgtggaagaagagtgatgaaagagtagttttgttcaaccatgcattggcgttttttgatagtttctttttatatatttatatcaaattcgtagacaaaattatgagagctggtttttgaagggacaatttatcgtagacaaattcacaagcatttagttggacaccaattgtaatgggcgatagagtaaatgccagttttcattgtttggttaaaaaaagggaaaaagtagattctcattaggtctgctcgagaaggaacatatagcaacaaagtatattttcccttgattagctttgaagtccagagaacggaaaaagtcacaatttcttgccatgtcaaaccagtctacatttggatcttgccttggggtagaattttccaacttgggattctcaaagtaaatacttgaaatcacattctttcacagaagcgccttcctcctgagtgtattatatattattattttttttcggtgacaagccataagccccaatcctccttcgtattgaaggggaagaatactgtgttaaaatatgcatttctcatagggatgttattaggaatccattctctatttgtgattttctggttagtcattgcagttcgaaataatacattgaggttttttattagatccactagcgatgactttccttcacttttgtcatttctctttgcaaggttggggaagatttgactgaaggcgaggcaggggt

SEQ ID NO: 7504 - DNA, 4520 bp, Cucumis sativus
  Intron number 2 from transcript Cucsa.111880.1 (locus Cucs a.111880) derived from phytozome v7.0 (chr-ID scaffold0095 3; pos 550786 to 555305 reverse strand)
tctcagaaagcacatttcttccaccccatttccaggtatttcaaatacccttcacccattgttcatctttaataaaaaaaattatttccatcccattttaattaaacttcatcatctatgatcctgttcctgttcctgacttcctgtctgtttcttttcttcattcatcgacatggtttccttattgctggaattcttgacattttggattcatgtgctgctgctgtgttgtgtatatctgatttgttttcttgatagtcacaagaacaagaattattgggcatatacttttgtgggtttcatatattttaatttttattggtcaatttattgtttatttattattaatgaatataatgattcctgcatggatttgtgtgagggttgttgtcccccactggccactcccccattgtgttgttttgttggtttcccttcattctagcatcgtatgctcatgtttatgtttatatgtccatgacaggtgttagaagctagctccttctaactatgttcatgccatgtgtttgtcactgagtgaaaaaagcgcactttcacaaaacaggataactttttactattttcctcttctttaaatggttgtttcaatgtttagccaactagggtttcatggggtttggtgaaatgccctaggcctaattagattcctgctaattagtgttcaaccaactaaaacgagagtaactattcctttcctttgccctaagggctataaatataatatttacctgttcaagacaagatttttaaaatttgtaggtcacctattttgaaaacctaataggtgagctataaattttaccgttgtggttgatgaaatacataaatcatatctttatatcttatattatctttgaaataacattagtttattttaaatcccattttagcgaactactaggcggagttttttttttcatgcaattgcatagggtgcttaaaattatatttaaacatagggatacaatttgcagatctcatagatcagagtgtcacttgcatgtgcctgacaagtcaaacagtcaacgttaaatctcttctatgccattagattcgtacaagaccatagtctcagaaatattatgcacgctaaatttaggtgaagaagccttggtgtccaaactaatgtatctattaaaagataactggtaaaatcgaaagaagttagatatataaagtagaatggttggcagggagagtaaaaatagagcgtttcaagttgtggataggaattgtaggtaaggtttttttgttctttttgcttattattattattacttttttgttctatatattgtaggaaaccctttttctaaggaatttttatgtagatttgatcttttgtatgccctcctgctctttcccttacttggaaggagttatttctataaaataaaataaataagtgggatattaatagtgagtttaagaccatttttgaaatagagttctcaagatgttcaagtacttcactgagctcggtagtgtgagcttgtaaccgaagacataagtattattgaagtggttggatgttggttcggtccacaaagtagggtcttactaggataatctctagcctgcctgttccaagtagggagttaggccttggattttggcaaaagtccagggttcgctgccactaaagaccgagggaaccacgtgagactggtttcacagaggagtgtactctcatctttacaaaaaaaaagtgttttacttttttgaacaatttaggcgtcagcatatagtacactttgaccctttgaaattttttagaaatactttactgtcgtgtatttcatgataaatttgaacgacctatttaaaaaatagaggatagtaaaaacaaacggtcttcaaaaatcatctttgccactgtcatgcatttgaactcacctagaaatgaaaacctaattttgtaaataagtaggatacatattatggagttgattgcaacgttggccacgatcaattcattcttagatgagtgcaatgcttgtaagaaattgtgctatgcatgtgcatgattcttctaaacacccatttttagactcaccatatgtaggcaaaaactactcgtgcgtttgtatttcaccatcactgagccagagctgaacttagtctaaagaagtaggccaacgaaaaaagatttttctacaaagacatctttcatttcttaattatgaagaatttgtttttacttttaacattcttcaaacttctgcatatctcaatctcacatgataacctatcatactctaaaattttaaaagtcaaagaaacttatagtatattgaatcttagataggtggctattgttggattgaaatcattccctttatgttctctattatactcataggtctttgaccactagaccgattgattgataatatttaaaagacatcccaaatcttacaacattatataaattgctatcctatgatcatcacattagatctagatgttagatatctttaagttttaagttttttgaatgtttgttttccagagctttagatggtaattttctttctgttgaaatatcttcttgaaagaaatagaaatatggagtacatctttagttctagacaacttgtagtgagcacataacacaagtttgagcatgctagtttctctcacatcaacaacttgctaagaatagaagaacatgcttttgagccactctgctttttccacttttcgtctcacattttattctgatttttgtagtttgacattcaaatttgattatttatacctcttttgtggtcaatatggaataaattacatgcaaatcagaatttagcttagaaaagtagaggaacagctttttagggggagaagaatcgaagttattttaactttaagaaggaactcattttaggaaaaatcaaatatagattcttctctacgtaactttagggtttttaataaaagaaactataagaagatggttgaggaaactattctctacagtggagattgttctattgataccccagtttaatcatgatcttttcggtcttatgcagttgctggttctaactttgttctgttacttaagagaacattgatggatatcttcgagaaaaaaacaacctaaaaaatcaaatatatttgtctagtgtcatttactactaatagacattgaaaacaccctacacatagacgttaacattgtgatatatttaaaaatattttcactatttaaaataatttccttgttttttagtaatattattatacgtttaataaagaaaattcaatcaaacaagattctagaatcaaggtcccttgtgggcgcctgactttgggtaaatcaacaaatcattaacatgaactgaagtttacaacatttgaaatcaaggtccctagttgggtttaagttgtaggtattattttaaaacactgattagctgttcagttaaagagaacagtcagttgatcgatgatggaaaagtgtttaattatgaaccaacagtaaaaagaaaagaaatctttaggattttaaaaaactttgtaggattgaagttccctttttctttttcgtggtgaaggtgttgtcaaaatttaacactgcatgtgtagttgaatgcccaatgggctattgggcttaacaaaataaaaatgctattgggtcatatgagggggatcaaacagatctaataaaaaacaaacaaataaccatttaatctaattagcattgctatctactttcattttattttattttccctctagttggcactctcctaagttctaactagacatattcagctggctgttcatttaacataccccatatttattttcttgctttaactgaaaaacaatcaaacagccctttcactgtcatgtgtgattagaggttgaaaacaacgagtcccttttttcatctgaaattttgattaagatcaagagaatcatttttttatatttctttaattgctgatatgatagaaagttgaatgtataatggagatattattcatgaactttttggctttctttcttttttattcaaaaggaaagctaaaagtaaaatgtttgactttgtgctggttagagggcccattcaaacggctgaacttgttaataggagctactatttttttaaaagtaaaaattgaactagtcaattggagctattgatttttaaaagtaaaaaatgctattctttgattcttagttattgggtactacctttctttcttttaacagattcaaagccttccgtgagatgcaattaacaactcgtcaaatctggtgatgatttgcatgttagagaacaatatcttttgaaatattttgtgcattctgggaatatcagcatcttaacagaaaatatctttaatgacacagcctgtgatctacatttggccttctgttcccaatgctttcaagtccaatttaggctgaaaattttcacacccagaaaccagtttgtagtattattttcataatttcagtggatgtcattttctctggcaggttga

SEQ ID NO: 7505 - DNA, 6855 bp, Cucumis sativus
  Intron number 6 from transcript Cucsa.055330.1 (locus Cucs a.055330) derived from phytozome v7.0 (chr-ID scaffold0059 8; pos 80834 to 87688)
aagcatcaacaagtgtggagcagcttgcattccaggttttaaacttgcatctatgtatttggatagtaacgtaaatgggaagtaaaaaagtttattattcctctaattattgaaccaaatacaaggtcttcttatatagagaaagaccaacaacaaataaggaaaaaatatagacataaataaaaataatattacaagtgaataggaaattcaacaagttcctttgtcttggtatgacttctgttttctctgcctccctattgtttgtatccacataaagttgacttccttgtagtgtagcaacttccagtggcaagaggaagggtttccaattcaaaacttgggtacttcatacttgtctttccttttattgagggaggaggaagactttatgaatttcttctttttgagacgaagacaagcttctttattaatagcaaactaaaggtaaaagagaattatatgatgagggtaatgagaagcctagagagtgagagaaaagagaggatcagtagtaggttcaccttgacatctcaactaagttgacacccccctagcaccaccatcatatcccaaaggtacaaaccagccaaactagaaaaaatttaaaatgaaaaagaaacataaaagaaaagaaaccaaactaaactgactacgctggaaatctaaaacttgtatcctctgctaagctgaatggtggatgaatgcagtccagttgagacaaatatcctgaattgaataatctctgaattcagctctcaaggaacacaatgattctgcgttcctttttgacatgtccaagatgtcaaaccaactcatttctttatcatgaaaaattcactgatttctttcaaaccaaatcacaaccagcaacgctttagccatattaacccaaattagggatggtttctctgataacagggcccctcagcagctgaagcatattggagcttagggatccatcaaatacccaactttgaacaaagaaaaaaaaatgctattccagcatttagagtaggggcaaaaaatgaataaagtgtaataaatcctcattgtcctttaaacagagaggacataccgatggcagcaagcacttattgggaagctgcctttgcataattttggagcaattaagaaagccgatcatcataatccaagctaggatatttattctccttggactgctggtttttcaaagagctttatagcaagccttttccattggggaggatggagagagatgagccgaaagggagttgactgagaagtgacccgaggcatctaaggaccaaaaccacctatcgttcaattctgtcattcttcttgaggataggagtaataaggattggaactcttggatttcttcaccttttagcaatctttgaaacactatagaccaagcatttgtgtcacaatcccaatgggtagcaactgaactggtgggcagcaaggctattctgataagctttgggaattgagtttgtagagggaaactccagtccatgaatctgcccagaatgtcacccttcttccattaccaagcttgaacggtgccaatatttccactctcttgagatgctgacccaagagcttcttaaactatttcctgatttgctttgagtaagccaatcaaatgcttcttaaactacagatgtatcttaatacattgatattcctcaatgattacaatatgaaaatatgaaatgaatcacagatgatcaaacagccaaaccacacctactaactactgaagtaaatccacaatcagaatatttacaatgaacaataaccaaaacagtaacaatagaaattaagaacaactctagaacctgggccctctgctttcctttcccgtgcaaggaggaatgcaacatctcttcttctccagaaaatactcgataccccctcccttctctttcctcccttttattctgttatgctagcaaactaatggggaccactcttcattattctctcctatacttccacgtgtggctttactactatttttatttcttctactgtatttaaacaaaattggaggcctagcagaatgcttctgatcacttgcctccacagggcagtatattccaacatgtacctccacccccatttagctaggagagctgtattttttatttctgatacctcccaagcccagccccccatccaacagggaaggtgtgacctttttccaagccaccaagtggtttattctgctgcctgagttcccttcccaaaagaaattctgcattagctttttgagagtagaaactaaattttctggagtggcagagatagacaagtagtaggtcggaaggttggccaaaactgagttgcataaggtttgtcttccacctcttgataaattaaaccttttccatctatccaattttttgtgtacttgtcaatcacaggttgccaaaaatttttctgccttggataacctccctacggatggcctatcacagaaatgggagcttttccactttacaacataattttcccgccatatgaagtagctcatcatcccccatattgaatccacgaagcgctgacttgtcccaatttactttttgacccgagcacaattcaaacagattgatagcttcttttagcttgagctgcattgcttcatcatctttacaaaaagggatagtatcatcggcgtactgtagaatggggatgtgtacactatctttaccgaccatgaaacgctcaaaatggccattatcatgcagcttgttgatgatggctcctagaactttgctgacaagcagaaaaaggaaaggagaaagtggatctccttgtcgaatgcctctcagagccactatccttcctcttgagtttccgttgatgaaaatggaaaatctaggattttcaaagcaaccccacatccatgaaaatggatttgtaattctggccaaactactcttctttctttgtaaccccacgggccataaacattggtaatccaacaacatttcctgcacaccataacaccttttattgaggtgaaaactgtcctttgatgatctcaatcacagtgactttgctcatattgacagtgtgagaatacctcctcatgcaccaactgattccacaaactaccatccaatatccttggagctccaagctgatttaatgaaactgattccacaaactaccatccaatatttcaatatttggtttgtcctcgttagtaagcttcaatctctagactttatgaattttctaattcaaaattgaggtacttctagttcccactttagcacctcggctcaaacgatgggccaatgatcagaagtaattttggggctgaggagttgtctagaattaggaaatatttccaaccaaaccttgaaaccacatgttctcaaacccaaaagagcactgtccccagttaagctgactccaatcattgacaggcctatgattgggagagctttacaaatattttacctttcaaatggtgtttccatgttgtggattattcatttttagaaagatacaatatttttagattatcatatgttgtgatctttggactaatttacaaagtatataatcatacttaagaaattagaaacgaaggacagaattttgttcttctacaaataagaagaaacgatagagaaggaatttgattaaaacaaggattacaaatggaaatttccttcattgttttgaggaattcaactttcaggccccattattgatgtaagagttattttcctttgtttttattctcattttttgctacatttaattcaacagaatggtttctaatttgagtcccgcagaaacattagggaccattaatgttgactgttgattcactcttcttgaaggctgggaataccattctaagtagtgcagattcaaaagaaggaatatgcactgttttttaaggactttcggccaatcgacatgtctactccagtttacaaaattattgccaaagttttagctgaaagattaaagaaagtaatgccctctgttatttctccctaccaaagtgcattattgaagggaaacaaatcttagatcctatactcattgccaatgaagctgaggaggagtatagaatataaacctaagaaaaagaaaagatggactttttttttccttctcaaaaggaaatggaagttgaaatatggaataagatcgtacatagtcgaccattatatacaggagggtatggaggctggcttatgataaaaaacctccccttggattgttggagtaaacaaacgtctgaactcattagtgcttatttgggaggactggaaagtatagccacagacgaatcttcttgacgtctgtgaaagctagagttcaagttcagaaaaatttatgcagatttatcccatcgacaattccgattacagatgaattgcatgtaaatttttattcgaattttggtgatatgaatcgtatcaattgatctgccaagcgagaccaaaaggtgctttatttgtaaagattttatgaatccaattgatattgtacgtttgactcaagttacacaagatgaagaaatggtgttcaattctctaaatcgtaattttggaatttctgttaccatctcaaattcttccaagtttatcaagaaatccattagtctgcaacccaaaaaaaaaaaagagttcattatgcaaaccaattcgaattcttgccagaaaccttcccaggcttacaacttcggtttctttccactgaaaggaaatttcaaacaaggttgatgatgtgaacatagagacaaaatcattacgaagagataagatagacagatgtttgtcttttgagccaccaaaagttaggcgcttcgaattccctccaatggggaataaataaatcgtccaagaaacaaccctggatatgcctatagaagatattcaacggtctgttgcaatttgcagccattaattatgtcgcttcagatgttgcaatttgcagccattaattatgtcgcttcagatgttgcaaggtctccttcagccgaaagatttaatgctattaaattgattgataaagattccgattcttacattaatgttttgacagctaatgattataactccaatctctccaaaaatggtaattgccagaatttcttgtcagacttgggctccctcactccgatcccctgctccaaagattctgaaaacacatcctctgctcaagcttcttttcagttgcattccaagaaacgttcttgcctgctgaagctgttccctaaacattttattagaaaaaaagacgtccttcctcaactcttggtcaacactagttaactcagatttgctcgaagaatgctgtgttaagattcaaatccctggttttttcactgacagtttagttaaatctccacccaagtcttgcgcctttcttgactcagattttaagatccctggctcaaacataaattttgtgtgaggtaccctgagcataccatcaagttattctcacttcagcaagcatgactctgatgaagattcaattgcaagcgccagtggtgaagaattagagagctcagaatcagcaggaaacaacgagaggaagagttaattggatgattatggccaagtcatatttcaccttttttagacagaggaagttcagttgattggcgaggcaaaagactcattcttcacccctattgataaggaagagattcctcagaatctgatttcattatcgaagctagtgatattacctttggttgagaaatggctgcttccagtgttctgtttggagaagttttttctttttgggcagtctcagtcaaggaggttttctttggcagggctatggataaggtggtggatgtcttcaatgcattcttttgaatttttggattttggtttcctcatcatttcatagggctggagttgtatggttgttctctagggaggcttctaccttggcagattgctagtcaatgctgatagaagttcattttcaagcctcatctggttccaaagctccatgtccctcaattttcaagtttgttcttcgccagaagtctcgttttggattgtttgttcattgggtgtttctttggtctggtatcttttattcttttgttttattgttgttgttccgtgtttctgctaatattttcatctttcctttgatcgtttctttgtactttgagtattagactcatttcattatttcaatgaaaaagtcgtgtttttcgttttttttaaagtgtgttctcttttaaaaaaaaaggaaatagaatttttaattgataaaataaaaagataataatgctcaaagtacagggaactaaactaaactaccaaaaataccaaacaaaacctgaagaaaataaaaggacgaaagaggagaaataaaatcagtccggagttgaaacaaagcgatcaatccaagtaagagaaatattcagtaaaaaatgctgaactctctcaaaaaacactttaacagaagaacttaaaatgccgactaagtgtgagaacatgcacacatagaagagatgctgcaagtctatgtaatcaacctaaagaagtgggtaggaagcagggaatgaagtactcaaaagatgcaacaacctttgactatcttctacgtctagattttaatgtagctataaaatagctaaagttaaagcctactaaacaatcattttaactgtcataactatgtcatttactaggatcctgaaaatgctagttcccagaaaataatcctttacaaatgactaacacattgttgaaaatcttgtgatagatggttttatcagtttattcatttttttgttcaagtttggtgacttgttctcccattgctttcaggtcagagagttttattcaaacatccggtggt

SEQ ID NO: 7506 - DNA, 5529 bp, Cucumis sativus
  Intron number 2 from transcript Cucsa.266170.1 (locus Cucs a.266170) derived from phytozome v7.0 (chr-ID scaffold0235 2; pos 651657 to 657185)
cttctcaagttgcaggcactgtgtacctcagtcaggtgtgtcaatttgtttcttattttatataaaattttggtcactcttaacaggacttttatttcatcagttgttttcatgttggtttgaggcaatgttagcggagtcttgtgattaattattcggaacccataagcatgaatttctatatccaacaatttgtttaccaccatgcctttacctagtgttaaggttgatgactaagaagcaaagtcatgtaagagacctagagatctatgaggttgtcagtagaataacagtatggttattaggaggggtaggggtgagcaaagctattggagaaactgagccaaatggtcgaaccgaggaaaccggtcgattttcctgataattcagtcgggatcgattttattgatataaaaaccgaacccgactagaagtgaccacttcagcctgagttctactctgctacagcctgtctttttcctgactaccagctactcctgatgtaaccctttgttttgatatcttactcaacacgccaccaacctacctctatgaaactacccactacactacacgctctgcactactccttaggaagacaattaaagttaatatattatattatagtataataatataacatttttatttaatttaaataatgttatttgattgtatttacattataaactctgttttttttttttctctaaaaatcttattcctctttacctaaaacaataaaactcttattgaaagtagagacgaagaataaacacaattttacgtggaaaccctagtacagggagaaaaaccatggtgctgataattttattattttctaataatcataaaggtacaaaggggaagtatttataggcaacacgagcctaaataacaaaataaaaatagagcaaagcaaattacgtaactacccttggactgtcaacatgacctaagtccattattcctaacactcccctccaagttgggatgtaaacctcataaagacccaacttgctaacacacacatcaaagttttgtctgaggagcccctttgtgaggatattagctatctgttggctcgagggtatgtaaggaatgcatatgctaccatcgttaagcttctctttgataaagagtctgtcaatctccacatgtttaggtttgtcatgttggaccgagttattgacaatgctaatggctgtcttgttatcgcaaaatagctttataggcacctcattgtcttgacaaagattagacaacaccttctggagccaaatctcctcacagatccacaaactcatagccttgtgttcagcttcagcgctgcttctagtcacagctccttgcttacttctccaagtaacaagattgcctcacacaagagtacaatattttgaggtagactttctattagcaatagatcctgcctgtcagaatcagtataagcttcaaaacttcttctgccagtcttcctgaatctcagacctttacctggagttgcttttaaatacctaagaatcttgttaactgcccccatgtggtcctcataaggtgcctgcatgaactgactgatggtgctcacaagcataggagatgtcaggcctagtttgagataagtaaatcagttttcccgctagctgctgatatttctctttaattaataggaaccctgacatctgaattccgagtttggcattgaacttaatgggtttatcggcaggatgacatcctagtatatctgtctcaactaataaatcaagggtgtactttctttgtgtcccttagtgagtgtgtagagatcccaggtggttcttttctagggttctcatttcttccatgataacaactttccactccggacactttaaggcaaggtggatacttttgggtattgtggtagagtcaagactggtagtaaaagctctgaactgttgtgagagattctcgtatgacacataattagagatggagtgctttgtacaggatctagtacctttcctcaatgcaataggaagttcaagagatggatcatacttaatgatatttcttgaatggtctgacttagtttcactttcactatgttcagcaaacaacctcattctcatcaattctgtcctctctgtctataatgaccccatcaatactgccctgttcacccatatcttcaagaacagctgtctcagacatgtcattctcacctgccttactgtcggtatgtgagtcagttgaattcgtctcggacctgttattctcactattatgttattactatatgagttaattgaagcggtcatactttgatctcttttagaatcctggactggagccgtctgaacaacagggactcaacttcctttatgagattcctccatagtaagattttcaaggaacttgatttataggtaggactgtagagtaaggactagggtcaagtaaggtagccacagtagggcaagtagactttaagggaagcatatagttagactcttcactcactctctccctctaaagtaggctaatgggaaagaaagggcgatcctcaataaaggtgacatccatggtgataaagtacttgcgtgaagatggatggaagcatttatagccttgttggtgcagagaataccccaacgaacacgtgagcctgagtccgaggagtgaatttagtttgtctatggccatggctatggacataggctatgcattcgaacaccgaaaggggtacatcagggatgagacaagtggagggatagggttctttgagacaatctaacagtgtctgaaggtgaaggacacgggaaggcatgcagttgatgagatgagctgcagtaagaatgacatcactccaaagataggaaggaagagaagtggacaacataagagaatgtgcaacttcaaaaaggttatggttctttcgctcggcaacctcattttgttggggagggtaagcataggaactttggtgaacaattcctttagaggataagagggtggttttgaaactcacgaccattatcactccgcaggattgcaatctttgtattgaattgtgtttctatggtgtgatagaagtcccaaaatgtggaggtaacttcgaatttgtcggagataaggaaaacccagataagacgagtaaggtcatcaataaaggtcacaaccatgttttccttgggaggtaatgaccttagatggtccccaaacatcattatggacaagagtaataaaaggttgggtttgcttatcctgcaagggaaaatagactcggtgttgtttagcccgtatacacacatcacaagacaaggaagaaacattaactttagaaaaaaggtgaggaaataagtatttcatatatttagagttggggtcgcctaaatggaaatgtcaccacatacaatcttgtttggaagtagtaaagtaggaagatacaaaactagtcttagaaatgctactagaggaggcatcatcatcaaacgagtaaagtgctatccgtttgattattttagctaaaagaacactcaagaacaagatcaaatgaagaacactaaaagataagatagaattatattgcagtatcaagaaagaaactacagtatacctcagcaacattctagagggctgagaattgtctctcaaattcacccgttaggaaactgccacaaaattcttcgcaccttcccccatctatagcaaaataacctaaccaacttacttaactatttactaatatgtcccaactaataactttactaatattctactatttctataactaggggtcttatattacttcacccttcgaagacaccttgtcctcaaggtgtgcttacaaatacgatcgcaaaatttgaacttttttttctttaataaacgaaatagaacctcagcagcttgctcttcaatcttggcaaatgattcttcccttcagcttggaaatgtacttgggctccaaatgatcccgtggcttgagtccataaagcaacccgcaaacacaaaatctcccagatttgtatttcttctcatcaggcacatgactgggtccttctccccgccgtttgaaaaggtattcaaaattgaggttcttcttctctgatggtctaggcccacaattaacttgctggccaaaatcaaccaaaaactcacgtttgcttatttcccacttcccatccattagagaaaataataccgcatgtttttttgactagttggacgaaaataaatttcttcatgttttcttgtttttgtctgtgaaccacactaaaacccttcaacttttttccctttattccatcctcccctcgaatcaactttatatttttgcatcctctttctatctttccatctcacatgattgttgttggaaatctttgctcttctcttttaatggcttcacaccatgcatttccaagatcaaaagtgctctctgatctgaggctaatttggtagaaactagaaatggaaatggaaattattaaaagcaaatatattgatatttagaatactaatttgacagcgattaggagtaaaaattgaaattacaaaaaaaaaatgatgtgaagaaggaaaaatattctagcaatatgagatactagtgctcttacactaactattattcttctagtagtagaacatgtagaaaagggagaattggtatggctagaagttggaggttccatcccctattctcataattgtactaaaaaaatatgtagaacagagggaaaggtgtttttaggatagactttgatgaatgtgcttgagtagaaatattagaataaatggaataggtaggtgtggatcttgtttgttgtcctttttagcccatggtatagtcatgacttgaaaccctgccattcctgcacgttcaacttgcttgaaggaagatcattctaatattgttgtttaaaaaaacgatcaaaactactaattgatataatgaatatactaaaatgtccaaggggagcaaattctctggagcaaagaaaaaatgataaatgaattacggatatctagtgaaggaaaataaaggaatcccaattcatccaaatatttattggagaatactaatagtgactacagtttaaggaagccttgaagatggctaaatcaaaacgaagttatatttttctattacattttttgtctctaatagggattaattagatgactttattattttagcatttcatctttttgaatttaaaaaggtgtaatctttccttgtaatttgtttgagaaactttctaaaaaactatagtttcttttttagttttaaataggtacaacttttctaaacaaggatcattttttatagagaatgttggttgatacactttattgcataaaagtggatgaattgtacgcatgggttgtttgagctgctccatgtcatatcttgtatgttttttgtactggcaaaagatgcttccttgctaatcttattccgcattagttttcttaatctctgttaattagtttccattttgactttcaggagttgattggggcgcttctagcttgtgctttctt

SEQ ID NO: 7507 - DNA, 237 bp, Cucumis sativus
  Intron number 2 from transcript Cucsa.175490.1 (locus Cucs a.175490) derived from phytozome v7.0 (chr-ID scaffold0122 5; pos 163117 to 163353 reverse strand)
cattggaattcgtcttgaacaagaattcggatttagtatgtatcttttatcattctttctttttcttttctggtgttggtagcagaactattgttgggcactttattaagagttatgtttgttgtattctcggatatggattcttttatgtttatatatttagtggatttgatcatcgccattccaccccttacaaattcgtttgtggatgttttacagtacggataggtttgctat

SEQ ID NO: 7508 - DNA, 4856 bp, Cucumis sativus
  Intron number 2 from transcript Cucsa.337700.5 (locus Cucs a.337700) derived from phytozome v7.0 (chr-ID scaffold0335 6; pos 714509 to 719364)
tttgggaaagctttgcaggtaaattgacaggatgttacttttctagcaatgattttcatttgtgtgacttgaggttcgtaatttatctcattctacctgggacttgtggaacactatataagtttatgtgattagttgacacaatttattacaggatagaaatgttggtcaattcttaaaaagtacaacaatcaattgtattaaggtctaaccagcagaaaataatttcgagaattgagatatttttgttggccttttaatcagtaaacctgcatacgaagatcaattcttaagaactaccattatcaaatatttgtacgacataattgttgaacaggccttcagcgttcaaatggtactggcgcctcttaccaaattttcggttggttgggcagaattggaagtggaacttctgccagtttatttggatccgcatttatatattgttggtcctctaaatgctatgacagacatgaaaatagttatgcaatttttgtcactgaaatttttttagacattcgtttgttatttctggaactcatcggttgcatttctgtatgggtttcacagttttcagagtggttggaagcaagtggacagctcgaatttaatgaaaatgattatgcttctcgccttgacttgattgcaaaggtacaaggtctccataaggcagagagttacattgctaaaatcccaaagtccttccagggggaggtgatgtaccgaactcttttagctaactatgtggctgccaacaatgtaaacaaagcggaggaagtattcaacaaaatgaaggaccttgaattcccaatgacaacatttgcttacaaccaggtgcttgttctttacaagaggaatgacaggaggaagatagccgacgttttgttgttgatggagaaggaaaatgtcaaaccttctccgtttacttacaaaatcttaatagatgctaaaggcctttctaaagacataagtgggatggaacaagtcgttgatacaatgaaggccgaaggaattgaacttgatgtttttgcactttgcctattggctaaacactatgtttcctgtgggcttaaagacaaagccaaggccactttaaaggagatggaagaaattaactcgaaaggttctcgatggccatgcagacttttacttcccctttatggagaactcgaaatggaagatgaagtgaggaggctctgggagatctgtgaggcaaatcctcatattgaagaatgtatggctgccattgttgcttggggaaagctgaagaacatccatgaagcagagaaaatttttgataaggttgttaaaacatggccgaagaagaagatatccacaaaacattattgtaccatgataaaggtttatggagactgtaagatgctgacaaagggcaaggaactggtgaatcagatggcggaaagcggttacagcatcgatccgttggcatgggatgcagttgtgaagctctatgtggaagcaggggaggtagaaaaggcagacactttcttggttaaggctgttaaaaaatacgagatgaggccattgtattgctcatacaggactctcatgaatcactacgcaaggaggggtgatgttcacaatgcagagaaaatcttttataagatgagacaatcgggttacggtccttggttcaaccaatttgaaactctaatacaggcatatgttaactccaagactccggcatatggtatgagagagagaatgatggcagataagctttttccaaacaaagctttggccggaaaattagctcaagttgattcttttaggaagacggcattgccagatttgcttgactgagaaatataacctgtttcattttgaatgtattaacaccccagattttcaaatttatgttacaaatcaggtatttgttcattgatctggtggttgcgatttgttagatgaaagtatatggctcttatattattgaaagtggactaagttgggttgtggtatataattttatatgttatctgtcgatttttgttatttgttatgtttttacttatttgtgtgttggatttccaaaaacgagtttccattcttacttgacgttatgttgaagttttgatttcaaaatttggtgggattttttaatttaacttgaagctttagatttatattatgttgtgataaagttgtttatgtaattgatgtttaaagctggtgtttatcaaactaactatgctaatcataggatcatttgaaaacttttatcttgttaattcaacttttgttaagttcaaaaatattatgtaaacaagtattcatttaaaagcaaaagatatattttaaagtgtttttgatttaaggatatgtttaaaaacttcttaaaagttcaacgtatttttaatacaaaacactaacgataaatgtatttttgtaattttttgataaattattttaaataaaagaacagttaaaaatatttaaactattatatttaagtctttaataaaaaacactaactataaatgtacttttgtaattttttgataaattattctaaatgaaaaagcagttaaaagtatttaaactattatatttaaattaatcataggttacctatgatattttgttttatttatacattgtttttattaattttgctaacacgatttttttacatataaaactattgttaacaaactagaaagcgatgtttttaacgatttaaaccaaatgaaataaaatttaaaagtatttaaaaatttttaagtctaaaagtatttttttaaacacaaagtacaagctttttatatagtttaaacaaaaagagagagaaagagagaaaaaaatatatataacaaaatggtattttcgtcaaattaaatgcatgagaggttttagggtttaagaacaacctccatcacaactaacctctcactctcccttccactgttgagcttttctgagttcttcactcccgatatcatctcaccatgtgggctcttcgtagagcttctactcctctcaggtattcttctcctcctcctttatctgttccccttttcttcacactacaccactctgtttctctaccttacattcttccttcaatatcaaaacttttaatctcgtttttggctgttaacttttgaattcctttcatgggttttggttttcactgtctctatgcatcgacgatcttcttgcctgcttcttatcgattttccggtgctaattaaagaaggaaatgaagtcaagagttctgcgtgttctgttctgttcttgtagtaaactttgtgttccatttctgttttctttaacaggattcttccttgcttctgattgatcttttttttctctcctacggataacttggtccgagtgatgcaattagaatcatagaaaaacgtagacattgaaattaggatgtaagaagcttgagaagaaaatgagaaacccttattctttggacatttttcttcttattctaatgttctaaacatgaaaccttacaaaaaaaaagttctaggcatgaaaatttgtactggaaatttccagaactaaatcattatcaatcatccgaaggaatgtttttgtatgattgaacttctgtatacatatactacatgcatggacgtgtatatcgtggtggggaaagtacggtacctcgaactgttcagaccctctgtatgatcttttttttttctcttttcaggaatcaagggtatagagtaagaacttcatatgtctttggcaaactagaggtaccatatttttgggaaggaaatgttgctggttttggaaccaccgctggtttatacgacaaattcatttctttcgagagaaataaccctgccacgtggccgtcctctggggtttatattagtagtcatggtctatctacacaatctcgtgctgagaacagtggagaggaagagaatgtggaagatggattttccgaacttgatggtaatgaagaggaactaacctctggatcaaaaattgctgatgacgatgacaatgatgttgatgatgggactcaaaaggaactggatttacttgatggagaaactgaacttgctgaaaagaaatttacaaaatgggttccttcaaagctgaccaaagctatttggaatgctccagatttttctgtggctagtgcacttgttaagtgggtcagtcaaggaaacaaactaagccgggatgatatctcttcgaccatgatcagtcttcgtagacgtcaaatgtttcgcaaggctttgcaggtaaattgactggatgttacttttctggcaatgattttcatttgtgtgacttgaggtttgtaatttatctcattccacctgggatttgtggaacactatataagtttatgtgattagttcacacaatttattacagcattgatatgttggtcaattcgtagaatgtacaacaattgattgtaataaggtctaaccagcagaaaatgttttcgtgatgtgtttattagccttttaatcagtaaacctgcaaacttagatcagttgtatagaactaccattatcaaatacttgtacgaaaaactgtggagctggccttctgcattcaaattgtactggttcctcttagcaaattttcagttggtttgatgctcggttgaacagaactggaagtggaactgctgccagtttatttggatcggcgtttgtatactgttggccctataaaagccatgacagacaggaaaatggttatgcaatttttgtcactgaaattttttgtagctattgtgtggtaaatatttccccgtatttttagacattcattcgttatttcttgaactcatatcactggcatttctgtatgggtttcacagttttcagagtggttggaagcaa

SEQ ID NO: 7509 - DNA, 2446 bp, Cucumis sativus
  Intron number 2 from transcript Cucsa.250010.1 (locus Cucs a.250010) derived from phytozome v7.0 (chr-ID scaffold0221 9; pos 134200 to 136645 reverse strand)
caatcaggcactggaactacccacctccgtttctggcaagtctctcttcccatttctgttactttcttcgtcttttcattttgagttctaagatttccctgtggttggaatgtttctctcccctctggtgtattgcttttgcttacttattcttgtttttcgttttttgtatttgcaactttctcagtactgtctgtcttcaacgggggttttattgattgattgattggttctcatcattcggtgatatttgttgatttataacatcaatggagattgaatgctttctttttgttgtttggatttgattgtttttacattgggagaaaatgagaagcttttgactgtgatattaggaagggattttagaattttagaagtttttggttctcaccaatgaataatggcaatctttctacctgaggctgtggcctcataggtaaagtcattacaaacaactgtaaagcttgctccttaatctgcagcttctctcttctcataaatcaactgtcctgaataaataaatcacctatttcaaataagactgatgttatttggctcaacttcatttgagactttctttggtgcaattggattgaaagaaactaaaaatttgttttctggaaaagacatagatttctcttcttttatggacatgtcgcttggtgtaggcttaaaaatctcttttgttactattccttttaattgtagtgtcttgttcttcccccctctttttatatttcattgttattatgaaatatttccaattaaaaagaatagtagtgcttaccccattcctaagccttaaaacacttgagaactaagaccagatatatttcctttgtagaaattacttaaatattctttgtatcatgacaatctcgacccaaagcttgaagacgatcaccaatttaagaaaaaaaagattgattatattagtattgtagaatgaaaatggacttgaaggagaacacaaaaaaagaagcataactctttgtgaagtcccatctaacaacccattcaggctttttttctgtattctctggttcctttcagacccaatacttcaaagaatactctgaccacatttattcaccgtagttcaacttttttcttcaacttcataacacatagttggaagtttcttttttgaaaaacctatgttgaaagttattctcaaggttttattgaacacccatgccaaaacgaaagctgttctcaaatcataccactttaagcacagtgaatagataagtgaaagttatcttcacctactaaaaacactggctgaacgtggcaattcaacatcaaagcaatgtactttcacctgattgttgactgtgctgagtgtatgcaaatgtgtgaatcacatggaagtactgatttttggggattttttttatccctgaacttattaagattcattgatttgcaccataaattttcaatttcaactaatcaaactctagacttggacacttatcttcactgatttaacagaatccgagttaaaattctctgaaaacaagctaagttcaataataataataataaaaataaaagaaaaatcttaagccatttgcaaatttcaacccaatcaatgcacaagattgattgtcgtatctttttcatcgaatcaatcttctaaaatggccaaatttttctcggtgtaactatggaaacacttcaggctttggttgtttcatgaatataattgcaaggtcttagaatggaatgactttgactattgattcgttagtaaaaaacctttgccaattcttcttctttggatctcctacctttttctagaacaggaaagactaaagagtgctcattgtcattcttttttcttttattatttttattgctgcatgatcacttgaagaatgacgaaacctggaaagatcaaagattactgaattctttttttaatatttcattcaacagcttaaagttaaaagcttctttttctcatatggatcagttggtagaaaatggaaatatgttctcatttgctcagtttgcttagggttttcatactaattttgtaaaagctgtattttactgtttattttaatttaccttttgaattattgatgtcgggcgaagtagacaattctaaaacttggagcttgtttggaatgacttctagagtgttaaaaaatgtgtttctacgcacttagaaagaaaatattttttacacttaaaaatgtgtttcaaagcttcaaccttgaattgaattgaattatctgctgatggaaaaaaaatattagtggtttattttctttaaagtaaaatattagtgagctttttagtttgacattttatcaatttatcctacaattaatatctacttcttatgtcatatttttccttaatatattagaattcttgttctaggatcatcgtgttaagaatacttttattgttgtttttcacagatcca

SEQ ID NO: 7510 - DNA, 1304 bp, Cucumis sativus
  Intron number 8 from transcript Cucsa.086860.2 (locus Cucs a.086860) derived from phytozome v7.0 (chr-ID scaffold0087 3; pos 244914 to 246217)
tatcccgagctaggaggtgagttgctctttggctttgtgctattattatcattttatgtttccagtatctgaagaaacctctcaactttttactttgttgacaaagttagaaataggaatattctgttcctttaccattttactgaataatctctctgcatctatatagaatttgtctgttttgtgataaagaccacaacataaattgatatggatttccagaaggttctctagacagtaagaaccttagaaatttagtcaaggaccataggatgtcattctccaaagtataacatcaaaatttagcttaggcttcataattccttcctcttctacccttctgtatttcttctcatcttcctggttttgtgtttggaatgagcacctttcatttcacgacttcggcccatttgtttcttaaaaattaattctatttgctttcattttaacaattatttgcatatttattatgtgaaagacttaaatccttcgccaaattccaaattccaaaaacaatcggtaagggtggaattgatatttataggctaaatttttttaaaaaacagaaacgagcctctttattaatgataataaatgagatcaatgctcaaatcaaagtaaaagtaatatactaagagaaaaaggagaaaaagtactaaaaggacaatcaaaatgacaacacaaacaagccaaaatcctctataactcaaacaaaaatggagaaataactaccaagcaaaatattacttttttaatgagaagccacaaaatcgatcttgagcccgagaagacttgctaacaattttcaaaccaacaaattgtgaaataacattaaattctttgacaagaggaaaccattcttgcacacaacaagaaataatgaagcaaacaaccaactcactaaactgccagaaacaaaattttgaagcaggaacaaaaagaaatctactttcaagtactcagccaaaaaattatcctacattctttaacaaaaaacttcaaatgttttggaacttcacaaacatgaggattctgctatttgtaagcttaattctcaaaaactaaaaactaaatggttacaaaacaagatctcaacaattttcaccttttttctcgtgtatcattggtattccatggattttgagcaatttttctttagtgatacaatcaataagaggaaaccactatcacaaatgcatgtttgtttagtgatacaatcaataagaggagactctactactactacaaatgctagtttgtgttctatttactaaaagttgtttctcatgcatttactttatagc

SEQ ID NO: 7511 - DNA, 5547 bp, Cucumis sativus
  Intron number 5 from transcript Cucsa.168290.1 (locus Cucs a.168290) derived from phytozome v7.0 (chr-ID scaffold0116 0; pos 54799 to 60345)
cttaaagataaggagtagtccaagacctacagttggtactgatctaaagccctcaatgttcttaattagtatttatcttctttgctattttttatagatatatatattttcttcttgttatttgctaaaatattctgctctaaagtgcttcttttgcattccttttaagtttcgtgcttcttttgtaatttcatgttttttacttgtttttgtcattccatgtgtatgctcttattaaattttctccgttgatgagatttctagtttcgctatgggtttcgtagacacagttgtccaaccgattagattaagttgtattatgttgtcgtttttcattgtcctctttctttctcagcctgatagaatataaatagctatacaactactgtaaatgggttgaagttagtacaacaatgaagagttctttgtattatttaatacaaaactcttggtactagagctctaaacagggagctaatacaactttttccttatctgcttcgatcaatgtgcctagacctacgatttctttgctccaagagaagcaacaaaatttcctaagcctactcttggtataatcctatttctttcttatatcagccattttttaaaatattaaactcaatgatagagaaacccatctgcattgacaaaaccaactatggaatattatcattgtattggccttcacgaaaggtatattggtggaagcaaccgttgtactctccattaccttggtgaaaacagacttttaacaagttgaaatacatgtcatggtatagacacaatccagtggtaacaagatgattgtattacttctctaatagataaaatgacatctagaataggtaattatggacattgtagcttcatttggaatgcattagccaccttggccaacaataccttgtgaaagtacatggtaggagaagggggagggcatctgctattgaggggctgtgagttttggtaagagctattgtgagtgagagattctgttatgagatttggagccatttagttattcgttagagaggttgtgagggaaagttgtaaatatggtcaagcaccttactgtgaaaagagtagggtgtctttgatcattttgagttatcttttattaggaaagaatttcatttggctctgtttctttacctgagcataaacaggggttctatcagttgctgatagtgtggctagatcagtcaacaataccagatggacttttaattgggggatagtggcagaatataatgcttttgtagttgcattagatacaagaggagcgtctctttcatttgatgataacatctaaagaatgttgctacgattcgagcaaaactgaattaaaaatgaaaaagaaaattgagtgagtgcatctgctatatatatatatatatatacatacatatatatatagacatacatacatatatatacatacaaatatatacatacatacatacatatatacatacatatatatacatacatacatacatacatacatatatacatacatatatagacatatatacatacaaatatacatacatacatacatatatacatacatatatagacatatatacatacatatatagacatacagacatatatagtgtatgtatatatgtctgtatgtctatgtatgtatgtatatatgtatgtatgtatatatgtatgtatgtatgtatgtatgtatgtatatatgtatgtatgtatgtatatatatatgtatgtctatatatgtctgtgtgtctatatatgtatgtatgtatgtttatatatgtatgtatatatgtatgtatgtatgtatatatatgtgtgtatgtctatatgtctgtatgtctatatatgtatgtatatatgtctatatatgtatgtatatatgtatgtatgtatgtatatatatgtatgtatgtatatatatgtatgtatgtatgtatatgtatgtatgtatgtatgtatgtatatgtatatgtatgtatatatatataaatatgtatgtagatatatctatatatgtatgtctatgtatgtatgtctatatatatagacatacatacatacatacatatacatacatacatatacataaatatacatacatacatacatatacatacatacatatacatacatatacataaatatacatacatatacatatacatacatacatatattttgttgctgactgtaccaattaagtatttttttttgaaaaggaaacaaatcattttatttatataaatgtaaaatgaaagagactaatgctccaagtaaatacggattatacaaagagcataaagcataacaaggatcaacaagcgcactgagacttctcaactaagttgacacccccttagcgccttcatcgtatccttcaaaacataacatcaaaaatcggccgaggcttataaattcagccattacaaataggacaaaaagactataaatcactagccttacaaaggattcatcaaagagcatacaaaaggcctaagacaaattaaaagtgcaaaatgagatataactcaaaacaaaaaaattaagctgggaagataaagactgtccaattgtagatttcttgaatgctgtagctttcaaaaggcttggagaaggaacagctagaggaggcgttcttacgggaaaattcaaagcggtccaaccaaattaaggatttatcatggaataccctttgattcttgtcaaaccctcattctgccaaaagtgactttaccacatgtatccaaaaagtgatcaagggattttttcttttgaaatactttccaactaaaagtttctggatatttctttgaaggttagcaccaaacacccaagataggttaaagaaagaaaacaacttctcccaacattgtactgtgtacgaacacaagaagaagagatgtaaaggatcttctccataccaatcagatcattctccttccttttttggttctcctgaaatacaggaaaccactctttcacagcagccttcacctttctcaatttagcgctgaaaaaaaactggcccaaccaacagaatggctattctttcgggcgctttcaatgactttgttgcattctttgttgagcatccaactgttacaaaatataaaagaggaaggccccctttttaaaagatacaccttcaagaaaaagaggaaaatgatcagagaacagtcttgcttgtctgttaactcctgtattttcaaaattctcatcccgagtagtattgatgaaaaagcagtcgattagcgatcttgctaagaaagaaccttcccttgtccaagtgaaaatctaccattgctaagaggaacctccaaaagtttagctcgatcaatatcattattaaacttcctcatacatttagtggtttttccacaagggaattgttcatgtgcccatctcgtaatgttgaagtcacttcctacacaccatgccccaatacaataatttgacaaggaaaggagctcggggcaaacaaattttcttttcttgtaaacattcgggctataaacatttttaatctagcaagtcttttgttagaccccctatcatttacaaatataaaaggaaggaattagggaagggaaagatgggaattactcagaagaccaggggtggagagatttttggagggcccacccaccaggtgtatataaggaatgtttttggaatccaccaaagtaggacatattttgggtaaaagcttctgaaggcttttaaggagaagatactagccttcttgaaggagctagaggatagtctttattattgctttcaatcctatcatcgttgtgtgtggttctttagtgttattctgtaggcttttgtgaacacttgtggatttcgttatcaatataaatatagcagagtattgtctctgtttctccatctttgttagaattttctgcattttagagaaggagccctaatagattgttatcagagctgcaacaatcctgggtaccatgacgaaaaagtaaacggaggagaggttagaaacgacataaagggagattagagacatgaagaaaatcttattgggtctaaataaaggcgtcgaaagactagccgaagaggtagaagagaacattgctagtcgaagaaaggaaaagtctggaacgtccgatggcctcgttctaaagatggggaaactagaggaaatagatgtgacaatgaccttgggacaagggatgacggacaagagtaactacaagaaactgaagatacttgtttttgcaggggagaaccaggagtcatgggtttattgagttggacattttttttagattaatgatttagccgaaattgagaaggtgaaggttgccgtcgtgagttttgcacaataggagttgaattgattttgttggagcaataactagacgaaagtgacctcgtgggaggaccttaagaatcagatgtttgagcacttccaacccactagagaagggagtttaggagcttgtttgatttgaatcaagtaggagggggcatatgcagattatcggaagaaatttttgaattactttgccttgttgtcggatatggcaaagagtgttttgatggaagcgttagtgattagtttcgaattggaattacatgcgaaggtatgagccaccacccaaaaattttggagtatgaaggaggctccattagttaatgactgcaatatagccctgaagttagccccaagtgaatggggatcccatggacggaaaaaaggaagcccacatcctcaaataccgagcaggctagacagcaaggaggtggaactcaaacccgtcacattactatacccattaaaggtaactatgttaaaagggaaccaccagtgaagcgactctctgatatggaatttaggacacgactggataaaggcctctgttttcgttgcaacgtacaatattcccacggccactggtgtaaggtaagggagaatcgggaattgatgttattcatcatgaatgaagaagaaaacaagattttggcatatttgggagaggaaattgcagttctctgtcaagtatttcacatttagcacggttattctctatattcaaagccgactcaattctatgatggccaatgttcctttgaagaaacatacttcatgcataattctaccttttatgtatctcgatcactccaatatagacactttggttagaaggaatccatagactctaggtctggttgcattatacaatttatctaatctaatttatttaaatggaattcctaataaaaaaggtttttatcaattttatagttcaagcataaatgtgaactagcttgggcactgttgcatgacatatttgatatagttctctaaatttacctatcaagttcttgctcaatctaaccatttagttgccaacactagtaaatggaataatcaagaatttcaagtaacctgccgaagggcttctttttaccaaccagaaaaaggaacccttagaatgaactcactatttctgcaccttttgatttgatcatatttgttgatttattgcagctggccccaaggatactcca

SEQ ID NO: 7512 - DNA, 2109 bp, Cucumis sativus
  Intron number 3 from transcript Cucsa.319680.1 (locus Cucs a.319680) derived from phytozome v7.0 (chr-ID scaffold0307 8; pos 363396 to 365504 reverse strand)
gggcaaaatttttctcgaaattgggcctattgtatgtatggatatcatcaaattcgagtccacgaagttgacattccaaagacacattctgcatacacattctgtttcatccgggtacaactgctgaatctcttcataagtctcccacgttgcctcgtgccttggcaatcctttccaacttagtaaaactgcccaacccttctgccttattcttctggtatccatataccacatcaggaatagccttccactcatgattctctgtgatatattttgtagttggttgaactgtagtatactctcccaacatctttttcaattgcaacaaatggaagactggatgaattgctgcagtacttggaagtttcatatgatgattgaactatctttcgtatggtgcaggattttctagttgtttgccgcctcaggaggaataatgaatttcgtcaacatagttgctcaaaccgagcttcttctagccaaatgaatttatccttgttgcaagctcattctagtgagcaggtagattctactgaatccaatcaaaaagatgcagccgaaactacacatgtggattcaggtgatcatgatcagaaggtaaattccaacatcctgttcttcgcacttcatttgtgtaatggctctaaaattttctaggtactctattccaaaagaagtaaaaattcctaggtgctccttttactaatcttaagctggaaactgtagactacagattctcaaattttatttcatcttctaaatggggtgaaggggtttggatttttaagctatatatttgattggaccgtgttaggtttgtttagaacttcaactgattaaatctcccaattagaattgggaaaatgagattatttatcagaaaaataaaaggttatatattgattgaggtaattttttgtaaatgaaactgctgtgctaagtattttctcttctatctacccaacatatcaagtactaaagttacgcttaattgtgtttaggattgtggctctgatgatttctactccgacatactaaaagatgatattataaatctggacactgcacctttggatggtgctttggatcctttaccactgattttccagagatcagacacagagagaagatcccagcacgagggaagtgatggtttcgaatggctaccgaaccaaggctctgccaatcgaagaatcagattgaaaaagagagaagcgactggaggaaagaagctagaaagtatgaaaattggtgattgcagaaacaaggttgagaaagcaaggttgtgttccacagaagtatgtcaaagccggttgatgaacagtgactcttgtggtagcatttcgcttggctactatgttcgagttgtgatatttgttttgttgattttgatggctttgtttatgtctcgatgggaggtttttggtatacccaagagactctgctgatcttcctatggcatgctaatgtaagaggttctgttaaccaagcgaagcatatcttcaagtgtcaattttgtcatcttacttcattaatattaacttcttgataattttaggccgattttatataattttagggcagtataagatttttaaaattaatttttacaataatttgcaatttcctctcaagttttaaaaataaaacgattttatgatttttttttttgaatttttggtataatttttttaaaatgtttaccaacacggtttttgtttttgtttatttcatgatttttgaaaattgtgttttatttctaacttcttatttaatacagtggttacatagaatttttaatcaaattatgtgtgtttttaatagaagtgaatgataaaataatgaaactttgcttaacaaacagcctaaacttaaattatatttcattatcagatttctgcataagtttggaaccaatttaaccttgacacattcactcttattaaatttttctatcttttataatttttattaatggaaactgtattgtcgtgggcatgttggatagtaaaattttttaagagaattttgagttgaatggattggattggattttgctatattttgtttaaagaaatcctatttttcattttttattatttccaaatt

SEQ ID NO: 7513 - DNA, 5356 bp, Cucumis sativus
  Intron number 5 from transcript Cucsa.008070.1 (locus Cucs a.008070) derived from phytozome v7.0 (chr-ID scaffold0009 6; pos 14151 to 19506)
ttcactgttgctaacatcttcgaaggaatcttctggtaatttaaattgcttttagattgtccattgctatatttcctacagttctctcttttctccctgtctattgttctattgtctttgttttgatttttttttttctgctcaactaattgttatgtgatataaaaagaaattattggcaaaagagaacaacaaaaaggccaggaatctgggaacccatcctcaaaagaaaacgaaaaaaactacatcattacaggtttccgatcattgatatttgatagcacgccaagttgtcaaatttcaggatacaagtagcattgctcatgcatctagtgtttgtaatcttctctatattatggtcgttatatcaatatgtttgttactgtagagatctcaggatgctagaggatgagtttacagaaatatttaaatggaaattttctcatctatgacttatgcaaattttagaagcattagcttcattggctttggttttcatcattcgattacttgatgattccaatgaagaaagtgtaaaatcatcagctcattagatgacatttgtcatcaacgcaatcatcttattgtggtcttccctggagtaacctaagaagtgtgcatttttggcacttagtggttgaaaaaatctagaaccaacttctaaggtttgtttttaatatttaatattttattttatttttatttattggagggacaatttaatccaatcagttctgagtaggatcttcatctactcttttccttgtttagaatgcctatctttgtcagtaagaggattggatgttgaatcaggaacttcttgtgggaaggtttggatgagggtcagccctccttcgatcaagtgagtggttgtttgaagtcacttgagtttgaggttttaagtgacatgaggctatgtgatgaggctttttttggtgaaatgtttatggttgtagtcgtgtgggtttggactccagttactgccatagagtcacggagagtatggtgtctatttttcttccatggattgtagaacacccatcgaatactaaaggatatggaaagcaagaacaacagcgttcagaaaaagcacattcgaagagaatgtggccaggctaagagattcccctaccttgtaacacaaaggacaaacagttggcattattgaatgaggaaactttttttctgaagaacattgactgaattgaggctcccaataagcatgaccagtataaaaaattgttattcaaatttttaaaaaataaataaaagacatgtccatcctagtcttagtcaagtggtcaggtaaataccaaatgtcaccttcggtggggagttgaagactcatagttcagctcctttttgtaggtttacttttttatgacctcatattctctcttatttttttctaacgaaaggtttaccattactatttaaaaaatatataataaagaagaataaagaaaaagtcttacttttggttacaagctagaggtgatcatcgattggttggcattgattttgagttcaaaccgacattaaccaccaacatatcagttgttgcggattgatgcttgttggttctgatgaaggtagtaaagtttatcgaccgactgttggttggttaatcaattttgttggtttcaagtatctggtgagttggagaaggtagaagactgaaagacaaaatttaaaaaaatatggcaaaacaagtagctgaactagttgaaaacttaaaaaaaaacaaagcaaaagagatagagggaggagaagaatgaagaacatgaatgagaaagaaaatgaaaatcaaagggtagtgagggctaaaagcacagatattgacacgcgacataaacatgacacgacaccaacacaatgacatgccaatttatgaaaaagtaggacacaacacaccgaagtcatgttatattttttttatagaaatagatatatatggtgcaaataaatatattataaaataatacttttgaaacatcaaaataatacaattaattttgatataaccagaagttgatcttaatttaaatataaacgtaaaaaaagtttaagaaaataaaaaagaacagaagagagaaaaaagaaaataaaatcagaagagaaagaaaagatattgaaacagaaatgaaaacatgcttccttgcacacgtcctttatttattttttttttctattgaaaacatgcttccttaatatctctctccactcaagcacacttcctccactttaccacgctttctcgatttgaagagcgttggtgcttcttaggcaaagagagccaataccaagaccaccaaaaatggtttggggtagctcaaattccaattcacatggtgccattaccattaccatcaccactaccatcaccaccaccgataccaaatcacttatcgctctcccactgtggttcacaattagtaacgttgaagattcaacgatcaggggcttcaagctttccaatattccactgtacaattgctagcttcttttcttcatgcaaggaattggtttttgtactcaatgacctcttgggaatgaaagtgaaagagggaatgtgttaggctatgtttgtaaaatgtggaattaaaaccagaaaaatcaaaccaactaatcaaaataggccaatttgaagttggttggcggtttatagtgcatggcaatcgaagttgattttattatgtcggtctgtcagcaagccaaaaatggctcaaactgaccgaaccaactgattatacttttgttgtatgaagactatttgtttcacattcaataccttaaaccagtcattgggtttaaaagaccagcagcagctggtttcgattatgtaaggattacctattttattggtatatatatttttaaaatttctttcttgataggtcctcacctaagaagcactgccactcctaaaatggttacgttggtgtcagataaatgtctaacagcaatatgcacctgacacttgtctgacactaatatgccctcaacgtgcgttcgacacattacctggcatgtcgattattttattattacatttttatttttgacacggctgagacacctctaagacacgactgtgactcctctaggacatgacaacctacagattaaaaagataaataatcgtcgttgacgaacggtcaagattgaagtacatggagtcgatgaggaatgctagagtcagatcgcctgcagaagtggtgattgaagatgatgagatggttgcggcagagctggagggactgaattttccggtggcagattttaggggaaaagattttgctagagttttaagagttgcaagggcaagcgagagataagcagttttggtatgtaaaagtgcatgaattgaaactgtctcggcattactctagatagcacagggtgctctggagagagacacacgtttcatggatgaaatggagaattttatttatgtttttgaaagttgtgaaatataagaagacatgtactctatttataattgaaaaggaaactaatcctaatcctaataaattaaagatttgaccataatatcttattccttctacatcaattgtattattttgatgtttttaagagtattattttataatatattagcaccacatatatttatttttataaaaaaagtataacatgtcttcgatgtgtcgtgttttacttttcgattgacgccgtgtaaatatcgtgttgtatttgtgtcgtgtgtcagtatttgtgctttagactctcactacctttggttttcattttttttctcaattcatgttctacgttcttcccctctctctttgttttatttcaagttttcaactagcttggctaattgttttgccatatcttttttcttcaatacttctaccttcttagactcaccggatacttgaaaccaacaaaattgactgatcgaccaacagtctgttgatctactttactaccttcatcagaaccgacaagcataaatctacaacaacttagaggttggatcgttggtgtcggtttgaactcaaaatcaatgccaaccgattgatgatcacccgtagtttgtaaccaaaagttatacttttttctttttttcttttctattgtatttcttaaaaaatagtaatggtaggtaaaaaaaccaagagaatatgaggtcataaaaaggtaaaatctacataaaggagctgaactatgagccttcaactacccaccgaaggtgagatttggtatgtacctgaccactttgactaaaactaggaacggacatctcttttcatttttttattttttaaaatttggacaataattttgtatatgagtcatgcttgttgggagcctcaactcagccaatgttcttcagaaaagaaattccctcattctctcatgccaactgtttgtccttttgtgttacaaggcaggggaatctcttagcctggccacattctctgttaatgtgctttttctcgacactctttgttcttgctttctatagcctttaatatccaatgggtgttctacaatcaatggaagaaaaatatacaccatgctctctatggcactaactagaattctcaagctttttaactttaggttaattcgatcaatgctttgctttctgtgttttggaaggaaaggaatcgttgcatctttcagcaatcttctcaaccttcctattctcttttttgactcagattggcttaagtcttaatttatggtgttttcttttcgagaagtttggaggattttccattcaagatatctattgcaattgggttgcgttcattacttctttataattaaatgctctttaactttcttgttacgttaagaataactgaataagatttttatttttattattctttgttatgttttgttccttgtattcttttgtatctcagagcattagtctcttttcgtttcctcaataaaaagttcctcttttttttctaaaaacaaattggatcattaccttttccttatcatcaattttcatgtcatgtatggtaggccttttctctctgggcttcatttgtattttaattctctcttttcgataggcaaaaccccaagcttagagttgcttacaaaactaccccccagttgtctaatggctattctatgtgcatgaagtacactgcatgagtttgtacatagggttttatggcaagttggcaactaggtccatttatcttactagttaatatttattgttcttgacttgaatacaggtttaaaatctttggctatattctttttgatgttttgtaggattctttttagaaacagttttttgaaaaatgccaaattatgcgcaggtttcttcttccagcaacactcattgtaataa

SEQ ID NO: 7514 - DNA, 731 bp, Cucumis sativus
  Intron number 2 from transcript Cucsa.102090.1 (locus Cucs a.102090) derived from phytozome v7.0 (chr-ID scaffold0092 7; pos 1179231 to 1179961 reverse strand)
tacagtcaagacagaacttgaagaagaagaagaaggtatcttttccccttgtattgttttcatagcaaatcgttagtaatgttcttggagcttcttttaggattttgatatttatattaaagtatgaatgtggtttgatggagggaggggctgttggaaaacaagtgttgttttgagaaaaaaaaattagttaaaaggggctattttgaaaaatattaggaaaattgttgaatttcttgtttttattgtttcattgtttttaaattttagacggatttgggactataaactccaaagaattggagaaacattagtcaataatcaaaaagacaaattaactaagtcacttggttgcatacaagactatgtgaatcatttaaactagtagtagaacaatggataataacattatagtttagttaattaattaatggtaagttatagttaattaaatcaatcaattatagattgaaacaactacaaatatatttagtttttggtccattaattatagttgtagtcaattaaactttagttttgagttttgattttattttgtttgtagatagattcacattttcaaatatccttgatttttccttaagtactcaatttcaatctcgatcataatttatattttcaccaagtctttaaaactaattttaaagaatgctgtaatacacattgactctgcagaagaagagtgcaagtatatattcagggagattcca

SEQ ID NO: 7515 - DNA, 2093 bp, Cucumis sativus
  Intron number 1 from transcript Cucsa.065980.1 (locus Cucs a.065980) derived from phytozome v7.0 (chr-ID scaffold0069 6; pos 573553 to 575645 reverse strand)
accttgctgctgtgcttgagtacctcgctgctgaggtgaatactactacttcgttctctcagtttgtgactttcgatttacttaatttagggtttcttttttcagtttctgttggaggattttacatgttttgattgtatgtgtgaaatctgatcgtttattcatggattatatgcttggattgaagtgcattttctttatttcttgttaatgacttagaatttgattttcttacctctttctcttcatttataaaatccctaatttaatggaatttgttattattattatttatgaaatctattctctgatttctctatgtggttttgtgtacatagacaagttcattcttgacaatctagaaaggaaaaaatcacctaaggttttttttcaaaaaaaaaaaatacaattttaaggtctttcttaatatcgatttcactttttttagctttttatttttaaaattaagcttataaaccttcctttcatttgtaagatcgcgtttggtaaccacattttgtttttttgttcttggttttttgaaaattaagccaattgactctcataatcttaggatggtaaagtttaaaatcgtcgtcaaattctaaaaacaaaatctacattcttttagtttcaaattttaggttggttttctcaaaatgtagccaacaaaacttagaaaccaatgaatgaaagtaggatttgtaggtataatttttaaaaaccaaatgattagcaaacagaacttaaattttctgatgggttcttactttttaccaatattttaaaaacgattctcaagtatttaatttttctttaaaaaaagtcatttaaaattttttatagtgtttggtaaccactcataccaactttttttaaggtattttaaaccatttttatctaaaagaaaattaaacaaaaattagctttggaaaaatactttttaatttgaccaagaattctacaagatgtaatagtttttattttcaaaaataaaaagtgaaaaaagaaatgggtagcaaatagaaactcaaatttctgtaaattgatttacaattgtttcatctttgtttctatattactgttttcatgttttgtaaagagacacttaaatctctagttaaattcttaaagcaaatacaaattaatagaacgcggatatcacaaacacttttatttcaggtcttttttttttttcaaagatcgttgtttggtagagcttttagagtttgaaaaagcgtaggaatgttgtttataaatcaaacactgttttaaacaacaaaattcatttttttcaaatatttaattagtttattttagtgaatctgaaaaattagaaattcaaactgaatagattctcaacttccctcggtatccgctttggcgttgcttttataactcttttccgctgtcctttatgtcctgattctgatgctttatccaaacgactttgtgttgattttggcttcatagaaattgctgcctttttttttttttgtatttcaacaattgcggggtcggatatcaaaccataaatctttaagatggtaaatcgatgtctttgtttagtaagctatgcttggatcgacacctagattcattctaaaatagaactttggatttttttgtttcttaccaagagaaaatttgatcatccattgaggtctagtagaattcttttaatttattcaccgatcaaaccttatacacaagtgtttgattataatacaagaattgttgtaatgctgagctattgggttattgtgttgaggatatctatacaagatgaaatataagtatcactaacttccaaacttgaacatattgatgtcgaggtgatttaatatagtatctgagttaatcatcataggaatcataggttgaactaatggtaaatttctagtgactacctaactagggtttaatatcctagagttttcttgatatccaaatattataggaaaaggtaggttgtctaatgagattagtcgagatgtgtataagctgatccagaaactcacaaatatacagatatgtagcatatgagtaagcattctatcacgttatgctttaggttttggaactggctggga

SEQ ID NO: 7516 - DNA, 3980 bp, Cucumis sativus
  Intron number 1 from transcript Cucsa.079070.1 (locus Cucs a.079070) derived from phytozome v7.0 (chr-ID scaffold0079 3; pos 1653860 to 1657839 reverse strand)
gcgctcctgccgcccccatttttcagatctccaaggttctatttgctctttattttgtttcctttggttatattctcttcactgacggtgaattgttgatttcttcttcaccattgtcaactgtcgtacgcgtaaattaaaaaaagagcataatttctatgggacatatttaattttttttttgaatttgaaaattgtgaaatgaaaattttaatgcgctgattacaaattgcccaccattttttcttggttcgaaatgcgtttatttagaattcttccaggatcaggggttgcatatagaaatatatgtttgagagtgattttggcatgtcagtcgttttttctattacttaaagtcctaatcctattcaattcttattttcagagattttttttttaatgttagtcatggaaaagtgctgaatctctttagttaccgcctatttaaagctcaactttcatagaatcttggatcacacacatctttttagaatacttcagttctttattttaaaatacatgagatttattgtaggattcaaattgtaactaaggaaaaacgttacaaacttatggatttgaataaaaaagaaaaggtataattcgattttagctattcatcattatctaattggatcagggaagggagagatgaatcagctaaattgcatgcttattttggtattagtcctatttagctttattttaactactaagttttagctattcattattatctaacttgatcagtcaaagggaaatatgaataagaaacggatagatgaggaatagtaatcttcttagacattactggttttgacataaaggggttttacccaatgatctcatttacaatggcttacaaggttttcatggatccttactacttagaatgaagagagtggccgcaaatgtttactggcttttcaattggtttcaactttcaacactttgccaataatagctcaactagcacacaagcgtgttagtgactatgatgtctgtggttcgaacacttctatcctcgcaattttctttccattattctcggtaaaaaacctcagttggttcgatggttaaccaagaggctaatccgttgattctttagagaaaatttatgtttgttttataacccctagtgctgtggagcagaagcatcattcttgatcacttgcattcatgtttcctttacaatacttgacttgaaggtcacctttgttcaagtaaattttgataagaaaatcgagaaatcttgcttatcgtaggcttgaccggatattataggagatttgtgaagggctatggtgagattgttgcccctttgactaaattattacaaaagaacttcttccaatggaatgaagaagccactgtagcctttgacaatttgaaattagcaatgacaacgatacccgtgttagcattacctgattggtctttgccttttattattgaaaccaatgcacggattggtttaggggctatgttatcccataatggtcatcccatagctttttttagtaagaaactatctcctcgagcccaaacaaaatctatatatgagagggagcttatggcggtagtactatttgtgcaaaagtggagacattatctcctagggaagaaatttactatcatttaagaccagagagcattaaagttccttttagaacaaagagagaggtgcaaccccactcccaaaaatggctgaccaaactcctcggatatgattttgaaatcctttaccaatcgggatcgcaaaataaagcggctgatgtcctctctaggatcgaacaaccactggaattgtgaatatggaggttgttgagaatgaggtaaaacaagatgaagatctcaaaaaaatcataaaggagttgaaacaaaaacccgaggagacaagtaaatttcagtgggaaaatgggaagctactgtataagaaaagggtagtgttgtcaaaaacatcctcactaatacctactctgttgcatatgtttcatgattctgttttaggaggccactcagggtttctaaggacatataaaagaatgagtggagaactacactggaaaggcatgaaggctgatgtaaaaaaatatgttgagcagtgtgaggcttgtcaaaggaataagtacgaagcaaccaaaccagcgggggtgttccagccgattccgatttcgattctagagagaattttggaagattggtccatggactttatttaagggctacctaaggctggatggatgaatgtgataatggtggtagttgatagactaagcaaatattcctatttcatcactatgaaacatccatttactgctaaacgtgtggctgaagtgtttattgatagggtagtgagcaaacatggtataccaaaatccattatctccgacagggacaagatatttcttagcaacttctgaaaggaactatttgctaccatgggcacaattttgaaaaggagtacaactttccaccaacaaacagataggcagacatagagggtaaaccgatgtgttgagacatatttgagatgcttctataatgagcagcctcacaagtgggacacgtttattccatgggctgaattgtggtacaccacaacctttcatgcttcaacaaaaaccaatcccatccagattgtctatggcagatcactccctctctattgtcctatgggtagagaaagacacctaataatgaggttgaatacatgctgaaggaaagggacttagcactgaatatgctgaaggaaaatctaaatgtagcccataatcgaatgaaaaaaatggcagacactaagagaagagagctcaaattcaaggtaggagatgaggtgtacctaaaactaagaccataccgacaacgttccttagctcgaaagaggtgtgaaaaattggcacctaagttctatggaccctataagatgaaccaacagtttcccacttcccaccttgaggacaaggtgaatctggagccgaggtattgtaaggcccccaattattcacacatatatgaggaatggtagaaagttaaatacaccagctattaatgatgagggaatgattggagaggggatcgtgcagggcaaggcccactgagaagaaagatagggagggctataaattattgttgataaggggtggtaagctaggttattttgcatctttatggtgtaaaggctgctgtacccgaaaagggtctccatctgttagaaggaggctagcatgttttttcttgctgtgtttttttgtttatttctatattgtgactgtgtaatcatcttttggcttatatataaataaaaatcctcaaagtatcgcctctgtttagccattgttgggttatttttattggtagcctaacatattacttttgatgtagcatttatgttttgtttgaatatatatctttgttccctataaaaaagttatggatcttaaagtgcttgtaaatgataagttgttgaacataataaaaattttaggggaaaagcagtattatttttaatagatataaaatatttttgaatctaatctttgagtcatgtaatttctccaaaaaaaaaaaaaactttaaaccatgcaataatgctttatcaagaaaggcgtttgagctgctttcattaggacaatactttattgaagaaccaattagtgtaaagggttaaccaagatgtatgtataaagtatctgaagtgcaagatgtctgttttaatgtcaaatgaaaatgtctttcatttgttgacaatgtgtaagggttcattttgtatttttcatgaatgctacaggtgtttgttatatttaatattttgatcctttttttttaacaatgcatcattaatttttcgagtcatattacatctggcaaattaaagagggtatgagtaatgatgttaagttactaagcgtatcaaatgccttttattctattgacagtatgtaccaatcactattacttgcgttttcagagggcagaag

SEQ ID NO: 7517 - DNA, 4637 bp, Cucumis sativus
  Intron number 4 from transcript Cucsa.017950.1 (locus Cucs a.017950) derived from phytozome v7.0 (chr-ID scaffold0025 2; pos 213229 to 217865 reverse strand)
cagttttggtaagatattgattctagttacgccaattctattatatatttaatataaaagcatgtgcctcctttcatgttttatgtaccaaattcattcttttaggaaaatgcatgcaatgaatattaggccttttatcccgcatgcttccaattttatcggaggtccttgaagagatgccagttatcctgcatcacaggtgtgaaagagcaccaaagagcatgtggatggtgaggtgtaattggcactattgggaatataccaatcttaacattaagaacggaggaagagtgagattagaggagaaagtaagttttttcttctttctcccctctctcccttctcctaccttcttcttccctttgcatcatctcatcccctccaatcatctttctcagttctccagcgagtgtctagccttttatttcgatcgctcattcagaactagatatggaaatggaaagttgcaatatagttgactctcttcactgtatttggttatggactattccaagatgaagacgtggacggcaactaaattctgccttcatcaaatttcgaaccgagttggttgcaagaagttctctcagaactaagccaaaaactagaaaatcaattctttctcaagaaagagaagaccgataatggaataacagaagtatctaaattcagagccacaaaaggttggatattgagatgcactctttggtcatgtattggcggtaggtccttggtcatgtattggtggtagatccttcattcaagttcttttaggtgaggaaaaacagggttggaaaacttttattcaattgctaggaggcttcaaatcgaaacttgaatactcgacatggatttcatcccattcaatgtcatcaaatatccttaagaaggacgtgagcgcacgaaagtcaacatgggaaagatatgaagtcaaggtgcatccgaaaaaaagtcacacattcctctgtttttgacctggaaaaatagagcatgagttgttactgtattataaagaatccaaaagttctcaagactaatttcaacaatctttggattgtaacacgactttttgagtttgataaatgctgagccatagctagctcactaaaattatactttgatactgatgtcattcttaaaactttgtctgcggaatgtgccttaatcctgttggattagggtgagttggaagcttttgctgagttcccatgaacatggcaagaatgtggtcagtttcatttaaataaattgaaaagtggaacaagtatctacatggtcgtctgaatgtaatgaaaaggttcaatgggtggatctcgattaaagatttaccattgggctgttggagctgaaaaccttttaagttactgggtcttacttgggcggattagtatctatagcaaatggaacgttgaatcttattaatgttgttgaagcaaaaaatcaagttaaaagaaacttatgtggttttatgcaatctaccatagaaatttcagatgaaagcaaaggtagtatttttttgaattttggagatggccccccccctcaaagtttaaggactaaggtgctttgtttattaaagattgttccaacctaatttatttgacttgactaaagcaagttatgattgatgaagatttagattcttctgttttgaatctagaatggacatttcaagctgccccgtagtccaaaaaattttcatgaaattattttgcatcgaagtagcttcaaggggagaaccacacacaaaacccactagaaattgacagtagagactctccgacatgagtcttcctgctgacgatggaagaatcaaggagaagtgaacaaactcacgcttttcgaatgagacggactacgacaacgcttcgaactgaaagcagtccaagggatgcctttattcttggtgcgaaaagaaagtttcaaaatttgccagttgttagccctttaaaggacgcccataagtcttaagaagataaagactcaacagtcattaatgattcctgtttcccaattaatgaacccttgcccaaagtctcctttgtcccattagcaacctctcttgaaaataacaactctaagtctctctcatgggtaggtgaatgaggttggactgtgcaagcctattttgtcttccacacctcacctttcaccttcatccctgttggataaagggttatataaagttatatggaaaactagtaggaaagttaatatactcacctttgggttgccgaacttatgcaaagaaaactcccaaatagttgcctcttacctttggtttgccctctgtgcatgaaagaagaggaagatttaccacatctgtcttttacatgttcatattcaaccagttgttggggaacctgttctctttattcagtgttgcttgggtttttggacatttgtttagctcaaaagttcaataggttcttttgggtcttttcttaaagaaagaaagggccgagactaatatggggaaacatgactaaagccttgcttgtggaattatggtttgaatgaaatcaaaggggcttcttcaacaacaaaatctataatcatccttcagacttcttctaaaggccaaagaccaagaggacgtatcttggtcccaatgtgctgcaactgatccagtgggcaaaagagcaattctaaagagtctagaatattgctctttaaagggagtgttacctacctaaatatctgtccaaaagccaattctttggccgttaccaagattaaaagaggcaaatgaatcaaccgacctccaaactctagcaatgctaacccaaggactccttaggctattaccagacttccctttagtgaaccaatcggagggcttcttaccatgctaattcctttcaattcttaagcttccaattactttgaaagacttggagtttcttccaagattcgggtttacatgaagcctgtcttctgctgggccgtacctgaccatgaaagcaatactgatatctctcttgtcgaagatctctagtcacttcctttgctcccttctggtatgaagattctcgttggataatacggcaaacctacctcttgcattttccaacactttcaagatattggaaggagagataacgagcacacactaatttacgtggaaacccgagtaccgggagaaaaaccacgattgtttgttgatattattttctaatgaataatacaataggtacaagggagaataaatagagaataacaagagaataaaaaaggaaaagatataggaaataaggaaaatattcccataatctttccaaaaacattctaagattctaacaaggaaaatattgagaaagtaaaggaaggattccaacaaaaataatggcaaactctaaccttctttgccaaaagaccatagaattcttcatgtctgcagcgcccactaaacaatccctaacacaagctgaggtgctgaaattcagctccagtgtaccaaatatccttccatttctttcttctatgcaaatcttcctagccttcccccacaaacccaaccaagaatttcttcccatcgatcttgagctttcccatctcttagattttctcaaattttgagagaaaagttatcagaagttcttcggttgaagcttcctctgaattcagtgtgtctctcagtgggtgcattatttttgggtgttagttcaccttttattttgtttcttaatttatagtggatttttgttagcttgattaaggtcaatggtctcagttaggttgggcagtttagatgatttttctcagtttttttattcgcatgcattgatagatttctgtgaggagtttcgctttggtgaattcatcgtgttcttcaaaatattgcttgcttaattttttagtttgagttcacccacagttgtcttttcttattttctttaggctgtttcaattttttctttagatctaatactttatcgcaaaaagatttgtctatcttatttttttattttgtgtctcaagcattagtctctttttatcatttcattgaaaaattgtttcgtagatttcaattttacgaatatattcataaaatactgttgtcaacggttgtttttctaaagttaaaaactaataaaccatcatggattgacctaagggtaaaaagggagatgtagtctcaaatagttcatggttcaatctacggtgatcacctaccataggcttaggtgggttgccccttttagcaaaaagaaaaaaaaaggtagaaaagtaataaattatattaaagttattcttacttccaaactaagttaaatattttgttattattattcatattcatatcatgtttttctttttattattgaaagatattggagatatctattaattcttattatcgatgttgtggcctttaatttgtagatatattgatatattgatgaatatttcaatctttaacctagtcggcactttattttattcataattcaagatttcttggttaggaaaaaagagaagcaaataaggtcaagtaccattatatattaaattttgatgaagtttctatctactaaatttgtccccagtacaaagcattcttcacatactagtctgctgctctgttgttggacaccacaccatcaatatcttaatcttttgtgcagttacttgaa

SEQ ID NO: 7518 - DNA, 1089 bp, Cucumis sativus
  Intron number 2 from transcript Cucsa.362150.1 (locus Cucs a.362150) derived from phytozome v7.0 (chr-ID scaffold0361 1; pos 133856 to 134944)
gaaggcagacaagttgaagcaatctcttccaccaggttagatttactttcttaataaccaacactacaatgtgcttagagtatgatatataggaaatggctgttactgtagctaggtaaagtgctcttcaatggttggattgattacaactgtttcataatttgtacgcgacgagtacaaatttccattgaagaggctaatatcgaacactgattttggctcaaatgatccttaatctccttgaacataccttttcttttactaacaatcctttatcttctacaaatctcctgcttccttacattgacttctttacaaaagtttttgttgttctttaggactccccgaatattgttcttcttaactacaaggatcaatcgcttacaaccccctttagatacgcgcaaagattctttggcaggcttgttttttccattctttagggaatttaacttgactcttgacagaaattttagaccttttttgaagttgagcaatctgagtaggccattagcatcttggggcatcaatcgattaactaaccctttattattttggattggtgtttattcttggggctttttagattccttttcttgaactactattttgtgtgcccttcttgcacgcatggtttcttgttaaggtaaatattagaataccattttggtctcgtattttaggacttacatttaatattgtctcaatctattcttcgcatttttagtaagtttttgtattttagtctattattttagtttatgatcaactttttcataattgtaagatctctagctctactatcataacatttgacattgaattttcttcaatataaattattgtaatcattttatgaagttctatattaaaaaaaaaaaagttaatcctctacctaacataaaattactaattcgatttcaaaatttatgaaaggtgactaaaaccaaacctttgatagttaatcccaaaatgttattttaactttaatcaaaattggtgctaagctgaggaagaatttggtctgaatattgactgacatttatgtttgcactttgacaggtttgagtgtgcaagatctgtgaaaga

SEQ ID NO: 7519 - DNA, 1362 bp, Cucumis sativus
  Intron number 8 from transcript Cucsa.353790.4 (locus Cucs a.353790) derived from phytozome v7.0 (chr-ID scaffold0353 7; pos 109973 to 111334)
ttgctgagaaggtgtttgacattctaaaggtacttctatgccatatatagtttgctagtgataaaaaaactactgtattaaaaatttaaatacagctctagtagtggatactggatacttcataatgtgtctgctttctggttagttatggatgttatatgagcagtctttagagatcttcattaccattaggttactcttttagtgttactccaatggtcctggggaggtcgtggaatttcttgccttgttttcacaatttgaatgaaaagttttttaataattggtaatatttctacctcagttcatattcccccacttttagtttataaatgtggcaattttacaactccattgtaaaatgctgctaaagattggactcgtgggtttcaagttaatatttatattttatgaataatcgaactttcattgagaaaaaataaaagaataaacaagcgtacataaaaggagaaatcccacaaaaagtgagtcaaccaagtaaactaagatagccaatgattacagaaagacttgaaatctgaaatatttgtggactagtgtagctgtggccacttattgagtggtgtggctttgatagtagtaatgtggtagggcaggaggaagagactaggtttaatgttgtttctactcttatttctttgatgtccgtttgtagttatttttcgttctatcaggccattctgttttaatgtaacatgtttgattctcagtattcaataattttaagtttgttgactttgagttcgacttttcaaaagaataggttgtggaaatttaaactcctaaaaataatactatgctaaaatgtggtttcattacttgaattattctttcctatcttttgtacggtttgctagtgggaagttttttaaaaaggaaagagtaacatagaattagagtgtttctagattgactttctaggtgttttaaatacatgttgcaagaaaagtgtttataaacacttagaaagccaatccaaacgaacccttaataattacttttaaaaccatcataagttggcctagtggtaaaggaaacatagtctcaataactaagaggtcatgattttaatccatggtggctacctacttggaaattaattttctatcagttcccttgacactcaaatgttgtagggtcatgtgggttgtcctataagattagtcgtggtgtgcgtaagcttgtctggacgctcatagatataaagtgaaagttgttttcttaatcggaagtttgaatgagaaaatagttttttttgctgctttctcatgatctcttagtttccgctgttctttgctctagataggcttgttaaaaatttctctcatggtaacaggaagc

SEQ ID NO: 7520 - DNA, 2978 bp, Cucumis sativus
  Intron number 2 from transcript Cucsa.365000.1 (locus Cucs a.365000) derived from phytozome v7.0 (chr-ID scaffold0361 1; pos 2491925 to 2494902)
ctgttgtgagtactatgtcctctatcttatatcagttcgaacggttttatgggcaaggcattgattatggcaagaataaatagtactttaagaattaatctctgccacacaattcttgatctatatagattcgtaacaacataagacactctttgtgaaattgtatttaaaaagtatggctggacagcagaaagaacatttgaaagctggatgtatttattatttcttacaactaaatcatctgaagagctttctttgcattcttggttgcttggaaagacagaagctttttccattctatatatgtgttatcttgaaacgaaagatttcatcaaaattttttagatgaggctctgagtgataaaggatttgggaataattgaagaattgacacgaatacaatgaacaaactgctggaaaaaggctgataaatggtatgaatgtgaagtttgaaagggggacacagttttttttaggaagagtcaggagtcaggagtcaggagtcaggatgacccaggctcttaaacattcctctcaaatttggttattctaggcttgtcatgctggtcattctcttcttttggctgggacctcagttttagatggaatagtacgatttaaagattgagagcgggagtgggctgcgctctttagttggatcacaaatttcacctttagtgtggaaaatatggactcatgaaaaagagggtggttattctgtaaagtccaggggaagcaagctaagtggaacctctgaagatatcatcagcccctttgttaacctcatctggaagtttagaatctgatataggggcattttgggaaattcatccatttgttattttgtctttataaaatcatgatttaattttagtttaggtgtgttccagcccttcccccttgggtctatttgagggggtaggttagttaactaaatagttaggtgtgattaaacccttatcccgtgggtctatttaagggatagcttgtttctctcattctacacaattaataaaattctctccaagatttactctaagattttagttttcaccaaactggtattagagcacttgttgagagggacctgacgggtagagaaaaccccaagaacaacgaccttcgagttccattgatgttgaagcatcttcctgtcctcaaacaattgaacaatgcctcacggggtgtggagaattccatcattgagcaacaccattgtagccattcaacaagcaatcgaactccccatggttgacgttggcaaaattttgatgaatcaaaacaagggcaaagagattgagtacaatcatcaagaggttcaagaaaggtccctagattgagtataatcatcattggtttggaggattaaggtctttagaaaggttcgtttctttacctggtaggttcttcatggttgtatcaatatgttcgataggctttcaaggaagatgccgctgttggttgggcctttttgctgtattttgtgtcgaaaggtggaggaaggcttggaccatattctttggcattttgagttgttgagccatgtttgggacctttttccagaattttggcatgagcactgtttgtcacagagttgttagagatatgattgaggagttcctcttgaatccgccatttggggagaaaggccgctttctttggtgtgtaagtgtttgtgctattttgtgggtgctttgggatgagagaaatagtatggtgtttaggggtgttgagaaggggtgtgaaggcttatggtctcttgttcgcttttatgtctcctgttgagtttgatttcgaagatcttttgcgattatcctatgaacatgattttgtatagttggagtctcctcttttagcgggattccttctttttgcgggcttgggattttgtttgcctgcgtattccttcactctttcctaatcaaagttgtgtttctctcatccaaaaaaaaacatcaagaggttcaagaaaaccaaggagcacaatggcagcagccaaaaatgcaacaaggactggtacaagatggtccacaaagagcaagaaccttcaagattttctgtccaccatttgctccgtcccaagattttcgttttcaccaaaatccttaagtgataaacacctacaacagatgatagagaaaatgtcaaactggtcttggtctccttggtgggtgttgtgcataaaggtggggaagacagtcaacacttgttcttctgctcttatgctggtggtttggaatgagctcctcaaactcgtctacttttcatgggtttttctaagctgtaatggtttgtttttgcttatttatggaacctattttggtggacgtgccagggttacatgattgaagttatgtcttgtaattgtcctttggtggctccccattttagctatagtttttttttaaaaaaaattgtcttctattactgtgatattgcttttcatataaaatgggcggagaaagttcactttttatccatgtacttagttgtgcgactcataatttaaccttgttttagtgtcatccaactgctatgttcaatctactaaggattatacatttttcatttttttgtatattggtgttgagttttgctattcctatatttgcatgattttatggttagagttggttgtcattgtgcgtggcttgggcttggatatttctgtcttactttaggtgttttatggttgaattttacatcatttcttggtttactcttagcacttttattttcttcaaagctgatgagctaggtcaatacttcaacattcttattctactttgaaattcaaatatatatatgtgtgtgtgtgtgtgcacacacaaacacacaagttaatgatgataagcttttacagttttactctttagggttcttctccttaaactctatcttttctcatctcagacttctgtattcttgtgtgtgtatttgcagccagttcggcggtctcaacgacaaaagagaaggcg

SEQ ID NO: 7521 - DNA, 1535 bp, Cucumis sativus
  Intron number 8 from transcript Cucsa.353790.2 (locus Cucs a.353790) derived from phytozome v7.0 (chr-ID scaffold0353 7; pos 109973 to 111507)
ttgctgagaaggtgtttgacattctaaaggtacttctatgccatatatagtttgctagtgataaaaaaactactgtattaaaaatttaaatacagctctagtagtggatactggatacttcataatgtgtctgctttctggttagttatggatgttatatgagcagtctttagagatcttcattaccattaggttactcttttagtgttactccaatggtcctggggaggtcgtggaatttcttgccttgttttcacaatttgaatgaaaagttttttaataattggtaatatttctacctcagttcatattcccccacttttagtttataaatgtggcaattttacaactccattgtaaaatgctgctaaagattggactcgtgggtttcaagttaatatttatattttatgaataatcgaactttcattgagaaaaaataaaagaataaacaagcgtacataaaaggagaaatcccacaaaaagtgagtcaaccaagtaaactaagatagccaatgattacagaaagacttgaaatctgaaatatttgtggactagtgtagctgtggccacttattgagtggtgtggctttgatagtagtaatgtggtagggcaggaggaagagactaggtttaatgttgtttctactcttatttctttgatgtccgtttgtagttatttttcgttctatcaggccattctgttttaatgtaacatgtttgattctcagtattcaataattttaagtttgttgactttgagttcgacttttcaaaagaataggttgtggaaatttaaactcctaaaaataatactatgctaaaatgtggtttcattacttgaattattctttcctatcttttgtacggtttgctagtgggaagttttttaaaaaggaaagagtaacatagaattagagtgtttctagattgactttctaggtgttttaaatacatgttgcaagaaaagtgtttataaacacttagaaagccaatccaaacgaacccttaataattacttttaaaaccatcataagttggcctagtggtaaaggaaacatagtctcaataactaagaggtcatgattttaatccatggtggctacctacttggaaattaattttctatcagttcccttgacactcaaatgttgtagggtcatgtgggttgtcctataagattagtcgtggtgtgcgtaagcttgtctggacgctcatagatataaagtgaaagttgttttcttaatcggaagtttgaatgagaaaatagttttttttgctgctttctcatgatctcttagtttccgctgttctttgctctagataggcttgttaaaaatttctctcatggtaacaggaagcatggaacaaatttaattcagaggaacttttctaaaagaaaatttatgatttttgaaagagcaaaggggagaatgaatgtatggtttagaggaaagcttcgcattcatggtattcttctgatttcatcttggcatgcagccaataagccgtggctttgcgatttggttgctgag

SEQ ID NO: 7522 - DNA, 561 bp, Cucumis sativus
  Intron number 1 from transcript Cucsa.128250.3 (locus Cucs a.128250) derived from phytozome v7.0 (chr-ID scaffold0102 4; pos 302245 to 302805 reverse strand)
atttctctctgcttagtagaggtaggagaacacaggtagtactttgaattcttaaatttcgtagatttgggtttgtttttcttctgatggggtttgttttagatgtgattagttgttgattattctgtaaaattagatgtagtttcattcagaagcttctggggttgccgatttttggccgacactgtaaggagtttaatccttaacacgaatttctgagaagcttttggtttttttatctctattttggttgcccatgttattcctgtgatcgagcttgtgggattctatttctgccttaggttttttataatttttcgtgctgttcaaactagttttgttttcatttttttcacaaaatagttatgacgaatcatgattcagtggttcatgattttcaaaggaagaagaagcttaaacaacagttacccaattggaaaaaaaaactctcaaacaaccgctttttgtaactgaagtgattacttcatttaacaatatgttggttaaatttgttgcttaatcagttgtcttttctttggattgcagaactgtctcctaggc

SEQ ID NO: 7523 - DNA, 6636 bp, Cucumis sativus
  Intron number 6 from transcript Cucsa.138410.1 (locus Cucs a.138410) derived from phytozome v7.0 (chr-ID scaffold0106 3; pos 55512 to 62147 reverse strand)
gacttagccaggaggttattagattaagggctcaggtatcgtattttcttactgcttttagtcccttattggcatttatgtgatttggttagttaaaactgcaatgatgttttggaagtggcagtatatttttcttgtgttgatttgtgtagagatttatcacttgtatgtataagctattttacgtcgttatgtctgtccttttcttagcataactttttctcgatgcttttcttgttttaatttgtttagaaaatgcttagcaatatccatcagaaaatgctggaacggagagtcaggtctgggtttgatctttgaaagggtttttctcaactgagagaactggttgaatggtcttccctttcttttagggtgctcctaccccaaagatcaaaccaattttttctcttaacaccacctattattatgagactttaaagaagggattgtccagatttctcttccccaaggtttgtgttaatttcccccatggacgttagatttcttttgttgttttctttatttcctcccgttaaacagtaaaaaagagaacacaaggtttacttcggaaatttctagtacaaggagaaaaaaccacgataacctcttttattattttcacacacaatgcaagttactaaattagacaactttataggctctagcaagctctaatgcaaaagttgaaataaacttagagcaaagtaaaatactaaaatatcaaaggatcgtatattgtattcttggctttacacatatcactatcatatgctgtaaaggcagtatggtagccttcttcgacatgtctattcttcgttttgtttggatatgatgaaaacactgagggggtgtcgtcaacctagtcttgagatgttcgggtgtgtttgctgatcttgaaacttcttttgctcattatataaacctcttgttctatgagtttttgtctcatttattgttaataaaagagattttttccctttcaaataaataaaaaaaactaaaataccctcaagactataaactatcaacaaagcccctgacgccttgagtttaggagggggatatgaatgatccgatgttacatttgaatgagaaagattctaaggacatgaaaataaggttaagaaagaagaatggagagttaatacctataccaacaaggtgcaccttcctttttggtggcccaatcataaatactccaaagttaagtgtgcttagctcgaaacaattctatgttgagtgacctctagggaattttcctaggatgcatgtgactgagaacaaaacatgctgaaaggacacgtgttggtttgtgaggacaactttcactctcataagcctctttaagacaagtaagaatggtgttgccaggtcgcaggggaatgtcgaggatctgaattccgaatcctagacttggggtgttacagccccttacatacctaatgatcaaattgagcttcaaaacttggagggagacttatataaacttcttctaattcactatttagaagtgtattttttcacatcaagctggtgcatagaccagtttttattaattgcaacagaaaggaggagactgtgtttaactttactattggggagaaagtctcataataatctatcccataaatttgagtaaactctttagctacaagtctagcattgtacttttctggagttccatctgatttatacttcatagtgaacacccactttctgttttatccccttttggaagagcacaaagatcccacatatcattcttttcaagagctcccatttcttccatgacgacaatcttccactaaggattttccatagccatatatatgtttttcaatattgttattgtatcaaggctggcaacaccttgaactcagaaaacagattactgtaagatagaaaactatacatggggttcttggtgtaggacttggtgccctttctcaatacaatgggcctgcgaagagagatatcataatctcctgattttcctgattcttcatctattatgagttttttattaccttttctagcttgagaaagagtctcaccctcttgtgtttctatcgaagtttcatcagtgcttgcaaccacactattctctcgaattcacagatcagtcctatcattctcaaccaaattagcaatatcatcctcaatgcacaagttagtattatcaagaccagtagtacctcgagcttgtgttggttaagatccatggaccgtagtcgacggagcaatagaggacaccatgtcctttgtgagattcttcctgtagaaaattatccaagggacttgttcaatgggaagaacggtgtcatgggcacttaggatgagttcaagaaggttaattgtatcatggacactcaggatgggtttaggaaggttaatggtggaatgggcactcgggatgggtttaggaaggtcagtagggattgaagatgtagactggttagtctcttcacttgtactctccccatgaagacgactaacgaggaaaaaaggttgatcctcaagaaatgttacatccatggagatgaagtattttcaagaagggtgcatttagggctaccctaagagtagtgatttgttgctgaaaacttatatgtagattagctaactgttgttgtaccattatcagagataaaccaatcgaaccttgatgttcataactaggcgacatgtgatgaggaagacctggttgctgcgagaagcttgttgccacgacaagaaatttacctttttggtaggtggatgactcacaaatctcagtttcatggtgtatatttcagctagggtttccatctgagggttgtggcgtcactagaattggatagatatgcaatgtttgaagataatgatcaatgactgctcggatatcagcggaaaaatcggaggctccgacggcggtgacaattgtgattgaagcaagactggtgcagaactaaggttatcttgcaccggttggttttcaacaatggcggctaggttttcgtgaccatgctctgataccatgttaaatggtagaaaagagaacacaaggtttatgtggaaaaccctaaagcagggacaaatagccacgatggagagtttcttttataattttcacacaacggaagtttaaagagaagacaactttataggctctaggaagccctagtacaaaaaaaaaaaaaaaaacttggagaaagtaaatcactaaagtacccttgggactacaaactatcaacaaagccccttatttccaacgcctccaatgctatgggattaaagtagtcattttgttggattcttgaatatgtttcaacctcatagtgggtataggactcatccattgattctctttcttggtcatgtttaattagcaaaagactaattttgagtcttgaacatttatctttggttgtaaaaatccaagagatggagagtctcttttattattctcgatgattctttaattcatgcaactcccaacaatcttgacgttgtttcttgaaaaatgggtttgattgtattgttgggcctttttcctatatatattgtcgtcatcttgttccattccaaactgccttagaaatgtcattggagtcactagaatcacttgaaccaaatttctactgtgggtaatgataggttctttgagaaaattgggcatggaaaaaactaatatgttgtaattcttcttctgaatcacttgagttagaactccagcatttcttttttggaaatacaattgattttcttgcttgtagcaactgatgtattttttcttggacatctctgatcagtaattgttcattcttgcaaaatcttgaaaaatcattggtttctttctttcttggaatttcaagggttccccctaattagatgtgtgttgtttggtaacgagcacaactcatgaagctcccttttgtgattggcgtcaaaaagagttttccagtcttccaccggtggcaatcaatgttagtccaggcgatcactttttgatactaaattgatgtaagaccaagtattctcaaggaatagttctcctagaatcaagattgtgaatcttttattagaatgataataattgtttcatataataagaggggaagacttatatttatagagttttatcacaagtgtgggtaaaaatgaaattaatctagaatattaactaattacccaattaacctctattcttcttacattaggaggatgtccaaggccaaaagagtagcgagaagaataaaaatattgctagggaaaggcaaagatcagccaaaagcccccaaggtcccaactgaagcagccaaaaattcacacaacacaccaagaaaaagaaagttgcatataaggcatttatcattgtagtcgattagatgaattagtattgccaagacttagctcaaaaaggaaaattaaattttcctagggtaatgatcataccaaataactgaataaagacctttcaaaactggatgagcctatcaaaccacccatgagagacctaacaaaaaaactcaaagacgaatgcaaaagctagaaccaagtatcacgaggtgaacaaaccttgagtgaagtcaagaaatgacacagattaccccattcagctgtctccaactccttgagattctaacaaagatgcaaatcccaagcatatgaatctgcaacccacacgttaactgagagttgcggtgcattaggatgaagagcaagatgaaaaagttgaggggaaacagtggaaacaacaccaaaaagtgagccaagagtcttttcagaaggaaacgaaagattccattaccaagacatcaatgtccatgaagtgtcatcaaatgaatggtccgacaaataaagtgtcaagtggacttagaagtgccatgatgagtaggggtaggccagctgctcccattactaaattcatagtatttggcaccaaaaagcactttccaaagaacattctcttcatgaagaaatctccaaattgtatgtcctaacgcttttaagatcatcgacttgatgacaacttatctaggatatcctatggcctatgcggtttcatgtgttaaggaaaattaggatttatgattattattattttccttttatgtattttgctttagtaggtttttttgagatctatttattttcctacataaaaagtcattatttagtatgtactatgaattattatatttaataatatataaaattaacatggtatcagagcttagggttttgtctcattgaaccctagcagtcacattcttcaatctctgccttcgttgatcagtcatcgatggaggcagacctgtcgcttgcttgttgtaacaagtcttgttctgcctacccttgctctagttcacacgcacttcaatccattttgttgagctttcatattgtacttcaatccatctgttgttgaacaaatttgcacctgtctcaaatccattcttcttgtttgcacacagcaaccaaagttcgctgttctccgtgtattctgcctaactccatcttttcccttcctatcacgtgccgcttcagatctgatttgcagccgctacagactgttcgaatcacgtttgtgctccctatttcgtgaagatcgtgcaacatttggtttagtcattaaggccggctcatttaagttttggttcaaccagttttgttcggtgttttcattttggtttagtcaagccaattcagttcacttcagtaaaaccagtttgagttcggtttgcttcaagttggttcatttgcaattatggcaaatcaaaataataataatcatgatgatgatgatgatgatgatgatgatgggtttttgttccattttcaaatcaatctttgtggggtttgtttagatactagaagttcttggttttgttcttcgtgggattgtgtttctagtctagaagttcttgtttttgatcttcatgagtttttggttctatcctagatatgttgatttgatttggacattttttcacaaactcaagttgttcgtgattttacaccttgggtttgggggagtgtggtaaaagaaaactaggatttgtgattattatattttcgttttatgtattttccttcagtaggtttgtttgaggtctatttatttgcctacataaaaggttatgtactctgaattattatattcaataatatagtaaattaactgtgtaaaatgtgtcagtgggtggtttttcttgtaggatgaaatgaggtgcacattaattggctttaacgcttttaagatcatggattttatgacaacttatcattattgttgttattaattttattattaaatggcaagaaaatctaaaatttatttacaggttgtttcttcttcttattgtttgtttctttaacaaagtgttttatacaaatttgtgcatgaatgatttacagcagaggagtatacccgtaatcttcttatagtgttgtcaatggcatatgattattacattttctataggacactgtttatttatctctcttctacttgtttgtccggttaaacaaatagtatgacctaaaaatcattaagggaagtaataggctaaataatattgtattagagacttaagtttgctccaccgaatattctcaggttgaaaaccttacacgcaaggcacaacttcaaga

SEQ ID NO: 7524 - DNA, 1707 bp, Cucumis sativus
  Intron number 3 from transcript Cucsa.242050.1 (locus Cucs a.242050) derived from phytozome v7.0 (chr-ID scaffold0204 7; pos 1881022 to 1882728)
agacaaatttgttaactgtgaagataaaccgaaaggtgattctctttcttacttttaacacttattattgaaaaccaacctacttagactctgattactatctttttgcatctatgctataaaggaacagaatcaatgtgtaaaatatttgggatggaatctttgttagagaagaaatactttcattaaaaatgaagatggggtatcttcccagtttccagaagccgctcaaggaggttaaagggtctctaacgtattggagacagaggtcctacaaaagaagtatttgagacaggaatgattttaagttttttgattaagagctccaaagagagccagtgaatatggccagctatatgattgttacattaactctctttggaagtcatactattcctctctaaccatactttccaaatgaaagctaaatgtggagccaagtaaagatattctttgagcatgccaggtaattttgagaatgaacatctcacggggtttcttatggtcaatatggttggagtgtaactcttgcattttcttagacaaggaacaagattttcaatctttctttacttccacccacctttttagctctaaattgagtcctccctttagtaattatagccttattagtcttttgcccaactgtaaatctttttggtaatccactggaaagatgtctttttgtaatttcattttatcaattaaatggttttgtttcctttcaaaaaaaaaaaaaaaaaaaaatctcgagagagtttagaaaccttaaaaaatttccttgctaaaatgtgtttctctccaaccaatctcatctgtaaattttggaatagaaggaagtattgtcttttacttgggcaaggaattcaaaatctacaaaatttaatttgtttattctgtaaatggaatcttcttgagctatcctttgttgatctggactccattgtgccctttattatgtattccttcccctcattattaataaagaagtaaaacccttcgattctgtattaatttacagcctctcttcttctttgatgtggtctttgtatggtctccatccccaccccaaaaaggaaactaaagagtcccacaactgtgataaatccataagaagtctcaaaaggagggctttttggttgcccccatgaagctggtttcgtggtcacaagacttttaatgagacacaattatttgcctgggtgagattttgtgattcttttcggacattgatttcgaaggttttttgggattgctgtctagggaacattgtacttagttggcccccctttctctagtgaggtttttgtggtttttttgaatgtctttgtattctttcattttttttctcaatgaacacactacaggatctataaaaatgaatatgcaactttctaattatgcaactttcttaaacagtatccttatggctatgtattggtctaaacatcttcatcctctttctaattatggcgtaagtttgtaacattacttttggtcaaatggataacttttttgtcgttccatttttatgctctgggctttatcctattctctttggtaatatttgatatattcagcaaaatattggtaaaaagactttctgagaatttcttgtttaccgcctctttttcttatctgtatcatgtatctgatagaaactgtttttcaggataattcagctaacttttataagagagcttctgt

SEQ ID NO: 7525 - DNA, 7928 bp, Cucumis sativus
  Intron number 2 from transcript Cucsa.034430.1 (locus Cucs a.034430) derived from phytozome v7.0 (chr-ID scaffold0044 4; pos 131831 to 139758 reverse strand)
gaggtgacaagtttatgctttatctacgtagctctcttccttctttgctttctggatgttctattgtttaaatctgtcagtaagcatgttgcgacccgctttgcctagtaattcgtctagattgaaaggaatgtcacagtgttcttcttcgacaaggttatgtggaatgtgatttagtaccttgctaggattattctcactgaatatgttaggatcttatgaactcgtaactcacatctggttcttaattctcaatttacaatttacaatatgcaatgcacttcgagtcaaactttgcgtgtttgcaatggaagttgggttctaactctggggcttggttggagcagccataaggaactcacaatcagtgcggccaagtgattgaattctttgttactcgtccattataacattagtaaggtgaaaaatcaaactttgtgtcaatggccgtttttgatgtaagagcaatttggagatcaatttcttcactgagatctgtacacatttttttgtcatgtgaccctcagttataatgtactgcttatcaattagacatcaaataaattgattgttttataccctttttcaaccaccgctccaattaagtgagtagcagacaagggtgaggttgtttgggtgtgttagtacgtgtctagtgagggtagagttaaagaagacagaatatgcacagaaactattagagttgaaaacgcagaactattcttgatagaatggtccaaatgatggcaaacattagcagaggtctgacaaccatggaaatggtgtgaaaacaaagaacacttcttgatagaattgtcgaaacgatggaaaacattagcggaggtctgacaaccatggaaatagtgagttagagataaacgtgctaaggtctacgagccactattcatcttgcttttgtatggaaatacaattttctttattttggaaaatcacttttttagtatgtgcactacactgaaacatcattcattataggtttggtgtctcaggattaagattctctcaatgagacaagagaccaagaggtagtaacagtagggaatggggaatacttcaaaaggagatccctcttttggactataatcatgaaaatgctagaattataaaaaaattttttgtggtttgatcactgccaagatgtagtggtagtagtatgctatatactatattaccaaagttatctttcaaagctgacttatcctgaaaggaaaatccttgacttgtctctttccaataagggaaagaagaggttaactgcacagaatcttttccttgcctataaaagctgccttcaagaattattgtgaatcataggtcctccaatctagggagacactgataacccaaattctagcaaaagaaaagacctataaaaaaagcaaagaaacgaggaaggtatgatattcctcattcttcttccaaagacagtaaactgaggaggacaataataggtcctccaatctagggagacaaaatgataacccaaattctagcaaaagaaaagacctgtcgacaaaagcaaagaaactaggaagttatgagattcctcattcttcttccaaagacagtaaactgaggaggacaaagcccagagtgggaacttctttaatgtgtatgcagtactgagattgaaacttctatagaggagagacaacattctcttccatagggatcttgaaattcctaatataatttgcaaaagggactttgaaactttcaggctgtttggtaagataagatgcattgaagactgtttcgtcacatgttgagtagttgtcgtacttgtttgagaataaaattagtaatgacctgctagctgaaatctatcttctaggaacttcattatcaaaataacaccctcttaaaaatggagttcttaaagtggtaattgtaaaattcaaacaaacttgtccatatgtctattgatcaatggatatgctgccaaacttgtcatgaatggtgacattaattatgccatcattgattgaccaattaagaaataacaaaatagagcttggtaatgacattcaaattgcagcctggtccatatggtttactagtcgtgaacaattactttcattatcccagtaagatacaaaaagaataggagatgagttatcccacagaccaacaacttacaaagaaaggagcccaattagtttaaatttgggatatacttagtctagttacaaaagaatttagaagtgaggatcaagtggaagcaaaaagagaaaccaaattcgaaaaaggtcactgttaattttttgatcatgaaagattctagagtttctttcataccacaatccccaagggagagcgaatatccccattggatggaagggtatttgtttcagcatttagctgaggattttcaactaactgtagaaggcatttgagcctttcttgggccaacattcctacattttgaacaagctaaacaatctcctccaacagtcaacaagacaacaacgaagagaccaaaaagaaggcacatcaaagattcttcactctttttaaaaaagaatacactaattaggagagagtgcgtaatttcgaaggactgtttggattttacaactagtgtttagcctttaaaaagagaaattcaaaagaaagctttgactttcctaggacaaaccacatatgataaggtttttgccttttcagagcttatgacttggccaatcttatagtggtatttaactgaaaagaagccatcgttttccaacaaccatagatgagcttgattttgtatagttgggatgccttcttcttgtgggattcccccttttatggacttggtttttgtatgttcgtgtattctttcattttttctcaatgaaagtcattttcattaaacaaaaacaaacaaacacattgtccttgtttttcatcattctaaaaatctagaacgtgttcaaaaagcaaccccatcatcaaatttagcatcgatgaaacttcttctgaactttaagtcccacacatgaagagaatcaaaccaacactaacagacgaaagaacacttggcaatcactagtctagcttgaaacgactaggaaacttcaatcaaagggatgattcaaccgaccaattgtcattcaagaattgggttttatctccacgactcactctaagtctataccattgccattcctctgaattgagaatgtttttcatgatctggggccaaatgccttttgttagaactagtgggcttggcccttaaagtgtttatgggaagatttaccctatttcctaattcttttccttttttattccttggtgtattctatttattcttcctctttgtatctattgtattcgttcatcaaaaaagaataaaattaacaatatcgtggtttttctctcggttcttgggtttccacgtaagcctcgtgtttttgtttattgctttcaatatggtatcagagacaagcaataacggaactctagaaaccaacctaggagaaacccagattgaacctgaagtcgttgccaccgccaccatggaaaaactgctccaaaaccttcagaagccgtcgatctatccaatgggacagcccttttcgctgtccacgcaactctccaaccagaaacagctttttgcatcacccctgtcaggcgtgtaggcccacgcaccatcgccttttcatctaaccgcccaacccaacctcctctactcgtcgtcgtttttccaactagcctaccctttcggtcatctgctgccccatgcgtcgccaattttcacgagcatacttgttcaaggcgttgtttgtttatggctgcatgcccaaacatcctcaaaccaccttatctttatgtcttgtacttagtttagtctattgctttcctttttatgtcactgaccttgggtatggcatttcacacttttcacatgcaagtctatcaaatctaaaaaagtttaaaatgtactatagggagacatactagttgaatcctcgaccaagcctttttttacactttgcaatctaagctttatttgcaattgacactcttcaatgctttctttaatgatgttttcaatgcttttctttctctctcatgttttataaaaccaatttctctcaaaacgtgaagagaggctacatcataccgtgagtttgcccacgactttcggttttaatatggctaacttgttcatcgagttagatcaagtggtgcacaatcgcccgtctcgtgttttgcaaagttgcgatttggtatcagtgctttgttagcttgatgtaactaaataaggctatctaaataggccacctagttaactaaccaaaactgttaaagttgttacaactgaaacagttattctgttgctaagttcttatataaacaaacatcttcaccacattgggaagataagagagaaattttcaaaaaaatatactttggtcttacaccatagctccttggctaagtgagatgcaattatgccagcaatgaaacaactgttgaagtcgcagtctaagcgatttaccgagattgaagagcaattcttgtatttgagagaattgctagaagaaaataagatttcttcagacttggttggatgggttggacgaaaaagttggagaagtagatgcattgaatgcttgggtagacggactacccataaacgaattgatgttgagggttgattcgatagaacataaaattgcctaagcggatagttttgaacgtgggagtagctcttcgagttttctcacgcacatggaagagcatgtcgaagagctcgactcttctcagaagaccacgctaaaaagtccagtgatctgtcagacaactttcgagccacaatagagacaattaaggtcaagatggccgagatgaaagtgcaagtgaatttaatgatgcaagcagtgggtaaccagaccctgaatcaaacatgtaatgtttcaagcaagttcaagattctagaacctaaagccttcaatggaaactgccatgctaaagagcttgaaaatttcatatttgatatggaatagtactttaaggccagtggaaccaactttgaagaaactaaggtgacactagcctccatgcatttgtctaatgatgcaaagctctgtagaggtcgaaagtgagcgacatcgaaaatggtcaatgtaccattgatacgcaggaagatcttaagaaagaactaagggctcaattcttccctaaaaatattgagtttattgcaagaagaaaactataggaacttagactcacaggaaccataagagaccgttaaacaattctctaccgttatgttggacatttgagacatgtcggaaaatgataaaatattctgctttgtagaagggctcaagccgtgggccatgacttaattatacaaacaagaggttgaggttcttgcctctgctcttgcttttgacctcatatttatcagtgataaggaagacccaggtaagacgggtgtgatcatcaataaaggtcacaaaccatcgttccctagaggaggtaatgaccttcgagggaccccaaatgtctctataagtaagggtgaacggttgagttggcttatatggctgtgagggagaggaaaaccgatgctgtttggcccaaatacacacatcacaagatatagatgggacatcaactttagagaagagatggggaaataaagacttcatatattgaaagtttgggtggtccaatcggagatgccagaatatacaatcttattcagaaatagtagaatatgaagatagtaaactagtcctagagttactactagcgaatgtatgattgtcaaggagatagagtcctctgttgtgttgggcagtgccaattatcctctttgagctctagtcctgaaaagaaacaaaatctggtaagaaagtagctttgtagttcagttcacgagtgatcttgcttatatatagctaattataggaaatcttaggcacacatgcaatacattatggagagatagcctcttaaagggaaaaaattgccccttcttagcatttggagcaaagaaaccatcgactattctgatcttttcattaccaacacatggaatataagaaacgaaatgctcagtggaacttgtcaagtgatttgtagcacccaagtttaggatccaaggactcttcccatcgacaccgataaaactaagggaccgaggcatacttgattgagcaatgactgctagagtggatggtggactgaaactgttttggtttacagtagggccaaatggttgagcggttctagcatactaacttatattagcacaccctgaattatgcttatcatttgaggaacgtttcttacctcctggaggacgaccatgaagtttccaacactgatccttagtgtgtcatttttcttggaatgctcatagataggaatcggtttcttgttgttcttctaactatcatgggtagaggatctaatctagcattgacggcaacgaagtcagtagtaggagtagtcaggacactcatggcactcgtacgattttcttcaagacgaaattcacaacgcttccattaaagaggaaaggggtctctggccaagtaacgaccacaaacaatgtcaaacttggggttcagacctgcaaggaaatcataaatccgatcaatttcttcaagtctagcattctgtgtgccatcattcggagtattctttactatctctctacacaggcccatctcttgcctaagttgggaaagttcattgaagtaggatgttacatccagagttccttgcttgcaatcatgaacttgtttcctcagtgtatacagatgagagacgtttcaaatagagtttctaattagtgtcccatagatcctttgcagttgttgcatagagcatagacttgccaatttgtggtcccatactattaatcaacatggaccgaagaagggagtcctccccctctccagaaacgtccttgggcatcatgggtgggggaccaagagtctcccctgttagaaaactaaattgctcacgtccctcaataaacattttgaccgattgagaccaagaaaagtagatttggccatttagcttctcttctggaatacctgtagatggtgctagagaatagttaaataatttgaggacaaagtaggaaacaaagttaccgagttcttggaatacatcggcaagttggttggcttggattgtgtcgaagattcaccaacttcagaccctgatttattatggagttgatcgattccagtaccacggatgtctgactgatttaaagaattggagggcagtgtgtgaaaggagggcagacgcggttgaccaaaagagtactgctgctggacttgggaaatcaggtgggagtaggctagctgaacagtggaggagttggaatgcggtgtgtgggcggaaaggctgggcgtgtttggcttgtttcctccactaggtggcgcggctggctccaagggtaaagatagaactactcactggtggtttctgaaggtgttggagtagtttttccacagctgcattgatctcggcggcggcgttggctgtctcgtggtcagtttgggtttcaccaagattggcgtctaaggtttcatctttacttcattctgataccatattaaagcggtaaaagaaaataaagactgagttacgtggaaacttgactaccagaagaaaaaccatgatctgactttcttttattatttcttttgaataaaagatacaaagaagacaaataaatagagaactaagcttatgataaaatgattgggtcaagcccactaattctaacactataagcaaacgaaaactaggtgaatcctctggtaacattgaaaatttgattttgtgtaatatggtgctagactgctagtgttttgctgtaatcatcagtactcacgtttcccttgacaacaggttgaagctttggctcttcttcgctt

SEQ ID NO: 7526 - DNA, 2010 bp, Cucumis sativus
  Intron number 6 from transcript Cucsa.179840.1 (locus Cucs a.179840) derived from phytozome v7.0 (chr-ID scaffold0123 3; pos 204780 to 206789)
cctggtgcagctagagcctgggtgtctactttgcagtaagttgttcaaaaatgccccatgtccgtgatattatttgtgcaacatcttcatgaacccacataaggcatagttatttccgtactttttcatgcccaattatagcaagaatgtatacataaaatggcagtttctgaacttccattggagtatatgttctgaggttttatggacaagaaaattacagaactagatgataagatatctattgttctataaagaaactgaaaactattatactgattatcatttattaatgcatatttgtagagtgcaaactgattgatgtataatctggaaatggttgcaatcttggatttcgtaaaaatcattttccttctctaaattaaaatacttttgatactttgactgttatcctctttaaagatgctaaaaacttcattaacaatcatcatttatttgatgtataacctggagattgtttcaatctagaattttatgaaaaaacaagctccctttttaaaattgaaacagttctttttctgggtaataaagttatctggtctcctctttaacgaacctacaaactacagtaccaatcaccatgtttttgtgcatatttattgaattgcaaactaattgatgtatatatcacctggaaatggttgcaatcttttagcctcctaactagaataagatctaacatatattgaaatataaaggatgatgaactacaatataaatgaagtataaaggaacttgaaacgttcaggtacgctaactcaagccctaaccactcagcaaattttcctgcttccctcaaaaccccaccctctatttataaccaaattcccaaactcactcctcaactaatttccataacaacccttactaatcgtgtactaatatctctagttaggtatcttccacaatcttgacctttgtaaaaatcaaatttcttttgtaagaaaccaataaatctcccggccaccaaggagctctgaaaattgtaccctaatcaggagaagtaaaacagggtttatgactacaaaagttactggaaggaaacaccttctagaagcaacaccgaaaatcttcatgaatgatgtgatgtgaagattcttctatatctttccacataaacctcataaaagaactttcatagcaatcctccagaaattcttcggcattcctccaaaaaactttaagctttgaacaaattactgaagaatagagttaaaacagtctgccttcagttattatgagaacatcatttcaactcagagatttctctgatagggatgatgttagtatagagttaagaaatatcattagggtttagacgtatattggtaatattagggaattctggggaaaacatgaagatagacaattgtttaatggcttcaggctggagtgatgtgtcaagaggggaggtttcaagaccgagaatacttggaatagttatattgtaataatgttatctggaaattataggatttttagagaggttgagtgataaattgaggaggtctaggagaggccaaagggtaaagtttaatgcctccttgtgggtgtcggttaatatgcttttttttgcaattatgatattttttaattatgatcatttttcgattgtagacccttttggtagttagttattaggctctctgtcgctttttttttctctttttctggactcttttctatacgctttgtatttcttaacttttttctggtttcttatagaaagattgtaattttgttaccttttacttttgtatctcattatacttggttttcaattatttttttaacattgcttgataactttccaaggtgggttgttttctatgacatataacgattcaccttatttaaggaaatatattaataattttcctcaattttccttagattcatggtatgagctgatataatacatcttaatattattgttttgattttttccaatcagtgcaacccagttggtcctaaaggcccataaagaag

SEQ ID NO: 7527 - DNA, 3870 bp, Cucumis sativus
  Intron number 1 from transcript Cucsa.158150.1 (locus Cucs a.158150) derived from phytozome v7.0 (chr-ID scaffold0114 2; pos 271016 to 274885 reverse strand)
ttgataaagaggaagagtttgttattcggtttcaggttcttttactcttccctttctttcttttcctcattcttcttggatttatgaatatgtttgcacaatctgtgttttgaatttggttttactgttctattgctttttttgtggggtattgaataatcttgagtgttaaggaagattgtaagtagagctgtgtgtcttatgttaatttgacgtaaattaagttagtaagtagtgactgatgaataaaacaagacacttggaagaggctggaaggattttatttgatctttgataagggttttgtcataaaggcaggttgaaaagttagatgtcataaagggttgtcttaaaggctggtttaaaaagttaggtgtctctgagcctggattggtttgttgctcatttgtgtaggtatcccctacttaggatatggagatcctaaaagtttcttgacagtcaagtgttgtagggtgccttatgagattagtacaagaacgtttggtagtcacctaactaaacattaaatctacaaaatctacaacttagttctttttaaagctaaatagtacaaggttagaaagtcggagaattagtcaaggtattaaggaatcaaaaaagaaattaaaaaaaaacataaaacataaaacaatagaaaatcaacacaaaaatatatgtggttcattaacaatgtgttagctgcgtctatatgcagaaaaaagattcatttattattagagagaataattcaaaattacagagtagtgacacctctaggataaagagtttatatagcgcatttccctaaatcctagtgtcaaaatcataattaatgtaaatatgctaattgctaaatatgaactcaatttaggtctacgtacttggttgttcgaagtgccatataacaaatttaaggtgtgtacaaactgatttagataactagacgtatcagaaagaggaagacgtcctaaaaagagacctgaatcatggtggaattaaataacatgcttgtgaaggtcaatctctcctaaattgttatgaaatctaggaacctaactgaagtggtggagtgtgtatcatgtcctgatgttttggatgacagtagggattgtgctactgctgtccatgtttgcagtctagttgagattgtggactgtgagtgtatgattgatgtgattcaactaaagctgtcatctccctggatagattagccatggcagagtaaattgttgaatttctaaactatgtcataaaatatttcaagattggacattcaaataaatggccatcattctgcctcttgagtactattgcataccaattttgagcacaaatggatgcactctgctcatcatgtcttcattgatcattctccccaggcgatataattttaatggttaagggtaccagaatttgtttacctgccttatcaaggttatcttcaaaccaatttgaaatgatgtctcgcttcttaagtagcatatctgtttttttagatccttgtgcatttttttccatccatcttatatggggtgctttaaccaatgcttttcatcatctgcatttctaatttgttttttcagatatgatgattatgttggtaaaatgtaacctctgttttatggatggacgctatcaatagtattgatgcgttttgttggcatcctacagtttgtacaagtttttcaagtcccttctggcaaataattgaaaatttaataaaatgaagtatcattttgttccaaaggttttttctgatcttttgtacccaacattttattttcccaacttaacttttgcacgttaagatctttccttttctcatatagcattagaatgtcaagcatgtgatgtttagttcttcttgtcaggctttggttgagtatgttctctggatattgttttcaggaacaaattcttggaatttgcatattagaaaaaggtattttgattttttttctttggtttttaaatcctatgttggtaccccaactttaaactgtctcccttaactttctttggtttagatattgttccattatagtcttctaactttttaaatgtctattttaatcctagaaattccccttcccccaacaaaaaaaacaattggtttggtcctttgattttaacaaattaataacgttgtattgagtctatgaaccagcacatgaatgcgagcatgatttcaaattaaataagttagaagacataaattggacagttacaaggaccaaaatggttgttttcttttctgggagaaagaacaacttcaattaaaatcttgttaggcagtgtcgtttcttatagaaacaaaatattaggataggcatttgtttgctgtaatgtttgcaccaaaagataacacttgtcattgtctttctgtctaaataattaatttaagaaacattaagtctgaagttatttatatttgttcttttaaacccaaaatactaagtatttgttgacttagaatttggaatagagtagcttttaataaccatcatggtttggcttagtggtaaaaagggagacatagtctcaattattaatttcctacgagtttccttgacatccaaatgttgtagagtcaggcgggtgtcccgtgagattagttgaagtgcacgtaagctggtcctgacactcacgagtcacggatataaaaaaaaaaaactttgattccatttctacgaggttaaaaaaatcgcgatatatcgccgatatacctctaaatggaggtatccaatagagatattggggagtaacttctctttttcttaaaaagtcgagaaatatcaccggtatatccaaaatatcattgctatgtcttttcatgaatattattaagatgagttcaaataaacgtggacacatggctgatatatagtggatattctatgacttttccatttttttaaataattcatttttccataccgaataaatctttctaaaatcaacatatttcataccctcaaattccaaattgaaaatcaacatattctaaattcttcttttagtttctaatatatgatttactttcgttaaattgaatttgaaaaaagaaacatatattaaccttaaatgtaatagaaaccttttctttcacatcatctcagaaaaaaaaaaattaagttttcacctcttccaatgcaacacaaacccgtacttctctcaaatcacaagttctcaagcttccctctagttttctctcaagtttcctttacttgtagatttctctatttcttctttctatgtttatttatgttaattgttatgagttttattttcttatatatgtttaatgttaagatttttgtatccttattatgccattttttatgtctaatatcatgatttgggaacaatattatcattagctgataaattatgcaaatgttgggctagtacctctcagatcatattttgactattgaatcttgtatttgacttttattttgtatgacctagactctattaatgaaatattcagttcttaatcatcttttcggttttcattattgtttataattccattatcaaccatatttggcttctaattaatcatttatatgcttaaattcatagtttattacttaggtaaactagtcctgaaatttcactaagaaattcacaatatttttataaatttccatgatatccgtgattttcttcggaatatctgtcgatatatccataaatttggattaccgatatttatacagttaacaatatttcaatccttgcatttgtattctgctatatttcatatctaaatcagaatggtttcaggcagttcttgctctctaatgatactcgggttcgattggcacaggagctaaaggaaagaatagatcgtgtgaaggaaaa

SEQ ID NO: 7528 - DNA, 877 bp, Cucumis sativus
  Intron number 1 from transcript Cucsa.189540.2 (locus Cucs a.189540) derived from phytozome v7.0 (chr-ID scaffold0130 5; pos 356629 to 357505)
caatcacttgccttttcatcttctcccccgacctggtgcgattattactatttttctttctgtcttctttttcttaattatcatttttattcacatcatcctatatcttcagattattgggttcagacttattaatttatgacttaacattctttttgtagctcgtgagagagttgattatacttttagatttcaacatgaaaaagggtgatttattttcttttaacttttgtattatgtttaaactcaaaaggttttttgagctatgctatgcaaacatgtagtcctctaaactatagcttttgaattattgctcatgcgaaaacttaattgtgtttcaaactaatgttttttattattattattattattttttaatatttagtggttgaatgtgctacacttgttttgtgaagtctagtcagatatttaataattaaaatttattctgtgcaatataatatttattaaataatttcatttattttttaaaatgttgcataagaggagtacactttaattaaaattggaacagtcaatttttatgattttcagtttcagatatggagaacatttgaatgtaaatggggtgactcatctattgcgcaacccagacagcatccatatgctcctttcacaacttttgttttttagtttaaagatggagttttcattagatgtttgatggaatagaaacgaagggatttttttttttttttcctttttctcatcttttccttataataaaataaactgaatatagtgacacatgttttattttagcttattaatattaattctatggcatgtttctctattttgttatgaaatggtgaatggtaatggacacagcaaattatggacagattctcttgga

SEQ ID NO: 7529 - DNA, 3145 bp, Cucumis sativus
  Intron number 6 from transcript Cucsa.240200.1 (locus Cucs a.240200) derived from phytozome v7.0 (chr-ID scaffold0204 7; pos 144453 to 147597)
ctggtaaagttctacttttctcggttcttatggaataaatgtgaaatctgttgtgtaaaacttattctcttgtgtggtagttagagcaaaatatgaaattactcctcacttcattttatacaatagatttcaatgtatatagacatacatggaaaccctaaatagagattaataaattacaataaaggacaaaagattaacaagctcctatgctcctatcgttacacagatactataacatattggtttggtaggccgtgtgaataatattctccaaatctgtttccgaattttgtaatctaatcatctaaatagtgcaaattctaaaaatacatatttatgttacgaattctgaatatgaaattttgaaatgcagaattatagtagaaaagttaaaaacaataataaatatagcatttcatgttataaactcaattatttttgttaaattaaaatatgtgttatatagtacataacattacaaaataataattatagaaaaatttaacctaaaacaagatcataaattaattagtcatattttatattcaaccgaatatttagtaactatcattcagttttgtagtttataaatatattatcaactacattttgaaatttttttaaattggaatttaatttcaaatccgcaccaaacacatatatgaaagcatgacatactactttttcttgttttcaaaaattctattttcagattgctactaaacatgcccttgattacacccatttatgccattcccctcgtttaatttttcttggcacaatttttttttctggggagaagagttccatggaaaaggttgggcagcataaatttaaatctacatcatccagtcatccatccattatgatcacatacaatatttttggtatgtgtatgtgtataataggaatcaggacttccatttgaagaagtaccagatgctgctaagatggggaactcgaacccataagaagcacccactagaaagtaggtcccaaaagctacagatacccatagactagctacataagctttacaactgaccctcattgtctcaaatttagaaaggaagggaggaagggaaatatcttgtatgtgggagagttttttattttttattttttttttaagaaaaggatacacgacttttcattacgaggataaaaaaaggctaatgctgagattcaaaagaaacttacaagagattaatgctcaggaatacaacaaatcttagaagcatgtaaaaaagacttggaacatcagcaaaacttaaaagggaacataattataaaggagcaatgaaagctcgccaattaccataaatgtcttgaatcaagaaaccttgaaatttttttgataagatgctccaagcctacttaagatgagtcgggtcatggattttgaaaaaaaaaattctaaaaaatatgatctcataaaagtagtgctttgacaagcattaacctacaataagtaagctttagaggtccatctaatgccacaaagaagctggaaatgttgtcctcgaatgattcaagagcacccaattaatgttacaaacattgagcatcaggaggcaacaactttgagaaaaagtacattcgaagagaatgtggaacgttgtcctcccagtgatccaagaacacccaattaatgttaaaggtattgagcgtcaggagccaacaacctttagaaaaggtacatttaaagagaatgtgatttaaagatttcccggacttgtaacatagagggcatactgcaggcatgagagcttgagaggaagcttttttctgaagactgttgagaatataaaatgctcatattatttatgagaatttgaaggtttataggaattaaattgatttgtgactttaggtttttatattaaattgtgtccattgagttctttgggagtttttaacaattatgagagttaaaatatttatggtttcttaaccattgaaatttcattgttacattttgtaagcctgtataagacatgtttagttgaatgaaaaattactctccacccttgtgtcatccacaccctttctattctaacaaagaccatcggctgaattatgactcccattaagtacaatccaaataaaataatgttcgttttctttggattctttgtcttctaaattgcggaaataaacaaccattcatggtatttgagaagtctagaaaacttatcaatgacttgactgaaaagaaaccagaaggctccgaaggccacggtctcacatcctagagttcaaagatgtagttgaaagagggtgtaaaaggttttggaaatctattacccattcatatatcatattagagagttgaaacttataattgaaataaactaagattactcatattctacgtcttcgaatttgcactccaaccaaataatccaaactacccatttaacaacctctgctgaaggatctttcttttgccagagaatagtgcccgtacgtttcctccaagaaattctcctgtcagctatcaaggtggttttacacgtttgggcaccaaatagtgtatgatataaccaatatttcaccaaaagatgcgcaaatctaattctgagtgtgaaacaccccatgggagttgaaacatggatgcatatcccttcactacatgagattcctgagaattcaatcatctaatttgtcataaattcattagtcacctggcagttactacaactaaaaaatactattgtacaagggatatttgactaattagtatgaattgggcatatctcatactagaaccatctcaagtttattcaatagcagttttgttttacatctttttatattaaccaactttttctttattctgtatgggaaactagaagctatactttccttttatatatgttgacactagcatagggtcagaaaggtttataggaaggggaaaattgtatatggaactttttatatatgaaaatctctgttctgaaaagttaggaagagggaatttcagtaagaacattttaaaatcttaattattatgtatatatctttttaatctatgacaaatcaaggggtgagaactgcccccttctttcctcttttctcccgcttagaactgatgtgtatttgtaacattcaggaattgttattgacttgttttcta

SEQ ID NO: 7530 - DNA, 1159 bp, Cucumis sativus
  Intron number 1 from transcript Cucsa.142060.1 (locus Cucs a.142060) derived from phytozome v7.0 (chr-ID scaffold0107 9; pos 382255 to 383413 reverse strand)
ccctatacatttcctcctaaggtccgtccactctctttcccctcttttttccttttcatccattctccatacgatcctctttttcccccattttccaatcgagaatgatcccagggcttttttttgtagtcgatcccagtttttatttctcttgtttgattctttgtatttaatctatgttcaaatgtgggtgatgattggatgttaatctagcataccctgatgatgattttgctgatactcactctaatttttgtgggttagaagttaattctttgtatttaatctacgttcaaatgtagatgatgagtgagtgttaactttgcataccctgatgatgattttgcttaatcactctaatttttgtgggtcagatgttaaaagttttgtagactttaaagagattgacaaatgcttcctctgtctctccttgtatttattgtgtctcattccacttgtaatttgtgagctccatgtgtttctcttgttcttcttgctctgttttgaaacgtttgacaattgttcccattttcaaatctactttaccaaacatagatcatcatctaattttattcaatagagaggagaattcaaactgggatttgttccatacggtcaaatagtttgatctctttgtctttcttatctccgttttctccccattaatgtcatgcacagtgatgacttgaaatgttttgtccattttctaccttcttttttctgatttggaattctaaaatatgggttggtccagattattgacttttcaattgtgtgtaaaggaggagggagaaaaagtataaacagagcatgcaacttttcaaaacagtgtctgagcttccatggtcctttagtgattttattctcatttctgtatttccaatttaagactgtggaactctctcttccatttgccttcctgctaaatcaagacacaaattttgaaaattttgtcagtgtttggtagggtccagttgggtggttttaggaatttttaatccagatattagttgtagatgttttgacaattagtttgtgtaattaatccaattgcatttttgggtaaagtttgatttggataaaatggacggattgtttacatattttaatatactctcttgcagctgaagctaactaagatttttctgaaaactctgtg

SEQ ID NO: 7531 - DNA, 2890 bp, Cucumis sativus
  Intron number 4 from transcript Cucsa.320140.1 (locus Cucs a.320140) derived from phytozome v7.0 (chr-ID scaffold0308 0; pos 39647 to 42536)
gtggtgattcaggcagaaaaggtatcgttcgtttatttgtcataatgcctagactacatttctgttgttataaatatagtcattctgctgaatttaattgttatcgaaaacaaaatactacttaattatcttcggaagaaattatcacttcagtggtaggctgcaacagtttgttagatctcatgcaattgattcattatgtaattggtcttccccccccgggaatggctaggttgttaaggaactggttaagcaagtgatatacccatggagtgcacatttggaaatgacataagcaatcactagtttctgccttgaatttttgttcacttgaattaataatttgagaaagtggctcaactactgttgttggagaaatgtggaagtctaggttttggttgaatttctctagaaagctcaagtctaaaaaaaccaatcgtattttgtggagcgaagaggtaaatgacatacccttgaggcgtttcaatagtttcattgatggaagtaagctgtttgaccgtccattgctgaatgggaagtttgcgtgggctaattgtatggctgcaactaagactggtagatttttactttcagaaggttggattaagagtttggtagccctagacagttgagggggccaagattcaccatcaaatcaacaactgctactcctcctttcaacccttcatcttcatcttcagctcccaatctccttctcttctcttttttcctcatcaaaaggctctcgaggaaatctaaaaagaaagaatttttctaagatcttccaacattacttcaagcaatttctgaagtattttatccggaagaaaaaatcaaagattatggaaaaatgttccttaaaagcccagattttagatgatcaagtacccgttttgcttgaggaaaatactgcccattctatttcatcagcttattccagcagctccaagctgtttgtagagactaatcatgatttattggaagtcagttgcacccaaattcaagccccagcccgttcttctaggtcattttctcatcatcctcactttatccagtttaagtactctgagttctctctgcctaactccaaggttaaatttctgaagggctctccaagaaaaacccctcacaatcaatccaacaagaagggtgagcattttttcaactcccctctcagtgtttgtagcgaggaattggagcatttggataggtaaaccgaacttgaaagttagaaacatttgagcctctagaaactgatctcaatgctctgtttcaatgcgaggaatagctagtatccgcaaagtttccttctgctactcgttcttgtccttggtcttgcaaaatactagatcatttaaaatcaatagttgctgattgtggatttattctaatttgattcttcaacagtttaatgtatttctcctctatgtaagactaacttcagtcattcttggatttcccttcatatgggtggcaagtaaattctacatgccgatgctgaatagtgaaatactttttcgagcttcctctagattatggattaatttggttaggcagctggttgcatcttcttgaaaggttttagtttcaatttagttctttatgagagaattttgcattattctttgtaattagatttcttcagatatggttttgttgagcttgatctcttccttttggaatttgcatgacaagttttacttggtcgtgtgaacattatggataggctactacagtagaagaagttttcgcttatgaagcctttttgttgtgttctttattggaaggcggaggaagacctatatcaccttctttggaattgttagtttgctagatcggtgtggaactatttctttcaagagttccatattgagctagcttgctagagagttgttcgggagacgatcaaggagctcattcttcatatgtctttcattgagaaatactgttttttatggtcagctgaggtgtgtgctattctctgagatattttggggggagaggaataatgtagtgtttaggggtgtgtggagagagacaataatgatgtttggtttttggggaagtttcatgtttatctttaaacttcggtctcaagtactttttgtaattaactcctgggtagcatcttacttagttgagaaccctttctttagaggtgttttgttggtttttctttttcttgtataataatcccctttcatgtatttactactttttttatcccacgtaaatggtaaactaaaaaatcttcaatgctctttaataatgaaaataaaaaagttcgctagtctgagggaagagttggctctcactgatcttttatggaatgcgaggggcttcaagtctctagccagaaaattaatgctaagtatacttctgattttgtcattctcaccaaaattagacaaaaaggttaataggttgctaaggctggagttctagaagtgttgaatggacttcttaagatgatgtaggttccttttggtagtatagtcatttttcctcccctctttcttctttggaaggacttgctctagatgaaaggtgtgctcttcctctattttggtggttatcttaaggctaatggtgtttgttggtggattttaggcatatgtcttaggcccagctaacacgatgagacaagttttgaagggaattatgtgactttcaagttatatcactcaatgaaagttgttttcttttacaacaaaactattctctttcagcacttcattgagttgattaaagaatgatcacgggtgaatagctctgactgtatttttactgcgcgggtcaacaagtcctccctttcttttattcccaatacaaaaggaatatattgaggaagtatagttttgattattgtttaaaaatatgaaggtaccct

SEQ ID NO: 7532 - DNA, 2682 bp, Cucumis sativus
  Intron number 11 from transcript Cucsa.106030.1 (locus Cuc sa.106030) derived from phytozome v7.0 (chr-ID scaffold009 29; pos 457809 to 460490)
gaattggttagtttagcaagtttgttacatttgtaaagttttgcacgcatgtattatatatctagttaatttgttagtcgtggattgcttgcaatggggatcctgaatggggatgtataggaatttctagatacatttctcattgcccgtatattagttgaactttttccccctttttttcctcatatgaaacaaagaacgggatatatttgacaagcaccgaaccagggagcaacttaggggctgggggacgaggggaccccacccaaaatcgacaaaagtgaaataaacctacaaatgggaataacctacaaatgagatccctaactcattttacttcaaaatcactcactcatcaccttgtttcttatggaaacaataagaacacaccctttataagaatatttggagaggtctcattcccaaaaggattcagttcttcctatgggaggtcagtcatggtagcatcaacacaacaaatttgtcttcacccattagcttcagcttttggatcaactggatatttaagatagtatcgtagcaggttggttcaggatgccctgtgttcaaacccctatattgttgttttcttcccaatagaaatttatttccacttgttgggttttcttcatattttgagtccacaagtgaggggagtgttagatgatatatgattatattttccttcacccatcagcttaagcttttaggtcaattggttttttttaacagaaacggaaatttacattgatataaagaaaaaagtgtacaaagtacaaaatcggcaattgcacctaaacatctcaactaggttgataccttcttagcacccttatcacatcccaatatatcagaagatggaaaacacaaactcgggaaatcaaaatgcagtaagctaacaccacccttacaaagccgagagaaatccgaccacaaaacccaatcacaaaaacgaaagaaacactaaacatcctgctgaaaaaaagagatccaattaaggataatctcctccatggaataaccctcgaactctttagaaagggaacatcacgaggaagcatgtatccatgctgtctccaaaatccttgggtcaattggtgatttaaaactttgtcatcaatgtgacaagtccattatgtacttgttagtattttgagatcatgcccaatctttttggaaaagaactatcatgcttcaactatcaagtagtcttcccaagcaaccctttcattctattgaatatgctccttattggccatcgttcaaagataagagggtaatcttatggaatttcatcatcaaatcctacttttggcttatttgaaacgaacagaatcattgcaaatttcactcacttctttgatcaccttttgtatacatcggtcacttggtgtaaatttgcccatttttttgtcatcacaacctttcttctcttatttctcaatggaatagcatcatgaagcatattgtatgcaatttcaaagaattttgatgttcaacttattctcaaatattctttgatttcttgagcctaatttttgtttatttgttttcttttcgagttgaacactttgaattgtcaaaaagcatgaattcgtttgtttttgcaatttgcttgagataataaatatcttagaatgtgagaggcagtttgcaatgccaaaatcatatttcacattcttcaattgttctgaaaaagcaaatgtttataccaaagcatgtttctcctatagttgttttacattttttttccttgatgaacgatttagttaagatagagctatgttataataatgggaaggaaaaatagaatgatcccaaaaaatatattgattttcctcgaactcgggactcttaaatcaacaattcgcccaagaacttaagcttctaggtgaagacaaatttaatatatctaacattccccctcacttgtgggcttgaaatatcaagaaaaatccaacaagtagaaatcaatattcaatggggaaggaaacaacaatacatgggcttgaacataggacctccctgaaccatatgctttgataccattttaaatcaccaattcactcgaaaacctaagctcataggtgaaggcatatttaatataatatctaatagggactacatccaatcttttgtaattgcaggttcttctgtgacagagattgcaaaagacccttaaactcgtgctacaaatatcttgaaacagtccaacatgaactatttggttcttttgccataaaccctcatgactttgcttttggtactattcaaaagacctcatgccggtggagataattgttctcacttatataacccatgatcacttcctttcctaaccaatgtgagactttgtttgcattcctaacaatattaatttatcattgtcccatttgatctatctaattattaatgaaatgtaattgagttgagtattatcagcactagttttatatttgttttcgtattctccatttaaatagaagtcttcaagttctgcaatagattgcatgtttccattgtttccaatgtatgtatgcaagtattagaccatttgaagttggtgttccttttctcacacattgtgtatctaccccctacaaaaaccgacatgaacttttaattgatacttcttatttcattcctaattttggtgtctttgaatgtaggactctaagttgg

SEQ ID NO: 7533 - DNA, 4128 bp, Cucumis sativus
  Intron number 10 from transcript Cucsa.357250.3 (locus Cuc sa.357250) derived from phytozome v7.0 (chr-ID scaffold035 78; pos 124996 to 129123 reverse strand)
atccacttgttgtacttgtaagtctttcttttctttccttttcaacttaagtcacataccgatcaaataattaatcatatagaagtaaaaaggaggggccagaataatgataattaaattaccttgcttttctcctgcactagaagtgtacacctcattatgtgtgtttaaatatctgagtgcaggtatgtgaatgtgtacatgattaatgattctgattcttagattcccttttatattaagtctgagtagtctgttgacaaatcacttatgcaaggagaataagcagaacgttcaaggaacaatgtcttcatggcaaactgaattagtgttgaagggtcagaggtagtctggctgtaaaaatatccatagtctgattggaatgaaagacctccggtatggctagtgacaggttacataatagataggattggtgttagctcagaaacacagacgctttttaggtagggtgcctagtctatgataagaccccgaggttgaaagtatatactcaaaggcatagggagagtaattaagggggaaaacatgtgctctgggctcttaggagttctgttaattatgtgggccaggaagtttgttagatggtttagttgcttgcttcttctttaaatacttgtgttgctgggggaattatcttttggctagtattttgtacttagactctcttttgagtattgggagagattgggaaagctctgtaagacttttcctagttcttgataaataaaataataggcgagagcctatcagcctattttgaacacgtgtcagacacttaaatttccatgtcctatttttagttatccattttaagtttcaaacccatgggacacttcctacatacgcttgagaaactgttttgatgagaaaatggtctagacccaaatttaaagcccaaatcagtatcattatatgttaagatacaatagaaaagggaaaaaataatgcatgaaccatttatagatttactattgtcagggctctgctctatttgtttgcatatgcctctagtttcttgattttctctttctttatttgttttctcagaggttgtatcccttaagcgtgttttctgtttattagatcaatgagaagttgtttgttactgaaagaaatctagatatgacttagcttatttggaaagatttaagtgtgtatttttttaggaaagaaaaaagtgcatgcattcagtatgagtggttttggaaattctacaaaaacttgaagataaagactaaccaactttggggaactcagtaatttcgttatgctttgagtataatccatcttggactagtctagtggtcaagggcaaatgtaaataataacaagcttagagtgaatggattcaagtcatggtgatcgtctacttacaatttagtaatttatgagttccattgacaatcacatgttgtatgattaggtgattgtcacatgaatgtggtttatgactgcataaggttgtttggacattcatagagattataaaagaaaaaaaagtgagtatatttgggagtattttggtcaataatttttgtcgtgaataaaaatgataatctctcaattccttatatttaagatttacatagaagtggcaaaagtgagcatagctcaactgttgctaacatcaaaacttcaaattccctgtaacttttcttttttcatgcgaaaagacacttttcattcatcaaagaaaagaaaatatgaaagagaaacctaaaactaaattatcctcaaacatttaatgcttcttctaaagtacgtatagaaaaagagctctcactgaaagcagtctcaaaagctatcccaaacacaatataaaattttatggacaaaaaacaaacgggatgttctccaatgggtatgtttttcttccggtctttggtttcaagatgggagaagtcctgtctcatttgtcctttcacagttcctttggtggcaactattgggagcatctgtatgtaaagtaagaataaagctaatttgttataggttgatttgatgttgtattctaacatccagtctctccctatttggtttcaaatgtatcaaagaatatttagagggaaaatacataaattagtatgcaagatgggatgctggtggtcttactttattttttggaatttgtgagtacagaaaataaattctagtaattcattcagtagggatgaccaaaggaatatgagacctaggctatttattaagagatgtcggttcacgaacataaattggaagtagaagatgctaattagaaatggtaaagatgaaatgccatcgatattagtaactcattaatgactatatcaaccaatatttcgggaaaatcacaaacatagcgaaaatttgtaaaactagtgtaattcttattgtgaaacatcataacaagtttatttaagacaaactacttccataaacatatgtatacaaaattacaagccaaatgtgattgataatataaaaagaaacgatattgaagtgaagataggagaaataagaagaaatgaatttgaatttgaatactgaattgaataataaattttaaaatgaagagtaagatacatatatgaaaaaatgattcaagtagaagaaactaatagtataaaataacatatgaaataatcatataaggataatcgttaactctttcgtgaacaaatgttatcaataaaataaaatttttaattaaatatgaaagagaaaacttcattgaaaaacaaagaatcaaaatcaaaatagagtgacaaagagatgatgaacaacttattgaaaaaacaatgaataaatagggagagtagtaataattttgaactcaaggacacaaatgtatatccgacagaacagatcctgttgaagtaaggtcattatagcgagtggtaataattaaaaggggcattttgcttatatttgtaaacatttttcagcaattttgtcatttacaataattttcctaatcaaaataatgggtagaaaaatatataaaatgaaaattgacaaacttctcttgttacatctacgtgtactttcctagattaaattacttgatgtattagtagctaagttcccttggatttaatctctcaatgactttcagagttcaaacaaagtgaaagaattggttctgcttcataatgtgagacgtcttcactaagttccttagaaattggtttttcctttttcattcgtaatccaacctcacactctcaaacttaagaaacttcaggattgttggttgtgcaattcatcatatttaccaagaactgtttcaagatcaatttgttctatgatgtccttcctgattgttgttaatgtttctcattgatcaattatgttattccttagtatttagttgattatttgtgcatgcattagctaacgacttctgtcatactctaatattgaaatcgtcacgtagatgaaacctgttataagaaagaagaaaaaaaagtaatacagcatacattttctcaacaaaatgaataaatattggaatataaattaaaaggtaggaagggaaagaacttctggataccttttgaaagccatctagttaccaatgttctttatgttcttgttatgtgtcaagtatatttcatactttatgcatattcttaattaaaggtcaatgagggtagtgctagtgcaagtgagattttagcaggagcactccacgacaatggtcgggctactcttgttgggcataagacatttgggaaaggaaaaatccaggtattcttattctgtacagaacaatgtgtcatttcaaagcattctgttgcacaagtctacaagacaagtgaccaggtccgaagtttttcaactaatgttcaaagagtaggaatatgcttgaactgacttttctagtttttcaaaaaaatgtttttaatgtggaagaagggtgttctacacacctgagaagtcatcccaaacaagtcactggttgaacaaactaccaaaacatgttcaagaaaagatcgtattgtcggttagaaaggatgtttttaaatcttaaaacccccatcttttgcacatctagtcgatatcctgtctctatatgatccataactcagagtgttgtgttcttgtttcagagtgtcacggagcttc

SEQ ID NO: 7534 - DNA, 5587 bp, Cucumis sativus
  Intron number 2 from transcript Cucsa.079540.1 (locus Cucs a.079540) derived from phytozome v7.0 (chr-ID scaffold0079 3; pos 2404436 to 2410022 reverse strand)
tgaatacttgctcaactatccatttgttcaggtatgatgaagattttcctttcaatttctttctctccgtgtacaacgtgatgttcttctaatcaacccgatggttaaccaactcatgtttggattttgaatctgctcttcacacgcttcaacttaggtagttgggcaacaatattttagaactggactccattttcattatttttttgttattgtaattctcttcctatggttttgtttcggataatcgagtgttttacatgtagattgcatattccttttatagttctctaaagaaaattcttgtttttgttcgtgtaattctaatgtttgaacattttgctatgatcccctttttattcttcgtattggaagattttggtttgtttcagaagctattttctaaacgtttgttttgtttttatatttatatttgttcttttacttgtttttaagatttattattgaatcaattgtaaaggtttaatgttaattaacattgttatttatattgaaatcgtggtttataatgtgatgctggaagaataaggaatttaatgttattgtggattcttagttcatatagttttttaattactctttgatacccagaccaattggacactttatgcaactctttcctcctcttgtactttttaagttctcaatggaaagtgcacgtttcttaagggaaaaaggacataagaaagtacttgcaaagattttagagaatagtcaatcaaacatcttttcattagaacatagaaatatattttcaaaatgtttctcaaactcctagggagtgaaaaagaaaagaaaagaaaagaactaccaacccaactgagcaaaacaagctcttcaaaccttttggagcaatcactgattcagaacaaatccatcaaaaaataaaaaaagagcaaaaactgcttggtacaagatccaactcagaacaccaattaggtagagcaacaagagaatccacaaagaaagctcctcaataactaaggtggatgcttaggttttatttcatatagattgattctgaaatcttcaaaataatgtaaaagatcttcctttatctgaggcaatagaggcaggacaaagaattttattatccataagatgcaccttagcaagctcactgtcttccaatctggaatgctcattgttttaccttttttttatatcagtgagtatttagaccaacttacatgccttgtgactaatcttacgggataacccacttgaccctacatcatttaggtgtcaaggaaattaattcttaggtaggtgaccaccatggatttaatcattgacctcttagccaatagaatgctcgttattagaaagaagaaagtgttagaattagtgggcttggtccatagggtatttatggaaagattcactctaattcctaaatcttttcctttttaattccattgtgtattctatttattctctctcattgtatctattattcatcataaaataataaaagaataataatatcgtgatttttcttctggtactcaggtttttacgtaagccttggtttcgtgtttattgcttttcaataagtattagagcaaagcaagaacgaaaccctagaaaagaaacccataccaaaccataacccgcggtcgccgtggatgccaccatggaaaaaatagtccactagatttagaagccaccgatctacacaatgggccaatcctcgctgtcgtccgtgcagctctccagccagaatcaacctcacgcgccgctgcttgctcatctcactgcccagcctagcctcctccacggaccgtcgtttgtccaaccatcctacccttccggtaatttgcagccccacgcgtcgcccatgccctccggacagcaaccctttactgcaaatctgtcaaatctgttcgttcacatgccgctgttcgtcgaccctttacaataaccttttttctatggtaacgggactgcctaactccataacagatcaggggttgaagcaggcaagtcttcggtgcattccaaaacaaccgagttgctgatgtattccaagaactcggtaatttcgcttcttaattttgccttcgaattatgtaactgactttgctgctgcctttagtgcttgatcctcggcccatgataatgggaagaattgtgggaaaccaatccctctttatgcgagcactgcaagaaataggggcacaccaagaatcaatgttggaaactccacgatcataccccaagatgtaagaaacattcatacaacgacaaactaaactcaggatgtgcctatgttagtgagactactagcacctcttagttaactcgccctattgcaagccagaccagtccccctactatgggtgccattgcattgctcagtcaggtatgcctcagtctcttggccttatcagtgttgacgggaagaatcattggattttaaactcgggggctatagatcacttgacaggttcttcgagcactttgtctctttagccccaatccagagagccactccttgtaccggtaatgagcaatccaaagagcccccttgtaccagtaatgagcaatccatatagtcgatggatttttagccccaattgctggcaaaggacaaatagttctctttaacggtctttctctccagaatgttttgcatgtgcttttcttacaatttgttatctatcagtaagatcacccatgaccagcactgtaaagctacttccttacctgaatttgtttgttttcaggacttgagcttggagaggacgattgacactgacatagtaggagactttacatccttgatgatgagacctccagtagtagtatctctaggactagtttattgtcttcctattttaggacttctgaacatgactttatgttatgacattttcgtttaagtcatccgaactttacttatatgaaatatttttttctccatctattttctaaaattgatgtctcctctctatcttgtgatgtgtgtattggaacaaaacaacactgggtttcattccctcacaaccatataaacccacacaattgtttacccttatccatagtgacatttggggtccttccagggttaccaactcatttgggaaacaatggtttgtaactttcattgatgatcatactcgtcttacctggatctacttcatcacgagaatctgaggttttctctattttccaaaatttctttcacaccattgaaacacaattccatgcaaaaattgcaattctttggagcgataatggtcgggaattccaaaaccatttccttagtgaattccaaaaccatttccttagtgaattcctagcctctagaggattgttcaccaaaactcgtgtgcctacacttcccaacaaaatggggtggccaatcgaaataactgttatcttttggaagtagtttatttccttatgctatctacttccgttccttcattctgtggggagatgttattcttacaacagtcaacaacttatttaatcaatagagtgctttctcgtatcctccacctttagactcccttagattgtcctaagaagtcttacccttctactcgtctaattttttaggttccccttcatgtgttggggtgacggccataatcggaccaaatttacccctcgagctcaggcatgtgtgtttgttagatatcccttcatcagcgtggttataaatgttttcatctgtcatccaggaaatacttcgtcactatgaatgttactttttgtaagaaccgaccctactttcctgttagccatcttcagggggatagtgtgaatgaagagtctaattgtaccttagagtttatcgaacctactcctagtaccatgtctgacttcaattctcatctcacttgcctacccacaaatcaagttccttggaaaacgtattacaggagaaatctcataaaagaagtcgagtcctctactagtcagccgctggctccaatccaagattctgagcctcctcgagatcaaagtatggaaaatcctgccgaaccttgtactaataataagatgagtgagaatgatagttctgatattgctattcttgaaaatgtggaagcaaaaaaacagtggtgatgatattgaggtatgagcaggaatcggtaataatgaagctgaagagggccgggaaacttgatgagtatgatctctcttttgacaatcccattgctttgagaagaggtaccaagtcctatactaaacatctcatttgtaactttgtttcctatgataatcagtctctatgataatctctctcgacagttcagagcttttatagcaagccttgactctaccataatacttagagatatctacattgttttagattatcttgaatggaagaatactgtcatggaagagatgaaggctcttgaaaagaataaaacttgggagatttggctctacccaagggacacaaaactatgggatgcaaatgggtgttctctctcaaatacaaagcagatggaacacttgacatacactagatagggttagttgcaaagggatttactcagacctatggtgtaattatttagaaacttttttctccagttgctaagttgaacactcttagagtcctactgttttttgctgtgaacaaagattgacctctataccagctggatgttagaattagtgggcttggcccatagaattcctaaatcttttccttttttattccattgtgtatactatttattctccctcactgtacataaaataataaaagaaccctattgtgctttttctcttggtacttgggtttccacgtaagccctgattttgtgttcattgctttcaatagaaagtaagaaatattacatctccagaagactcttcatcaattctcaagcttggattatcatattaacgaagttagaaaaacaactaacaccaacataaatctcatcagcaaaaggtttttgaatggagttatcggcggggggcgggtgggggggtgggggggtgggggggggactgagtgtttcttgagagaaaatggaatgatctaaagtccaacaataaagagatacccagaccaactaaacataaaaactataattcagtgaaatcatctgtacagtgagattcactatcgaaaagacctagttgcaatcgcaacataatttagatgatgagataatcagatttttgtttatgtatacgtaatataatttgtaagaaaaagaatgctgccctaatcttttgttaatcatctttatttatttagaaactgagcattcttgagagaatggaattatgtaaagtccaacaataaagaaagacccaaaccaactaaaaataaaaactacaattcaataaaatcgatgtacagtgaattataccatgagaaagaggagggttaacctttgaagtacgaagattcacttagcttttggaatcaaaaagacctagttgcattcgcaacataatttagtcgatgatatccaatcagatttatgtttatgtatatgtattataatttgtaagaataagaatgatgccctactcttttgttaatcatcttcatttgttaaaaatggtaggttgatatcattcc

SEQ ID NO: 7535 - DNA, 4085 bp, Cucumis sativus
  Intron number 5 from transcript Cucsa.007330.1 (locus Cucs a.007330) derived from phytozome v7.0 (chr-ID scaffold0008 9; pos 237390 to 241474)
gctgcaggtggccttgcaagttctcaatctctaaggtcagttgccaatatacaaacttcacatatatggctcatgtttaactttgatcttaggcaaaatataaatttccttttcctcttatttcttggtgagaggtgtttgctatcatttgtgattgtgtattctacatttgattggtggaccactttactattctttggcatgttggtctcatgtcatgatcagaaacaactttcgagttatgttagtaaaaatgagaaacaattctgtcaacgaaaaccattaaatacggtttgtttgtttcttttctacatgattgtaaaggattttagaactgaatagacttgacccaaattcctctattttttatcatttaaaataaacgaatttgaaaccgaaatgactgcaactctggtgatatatatctcatactcgaaagagagacattccagtctaaactagttagattttgtaggttgttcatttaaaagaatactaacttataatcacttatcaaatttaagacctcatctagcagaaggatattattgtaaattgttcattttcttagtgctcatttttaacattcaaataacaatttttttgtacatttgaaatcgacatacaaaagataaaggttaaaataacattttggttcttgtactttaggtttagttcaattttagttcttggactttcaaatgcctaaaattttcattatatgacagcataaattttctaattctttaacttggtaatttagacactcgtttcgttcctgcatcataaactttccttttagtaattaattgtttttttaattttggattgatgccccctaactcgttttttctactgggaatagttaggtttaatcctattttagtctctgaatggttactgtcatctttcaaatattttagttgttattctttacatgaattttcgtttttcatttgattgaaatcttgggctatctccaaacttgatagttagacccaacatatctggcttaaaaacacaggtcactgtaggtctcgtaaatcttttgataaatgcaatatagagttttgatgacaaacacgggtgagtggtaagcatattttgaatattgttgttcattgctcaatcaagaacttttcttggaatccacataactactcatgggaaatggactcttgggttttttattctgtttatttgctccttttggcttgggctgttttgctatgtcatgtattctttcattcattctcaatgaaagtttttcttttcacaaaaaggagagcgagaattggtgatggagactcttgttgtgatgagtctatggtagcacaggtcttccttcatagtatccttgtaataagagtagagaacctttctaaggaagaatgaagatcattaggtttttgaggtccttttaaatctccaagcacattcctaccgtaaggactatttatgagggttttatcaaaccatagagactaaattcaacttgtaaaccagagggaccaaattctgactgtctgaaccatgaagaccaaaatttcaatttaaccaatataattccatcatacctttagctttagttctgattgctaatttataagaatgtgataagtattagttgaagtgtgcgcaagttggtgtgaacacagataaaaaaataggataattagattcaaatttattattaaaaaactagttttggaagaagattttgtttctgtgcttcctattttcttcaaaatcagtgtactgagatttaataaaccgttctcagattgcacaatttaaaaatgatcataaatcctgcccacctatatgaacgatcttgtcatagaaaactttctatagccttcacacaattttctatctgtctagcttgagcacaagtttttcatatctaaaagatcatgtgttatttgacatctgaatatgcagctggctattaaagaagtgaaaagttgaagtacctcaagtaaaattacctggttcagggagtaatggaaagtgaatgttcattacttaagcttgaccaagtatgccgaccattagacagtggcaattcaagaagcccaagatattcaatgtttatcattctcacagtgatattaaagttgacaccaatgcaccaaggatcttcctagtagcagaactcgttccaaagaaatttcccctcatgatggtcgtcaaaagcatcgccctccaccccctccctgttgcctctgcttgatttagtagtgctgacttctaaactatattatgacaatcatgaactatctattatgagtagtctaacccacgaaacttggagaaaataatcccagtttaaatggctgaattgagctaaaagaatatggctcaattcctctagtgcgttattaccaagagtgcgccattatagccaacatgatggaagacagacttcaaatctgatccattgtgcatctgctacctcccaatgtagaatttttcatgtaaagaatttgacattcttgggaatacctatctaaaatggagtataatggggaagaaaagggacaagtggtagcaaatgtatggagaaaaactcgcaagagagttctttgaaaggatcaagtgtgaccaaaactaaatgtcctactccccagctgaaatggtgttgctgaacgaggaaattaaagcaaaagtgtctaaggtctatctatgagacaaaggtcgatcaaactagagttgaataaagaggaagtaacaagggaagaaattatagaagacatgtggaccatgtggtgaaacctcatttagaattagtgacaattgcaaggaggtagaagatttgggtctatcgttcacacactactgttgaaaaattaaatattggagccgtcaccaactaagacatatttgactccaatatgaactgtaatgccttttattccttcatttttgcacaatgaaagtagtttaaataaaaaaatgggaattgccacaaccatttagcattaaggctttctaacagtttctgtattgagatggttgatcgtagtaaaacccttgtttcaaaagtcagatggctggtagggcaacaattgatgaagcaggggagtctattttgtgaggtccaggaggaggaaaccaagtcctagcccagagaaatgatgaatttggactttgccctcagagagtgctgaatagattttttagtaagaggaaataaaatggggtggacaattagtcatcgagtgaattatttctaaagtcactattctcagagttaacagcaaatcaccgttagctaaaaactcagctcagtgtgaattatttctgaagtcattattttaggtttgtcacgaaggacttaatacaaacttgaagcttctaaaaatttatgatccccttgcctagtttggttccttcttgtatgggaagcaattaaaatctaatgccaaggcttagggctactcttctgttctcgttgctggtgccaggtagccttggttgtccatcctgtattttgatctttttttggggctatgaagtttacattgattctggatttggttcgagattctcactaccaatgctgatccaatttttccccttcaatttttaattctttataaccattgtgatgtccaattcaacctgacacttgacttccatcaaaaggaagaatcagccgaaagacattatatatctattataggtgttggattagtttggaatgaggcaatgagcagttttttccagttcactttgagcatcaagacattaccttttataggagttggccatttgactcgtagataagtcttttgttacatgttataataagcattccagtgttggatttcttattgaaacaatgttttcacatgtgtattttactaagttggtatcccttctgatagatggggtgttttggtgggctggtttttttatatgcccttgtatttttttttctttttcaatgggagtcgtttggttcataaaaaatatgtacttttctttttatttttctaatattgcccagtttagttattttgctactgacccctttggtttttaatttgtatttggtgatcagggtagcattttcaagt

SEQ ID NO: 7536 - DNA, 928 bp, Cucumis sativus
  Intron number 2 from transcript Cucsa.359210.1 (locus Cucs a.359210) derived from phytozome v7.0 (chr-ID scaffold0358 8; pos 215990 to 216917 reverse strand)
aagctcatttcaagaatcaacctctcatcactcctgtgagttaattatgttatatatgatgttgatttctactttatttgttggttttttttttactaaaaggaaagtaatttctactatttactaaagttttttttaattactatatggtttggatggaaatatcgtgtatcaattttatgaaactattaatataatgttcggaaaattttatggaaagtaatgaaattttgattgtgatttaattacatattgtaagtgatgatcatttaagatagctaaatctaaacaatcatataacaaattttttaaaaaaaaaccgttaagaaatctaaacgatggaatacaaagaatattttgcacgcgagtggctaatttatcatgtgttgattgaaacattcttttttgtatttttcattgtaggtctgtaagctttttctgttttcgaaattgttctgttatattttttttaaactcaaaaaattaatgtattaaaaggtttgatggacttaaaaataaacatatacttgttttttttcttcaagttcattttctcttaaaataaaatttccaaaaattgaaaatttagaagagttataaattagaaaatgtagcacattgaaaaatattcattgttcataaaatatgacaacgacgaattttttcaatgttcgtaaaatatgacaacgacgaatgaaattatagaatcgtgtataaccatggacataaaattgaaaattttaaactcaaaactttctctagatttcatcgaaatataggataacccgaaatttcttgagatttcagttaaaaattccatgagaacatacacaaatatatataatatgatattttatttgataactaatattgattatattttatgcgtgaagcagtgttatcatagatctcgtgtgtaacattcaac

SEQ ID NO: 7537 - DNA, 2043 bp, Cucumis sativus
  Intron number 1 from transcript Cucsa.220290.1 (locus Cucs a.220290) derived from phytozome v7.0 (chr-ID scaffold0165 8; pos 1778776 to 1780818)
ttgaatctctcgagaatcagctctcttcattgcaggtttgattattgttgcttttcttgttttcttgttttctgaatgaagattatgcttcgatttggtttggtttcctttcgcatttttgttattgcgtcgataatgttgagaatttctgtggcttgtttgattgatatagacctgcttgattctgttggttaataattatgtttggactctcaatcctatagaagaatccatgatatgcagttagtctattatttttgtagcatgtgaagagaaaaagtatactttgaggtacgatttcgatgtccatgatagtcacatatttagaacttaaaatcttacaagttttctgacaaccaaatgtagtttggtttaatacttgattgctcaaagataacctcggccaagtagtcagaatataaaatttgttttgaaacagtttaagggtatgcaattacaattctactcacaatataaaatttgatttaatatttggtatgatttttcccaaaaaactaggaatcatcataccatctttttagatatggaactatttttcttttatttgaaatgttcctaaacatatgctatagtctgaaagcttgtgtttctatcgtcggtgcctcgtcacgctcactgccattctgtggtagtagagcaaaaatatgaacggggactggggagcatgatctccctcaattcaaacatcttattttatatatttacaaaaattagtattggacagttgtatggtgttagaccaccggttatacacacttctactcggaggagcaaaaatgagaattcactgtctggttaatgtttgacttcagtttatgtgttcttttattattttgtgtgaggtggtgtggggtcatatatatatgtacgtgtagggtattattttgggcatcttaaaagtgaatgtttgtgtaaacttggagagtactgccctctcggaaggtggagttgtaatatttctgattatcaatatcaaaccagtgctttctatatttgtgtatttggtgattcttaaatatggctgatggttttagtgcttcaggatatgtgtagggttgacgaaacttaaaaccttcaatgccccacttcactggcatgtttattgatattgctttttctagtttcaatgagtatgtatcagttgtttaccaaactgttattcgttctggtgtgctatgcacttatccccgtggctctgttagcttgtttgactgttggtggatttctcctgctcattgattcttgttatggtgtgaatcatccaaagatggtggatttcatcttttttctctttgagttgtgttaatttagttcgcaagtgtatccaattctcaggatcctggtcctttactgacaattaaatctggtataaatttttaacttataggtgagtttgtccatgcatagatattgaaaagattctatatattaatattctaaaaaggacaaggagagtgaggataggtttccctccatcaaagaacctatgggaaccaataggaaagatccccaattggttgcacggaagggataaaattataaaaaagaagaggaaaatagtaatttataaaattaacttgagatctccatttgtgagctaaaataatgtacttatgaatgttaaaatctgtttatgctgattttaaaagttctttaattaatgataggaatcacttcttgtcttatacatccatcaatcgtgattcttggctaaaagatgttaaatttcaattaaaacacctacaaaagaagctgctaaattatttcttaattttgacttttcatgccgtatcttccttcattttgtagtttttgaagccattttcaacatgaatctgaaattcgacaacaatgatgtttgtatgtccaatataatggaccttgagagagaggctagttaccgtgttggtgcaacaacgtttcatttgtagcataatttagatggaatattgttccatagaacatccttctaatacttctttctatcttctaatttgcaggatttacaacaacggcaaaggt

SEQ ID NO: 7538 - DNA, 3767 bp, Cucumis sativus
  Intron number 1 from transcript Cucsa.364370.1 (locus Cucs a.364370) derived from phytozome v7.0 (chr-ID scaffold0361 1; pos 1833990 to 1837756 reverse strand)
ttgctaaggtgatatttctacatcttagaattgttttctgttcaaagtttttgttttaatgtccaaatacgtgtttttatacagtaaatatttatatttgacaatcgacgaagtatgtatgagcatctgttagtgggtgctactcggcgtctgattaaaaaaaaaacactaattggattgtgtattttgtatatttttttctaatagatatattagcctgctcattcccttccatttttgttccctttttctttactaaaacaagttctgtcaacagaccgcatagtttaaatgagggtcgaatttagtcatcagttatgttttattcaagcgtgggacttatgaaacatattttctaggagggggatgagagatatattttcttaacgtaggagacgtattttgttcaagtttgtgaaatttgtattcggtatctgcgcactattgccttatgcgacaagtcaggttgcagtgttcgtatactaatctttgtgagatgtatatcggaaaggattgaccttgggggcagttggttgacttttattggtcattttggaattggaggtagagaaggtctaaaattattttgatttggagagggctatgcaattttagaatgtcgtacaaaggtatcttctctttttatgttcagtacatatgagtctgggacatgcttttagacacctacctattttagaaggggagatgggggtgaggattgaagataggctatcttctttcttctaattttataatactcttcaatggtgtgatgtgtctaagaaaaggaaaacactacaaatatccttgactaaaactccaacgctgccgtagacctctagagtttttcaaggagaatttgaaaacattatttgtctccctctgaatgtataatccccaagtcttggcataatacatttgtttaagagactttcacccatccctcaatttgtggcaaaaaagcaattaaaggctaaagatacctccctccaaattgcttggagaagttacataccaagagagattcttggccccagttacttttcattctttaatctttatacatttgccttatgattggtagacaagggtgtgcttagggttttcttttttaatgtgatcgggatttaggagtattgctcttttcatggtttaatattttccacttgttgagctgctttgatagtgctcaagtgtgattgtagttaatatctgttagattagttttaatcaagttgtctttgttttattttttgtatttcgattttgagaagcagaatagactttcattcaaaaattaattagctgaacaaaagtcaaaacaaccaaggggcaaagggataaggcatcccttttcctcgaggataatgggagtaattacgaaaggaaaacaaaaattgttgggcactccaattagaggcggtaaatgattacaaaaataggctagagaagtattcatatctaagaatactcttgaatttctttcccgttttagccaaggagaacagcccttgatagattaatccgaagcactttagctttttctttgaaccaacattcaaatgaaggttctgccgtccaattccccaattgcttcagtttacaacccctaaaagcaaacagcttgccgtaatggttcaacaagctacaaactcacaatgcagtaggcggtacgagagatattctcacttctgctgcacattacacaaacctgggagaaatgccaggattaggattccttttctgaattttgctcacagagttgatacttccaagggatgctgtccgcataaagaaatttattcaaaatccttctttctgttgaaggactaccaaaaccaactttactgagaaaatacgctacatatccaactttcaaagtaaaatttcatccacttaagcaggtctaactggttccaacaagttggttttgtttctttcaaatgatgtactttatggaaactaattaaggacagagaaattcagttcataagattctagttcagtggagtttgcatgggagcaaagatcttctaaacctgggttctttatttatccactacacatcttgcataaccacccaatcaacgcctgtgtgtaaacttgtggaagcggctaacattgcatcatctatcatggtaaagcagacataccatgaagatgaatagagcccttactcataccattggagatggttgttcttacttaaatacatatgatcatcctcttatctagctaatatggaactttggttgtattctcaacaaagctccccttgaacaaagtacaacctcgaatctcctctcaaacagtcatctcttcaaattacatttgaatatattacttttaaccaagttaattcctcaccagaggatactgccggttcaagtgctccaccatgaatgcactatgactacattgaatttgaggcttgttaatttctttgtttctcactggaggaatttatttttttccatgagggttttctattgacacagctaagttaggagtatgactttgataccacttattggggacaacaacccgccaaacatctacacaatagtataatattgtccactttgcacatcatgggttacggtaccatgttaaattgagattgacccataagcttaaatgatgggtaaggtaaatttaatatcatataatcgaacaaaatgttttactcccctagggacttgcaagtcagtatgtatgacttaaaaataatctacttttgttgaaacttgaaattaattgagtaccagtcaataattttttggttgagttagcaggtgaattgagtctaagtcgcttcattgggtttgtattgtgtcctgtgaatggaaatggaattttgaagacacattactttgtttggaaataggtcaccttttgtccaatggaccaatactattggtagttgatgaataagttaattgccaatctaaatgcccttcacctacttccattatcaaatatatagatatacttcattttctttttttcttttttttcgttctcactctttatttatttattattattattattttggttttgttttcttctctttaaatatcaaaactataggcagagactttatgaaaagggtgctccctgggcttatttttgtttttttttcctcaatgaaagttgttttcattaaaatacataaagaaataaagaaagcaggctagatacatttctgatcctcaagaacatttgagcttttcaaagctgttcccattaattgaatcaaagtttagttgttcatagtaatggtggtgaactctcaatttttgcccctgtcctgcccccgacttatctatacaaggaggtgcatattgagagtattgacaatagaaagaagaaaatggtgcaaaagattaggtcaaatggcttatgaagttaagtgggcattgggaggtgacctgaaacgaaaatttaaaacatcaatggtgcaaatgttgggccagatagctgctcaagtggttaaatagcgttttgtagtttgttgatatttggattgaagtttattttgccagcttcttctttgcctgcttaaattcgtattttgtgtgatggatgggtctgggattttagttacatgtattattagtttcgtacatcataccaccgtgcaatttcttgcttttttccatcttggatatggtttgcctgaccaattttttcactaatattccttcacaattgacttttctggaacagagtgtagcatttgatagaacatccgcgccgaagga

SEQ ID NO: 7539 - DNA, 5330 bp, Cucumis sativus
  Intron number 2 from transcript Cucsa.167370.1 (locus Cucs a.167370) derived from phytozome v7.0 (chr-ID scaffold0115 4; pos 732986 to 738315 reverse strand)
ttcccgggcagttttacagtttgctttgtccagtattttgtttctaatatcagtttctttatgcacattgtattctggtttgagatattcaaccaatttgtagaagtgaaatgaaaacagctgccaacttctatatcttatttatttatgtatttatttttggtaagaaaccagaagatatatggatgaaaaaaagaagacagcctaagggcaggaaagagagacccccttccaaaggtgttaataaaattaataaaagcagcaagcatatcttcaggagtccattgacttgttgcggtcaaaattcatcaattctaaccagttttcaattgaaattcatgaattggggactaatcttggtctaagttcaagaatttggaccacatctcagttggaattagtgagtttcaaagagttttcggcagaactcatgaattcagatttcgacttcttctttgaaaagatggataaaaaaatctattttacaattccttattcaatttggatagggaaagtgggttaaaaagttgatgaatatggaatgaaagcaaaaaatggaaagaaaggaaaagatttgcattggaatctagaaagcaaaagatgtgcatcaaaaagagtctttatcaacttaaatttgctccaagggactctgcttcattagtttttgtttggggcaatcggatctagttctgatgtagttagcttggctgttggttattagctgatgtaattagcttggttattaactgctggaaagtactcacacttttagacttttgacttgttgtaaaggtggtaggtcaccttctgccttagtataaaacttggaattaggctgttctaatttttttttcaattcatattttaataagaagaataaagacttcagtttttttgtttgaacttctccaagacttcatcaacttgctatcagagctctcgaagaagggactcatggtgggaaggaacccagccaacgctggcaaaggcaagcgtgtcaatgagcaacccttggaaccagagattctctcgctgaagacttcaaccccactcttgttggccgttgaagaagcgataggaaagatgaatacccgtttggccaatctacaacttgtaatcgaatgggtgtcctgccaaatggaattaggcacaaacgccttaccaaactggcaagatgccgccactagaaataagagaagaagatgctagctgcaactcgccgacaacatgcaagaaccaagaaccaagaaccgacgaggatacctcagaaagcgccaagaagcttcaaatgcacctagtgaccactgacttctaagacttgttgttatacaaacaaattcgaatgcattgtcgaatgaagaaaatgggttcgatcgtcaacttgcagaccaacggtggatgcaatgaaacaaagagggtaaaaaattattttgagtgtaacgagtttcaccttctcttcaaggctatcttgtactcaaaaatccctttttcatcacagagagggccagataagaggggattattaccaagaatttaaaatgaaggtggacttaaccacattcagtggaaaattagatgtggaggaatttcttgattggatcaagaatgtggaaaacttttttgagtacatgatagccttgaagagaaggtgaaactcgtttcactcaaaatcaagtcaggagcttcagcttggtgggaccaaatctaggtgaatcggagatagatcggaaaaagtctcactaggaattggcctagaatgttgaaactaatgaagggaagattcttgccaacagattacgaacggattttgtaccatcaatataaaaaatgcaaacaaggcaagcataagatatttgaatatgcggaagagtttcactgattgaacgcaagaacgagaatcaacgaaatagaaaaccgagatttgttaatggccttaaagaagagatccaagaacaaaggaatctccaattgattagcacccaatcggcggcaattttgatgatttacaaagtcgagatcaagatggaaagaagacagaaaatacgagatccgtcaagaacaagtgaatgaactcctagagaaagggcatattaggccaagcctaagtccttgcatctttcaagaccaatgagggcctctttgaatggttggtatgcctttcaaactttccaatgcgcctagcatttccatgaggttaatgacttaggatttacattcttgccttaataaattcttggtagtctattttgatgacattttagtatgtatcctttcctatgaagaacatctttctcacttgcataaacttttaaaacccttcaaagaaaccaacttagtatcaatttcaagaagtgttgacgtgctttaatttctatttctactgttgagcttttactcttcagctttcaagaccttagtattgttcttgtattttggatatgatgagaatgctaagggggtgccagcctagctgagatgtctgggtgcacctactgatcctctctctccctctcccatttctaggcttttctattactctcaatgtatactcctttgtactttgagtttattaataatattgaagcttgtctcctttctaaaaaaatatatcaatttcaagaagtgttctttcttggtcaaagacatatttttttgggttttgtcactaatgaatttggtatatctgtagatcataaaattttttactactatagcatccttgctaactgaatgtttaaagaaaggaaaatcctcatggtctaacatggtctaactcgcaaacacaaagttttgtgcttttgaaagaaaagttgtctaacaaaaccgttcgaggtagcggttggtgcttgtggagcacctatgaacaagaactttttcgttggtaagagctttaaaggcctgggaaaaattatcttgtaggccaataattcatttaatattccaaccacttgtccctcaaatatttacagacccgaaaaactattagtagaatgcatgctagatggctctcttttacccaacgttttcattttgtaataaagcataaggcgggtagtacgtactatgttgtggcgggtgctcgtagtaggaaagccaatcttctgactatcctaaagactcaagtggtagtttttgattctttaccaaacctttataaggatgaccttaactttggcaatatttggtttttatgtattgatgaggttaattgtcacttgactaacgagtttcttttgaagaataattttctttgcatttttggaacatcgcttcatgaggctttgattgaagagtttcatagcaatggccttgtggggcgtttcgatattgacaagacctatcaactacttagtgaaaggtattattggccacatctacgtagggatgtcataaagtttgtcaaatactgttttatgtgtcaaactgccaagggacagcatcgaaatacgggcctttacaccccattacctattacgggaggcatttgggaagacttgtccatggacttcatcctaggcctttcaaaaattcaaagggggtatgattcccttgttgtggtagttgatcgatttagcaagatgtctcactttttaccttgtaggaaaacttcgaatgctgtttatgtatctaacatattctttaaagaaattgtgcgtttgcacggaatacctaaatccatagtgtttggtcgagatgtaaagtttctaagctacttttggaggactctttggaaaaaattcaacatgacactcaaagttagcaccacgagtcatccacaaatggatggacaaactgaagtcaatagtagaactctagccaaccttataagatgcatcggtggagacaaacctaaacaatgggatctcatcttagcacaggtagagtttgcctacaatcatatgaagaatcgatccattgggaagtcaccatttgagattgtttacactaaattacctagataaacagttgaccttgccaatattccttctaatgttgatcttagtgtagaagccgagaacatagccgaaagaatagcaaaactgcacaaagatctagcaaaccaactagaaaagatgaatgaaaactacaagaaacaagcgaataaacatagaaaattcaaggaatttaaagaaggcaatctcgtcatgatatatcttcgaaaataggaccttatcgaatagtaaagaagtttggagacaacacatacaagattgacttacaggatcacgaacacatcaaccctatcttcaacttagccaatattttttagtattttctacctgaccagctgcatatttcagcctaactctaggacgagttttcctttggaggagggaatttgatgtaattagcttggttattaacttctggaaattactcacacttttagatttttgacctgttgtaatggttagttcaccttctgccttagtataaaacttggaattaggctgttattattatttttgaattcagattttaataaaaagattaaagacttcagttcttttgtttgaacttctccaatacttcatcaagttcctatggttatctttctttcaaacaatcatggttggcctagtggtaaaaaaaggacacatagtctcaataaacgctaagacgtcataggttcaatacatggtggtcacctacctagtcctatgagttttctggacacccaaatattgtagggttaggtgggttgtcccgtgagattagtcgaggtgcatgtatcttacctggacactcatggatattaaaaaacggatatttcatgatgatacttatgaagctttgccattttctaatagattatggatcaacattggacttcacttgatttagttttttaggcccctctgctttgttattgtcagatttggttgtacctttttctatttgctcatttgtattttggttgttattcactctttcatgtatgggcttcctctttatctttttaggggtttttccacttactctttggattaatctcattcatctataaaatgtttcttattaattttttttttgatgaatatttatttatcttgtatttaataagtgagggcataaatgttactttttgcataagcaatgggcccaaatcgactggtttttaagaggtacttttttgtacaatgtaaacatttagaggccattttttagaattactgtatgaacttataacttccaagtgcaaagaggtagttattatcattattatatttattttgatttttttttttaattttacgtcatgcctcgattaattatgtatcaaattggtgccagtgcaaaggtggtgattcagaggaacgatccttctc

SEQ ID NO: 7540 - DNA, 1088 bp, Cucumis sativus
  Intron number 1 from transcript Cucsa.128080.1 (locus Cucs a.128080) derived from phytozome v7.0 (chr-ID scaffold0102 4; pos 198412 to 199499)
ggagtggaggaagcttctttggagtttatatacaagtaagtaatttccaacacgaaaaattatgtggaaaattcttcttcatttaattttttttagtgatttcttaatttctttggagttcatatacaagtaagtagtttccaatttttatcatttctgataaaataactagaaaatttattttaaataaaaaattagtaaaattacttataaatatagcaaaaatataacaaaaacctaaaaagaccaaaatagactaatatatgtatttattatgatacaaataatagtctattttaatctattgcggtatctaactaaattttttttgtcctattttataaatgttttggtttattttattttatttaaaaaataacccaaatagaaatttagtctaataagaatttggtcccaatgcctaaaaaaacaatttcgtcccttcattttcaaaattgtaacaatttataatttattctttgtaactacaattcgtaacagtttattcattttgattcttttaaataaaaagttgttcattttgatttttaaataattgtttcaatcaaattacttttcatacaaggctctaaaacatatagctctaaatgttaatctaatggtgttttgcaaaaggaattttaagttcatgtacaagagccttttcttttgtaatttagttacaaactattatatttatttagtcgaagtatagatgtagagtaccacttttaagagaaactatttaatatatgtggtaagttagtagaattatttttgataacacaaattacaaaataagataaataaaagttgcaagaatctatttaaaaactgatataaatacataaaaaaatagtgatatgatgtttatacaccaaatagattcaaataatgggaaaacggggtattggtcattttgcctacaatatgtttaatgtctgtatactcttttttagtcaggtttagtttgatgacagattaaaaagaaaggattcttaattaaaatgaatgactaaatatttatttagaaaagttcatgaatgataaattcaacaaattaattctctttttataggtacctgccc

SEQ ID NO: 7541 - DNA, 5208 bp, Cucumis sativus
  Intron number 2 from transcript Cucsa.078990.1 (locus Cucs a.078990) derived from phytozome v7.0 (chr-ID scaffold0079 3; pos 1521720 to 1526927 reverse strand)
aaggtgggccctgtggcgtcttagcaactattcaagtaatccctaatttctcagaatgtagtttttactatatctcacagcattttatttgacatttaagttgctcatattgctttcaaaacatctacgcttcttactttgcatttatggtatccacagtaaactcctgaagtccttccctgtttattgttttgctgttagttcaaaaaatgaaaattcgaagctagtaacagctgtgcgtatgaatatgtaacttaagttactgatgcaacctgccaaatattgtttgttttctttttctttttctttttggaacaagaaaattttcattgataaatgaaataagaggaaaccgcaacacctaatagggaaagctctccatttggaaagaaaaaaaatataaactataatgagtaaaaggatgattagatttacaccaaagaaacacattaactaaaactaaatccatagaccacttaaaaagtgagaagtaatccttaaagatgaccattacattcaccccaaagtgtctagaagaatgctcgcacattagccaaccaaattgttcttttagaacgaccaaaaggatgtctcactaataaagaagctagaagatcaaatatagaattaggacaagcaaaagaccaaccataagcttccaaaataagattccagctacgagttgcaaaggaacaacgagcaaataagtgaggtggagattcaatgtatcaacaacacaagtgtccccaagaaggggagagatgcatgtaaagcatctgcctttgtggtttatcagtcccattaatagcaccaagaaattgatcttttttggataacgatcttaccaaactatatggtaaagatccttactagtagaatcaaccaaacctctacccaccaaatccgccatgagagatttaattgtaaaatttaaagagggatcaatagtgcaagtcgtatctgatgttgtgcagattctaacaaaagataagtaatgagataaagtagcccattcagaaatctccaagtcattaagattatgtagaaggtgtagatcccatgaatttgaaccatcaatccagacattagccacaatatcatcggtgtgtaaagcaagatgaaaaaggcggggggatgtagtaaagataaactgcaattgagcttaaaatctttccaaaaagaagtagaagaaatattgccaatgcaacgttgttcacgactagcaaccaagccaatagtccgacaaataaatctttaggggaatttaaagaacatcaataactagatattggccaaactttgatagtcgcacaatgcttggccataacaattaactatcgccataaagcatcccgctcaatgaggaaacaccaagtccatttagccaaacgagctaaataacaatggtgagaattgccgatgccaataccaccatcagtttgtaatcttccaattcacattatgcgtattgccattacgacaagaacctttccaagaaaagtcgggaaccatcttttctaggttattgatgatcaaggaaggagcatgaaacaaggataaataataagtaggcatgctagaaaccactgatggattgtgtgcctaaagccacaacctttagagataaaggtatacatccaattatgaagcttatgtcgaatcctctcaacaatcgaatgccaaaaagtagttgccctagccttcccacccaaaggcacgcacaagtaggtagacaggcaacaacccagtttacaaccaaatgtgttcaatatctattcaaaatcaaaatcaataacattaatcccaagcaactcacttttagagagattaattttctaagaaatacaaaaattgacatactgcacaaatacaacacgacattgacatggagacgcgctaatcttaaaaatagttggacacgacacattgggatacattattactttcttcttttctttgaaaaataaatatatatgtgtatattttgacatattgtgaaatatacacacatatttaacaaaaggaataaaaacaggaatggaaaaaaagaacgataaaaacggaaggaaaaataacagaaatgggaaaacaaaacaaaacagtaagaggtttgagattgtatctaaaactttcgcatttcatagaagattgagaaatgctctcttctctctcctttctccttaccccctctgttctgtaaccgtgtccttggcttcggccaccatgggtgctactaccaatccttcttcgactactttttcctccagatcaacttatagattggaatatcttctccattcaaccagaagaattggcttggtcacaagctcgaataattgaatagggtagatcttcttctactctcgctgtctttcatggttaactcttgattggcttgtctcatcctttaatagcctttgcaaatatccccattatcgtaagttttttggaaagatggatgatggtaataataactttttgttggaaaagcacaagaaaaatagctattttgccgaactcacacaaccccttcactttggttaccgagctaagctttacattccctcataagataacaagaagggtggttctctactcactgattttttaatattgagggaagcatcccctaaaaaaacagaaattgcagtggtcttaataaggctctcgatccacttcatggataagccttaccagccaactcttttagacccttgcatcactttcaatgtccaccaacaacacgactggagctcaatggtgagagtttaacgctaccaactacacgacacttgcccagagattagagcaacaatttgatcactactttacattctttgtccaaatccctttcaaattgatagaccctttcttcatgtttatgatgccacaaattaattgaaccttccatttgatttggctgatatctctcctctttccattcaaatccagataacatccaacctcctttatttggtgaatgttacaaatgctttgggttttccttccagctcctccttttctttccaaataccaaaacttggacccacaaaagtcgctttctccagccatctgtgtggggtggagtgggaagaggaacaaaaacagaggggttctatcacaaccaacaatcttcccaaagacaagtgttcgaaccatccccaataagacaattagctaatctgggaaaggtggaaaaatgggaagggatcgctttccaagggtttttgttgtaccctttagactctttttagcggagggtcatttgacatttcgtgcactgatctttattaggtcatttctaagattctggtagaaaaataaaaatgatcctctcaagttctgtagtatttcactgatttccaatttgcattcagtgaaggaaagaaaaattttcattcttgtttgacaaaaaatgatgtggctgaagtaacatgaaggagaaatcctccaagaaccaagattgtgaataatgtgcttcagttctattacatgtggggtaaaaagggagttaacctagaatattacctaatttcccaattaacccttagtcttcttacatcaaaaaagattgcattgatgattggaagagaaagaaaaaggtgttgccaaactcgatcttgagatttaaaagaacttcagctcttgttagagaacatggatcacagtatgtctttcttgtgcaaacttctcaagtattattaataagaagacggaaaactctagaatcaaagaaaatcaaatagattctcaccttccctttgctgttgcattgttaattgcaagcagattacttgtttgggggccttgatttgggtcacttggagtgcttcaatacaggaaatttttcgtatcatttacctcattcagtttcttgatgacactgttcttgttcccttcatttacatggaaatctttttaatattagtaaaatttctgaagcaccttctgtctttaagattaacctgacaagtttaaaagtgatggtctctagccttgaaattaaaggtttggtagattgggtgggttgtaatgttcagtatcggcctaaggtctatgtagggcttcctcttgatggaagatctttaatgtaccaagtttgagaagctgatcatcatgaacattgttgataagcctcaaactggaaatgcaattcactctcctaaggcagaatgctcaaactggaaatgcaattcactctccttaggcagaatgctcaaactggaaatgcaattcactctcctaaggcagaatgctcacacttttgcagatctctctctctggaacctacctatgcattgcacgtgcacttgttggttatccaagaaggttccatctatgactaaaagttatacgtgggacttttactggaattttaacaaatagagtggtgggatcccaattggtagcttggaacaaggtaaaacttcctattcctgttagaggattgggttttagtaattttcataataagaatgttccgcttcttgtgtaatggccaggaagatccacccttcaaaaagatctctatgtagaggacttatggctgccaaatttggggttaactggtttaaaagactttattaaatatactattcttgattgcatagctaaatgtggaaattggagggataatttttccttattatgaatagttcaattttgcaggacaactaaaggaagcatagctcaatttgctcaattgacataaaacatgtgcccttgaccatgagttagaggattgtttcctccgcccccatttcttatcgattaaaacgtttttgcatgatagccaccgtgggttggcctggtggtaaaaagaaagacatagtctcaataactaaccaagaggtcatgagttcaatttatggagacacctacttcggaattaattttctacgagtttccttgacacccaaatgttgtagagtcagacgggttgtcctgtgagattagttgagatgaacataagctgactcagacacttacgaatataaaaagaagaaaatcgttttgcatgatacagatgaatctatttttagataattaaccaatttgatgatgtcttatcttatctactgtttaggcatatatatgtctaatattttctatttatattattgacttggtctgtaattttgttatttatgcccatttggttttgttacaacaggcatttgttctgaagaacattcttttctttccgga

SEQ ID NO: 7542 - DNA, 1932 bp, Cucumis sativus
  Intron number 3 from transcript Cucsa.091070.1 (locus Cucs a.091070) derived from phytozome v7.0 (chr-ID scaffold0089 4; pos 2147203 to 2149134 reverse strand)
gcgaagtggtaagtcttgactttgaatttattcagttacgtgaagggagtgaaattaagctgttaggagcatgcacatcttctccttcctttctgaaatcttctgcctaccatgggggttttcagggcttgttttcaggctatacatcttgctttaaatcgaagtgttgatttgaatattgttaagtttgataaaaattttaacttaccacaattattatatttacacggttgaagagttcgatcttgtgccttagttatgattcaacaatagaagtatatgattttttcccctaatgagtaaatacttttgtttgtaaatactacatatttgatatgattcctttcgtaaccttttttctatcttaagggtgatttaacatagtattagaggagaaggttttgtattcaaactccaataatgtcatttcctccttaatttatattgatttttgcttgataggtatttaaaatatttttcaacccttgatgaggagagttaaattattgatataaatttaatttaccatactccattcgtgtatgtttttggtttccgagatggtttaacaaatatctgcttgtttgacttgactagaagttcttttgtttgagatgcttcaacattcattttgtctccattcaaaatcaagaaaatcaatgttctaaacgctctattgttcctcactccaaatgaaattttagccatcttctctccttttggaattagttctttttgtatgcctcatgtattctttaaatttttaccttcaatggaagcaaaatttctatactaaaaataatcaagaaaaacagttgaaaatgtgattgtagtttttagattctgcatttccagaaatatgtttaattgtaattcgtaagacagcttcttgatcacaaatatgtgaaatttggtgagctagatttatgagcacttttattcttgagtgtctactgtgagtagtttattaaaaccaaaatctgtttattcccgtgctaattactgcagcagtaaactaatagtaaaatctattcattcgttatttagctagagaatgaatctattccgtgtcatcagaactgaaggcatataactaggatgaccataataccatggaatggtcattcaggtagtttccttcatttagtacctaacacaaaaagcattgtaataataagaaaagagggacaggggttcatttgtctcaggacaagaatgatagaacaggtttttctaattcttcctgacatagtacactccaccagcaatagtttggaaatggagatggaacttttacaatctctgccagtggggttacatgagttgacaagtctttcagaatgttgtgtgatctgatcgtgagaagatataaatctttcacaagattatcaagtaggagaggggttgggtcttcctctagctagctcactatttcaatataggaaagtgggtttgaaacaatatggatggtttaaatgaatattgcgaagtatggtaaccgagagagaccgagagtggtctttctgtccacaagctagcttattaatttgaagatgaaaatgtgtttgaatcatactggacttatcttttctgaaaaatgtgctttaggtttctgttgattttgaaaatggaaaaggcaaagatgttaaaatgatctttttgtttttcctcgaattaactcaattgcaaaacgattttcaaattttggcttccagaaacctttttcttgtatttactaatccccttattttcaaaagcataaaaaacgagaatgaatcttatgccgaacaggccccacaatattttatatttgcttacctttgtaaccaatcacttgataaatttacaatactcttcgtaggtttataattgcatgcattcatttgtcagtcttctttcaacatgcttaaattatttgacattcaggtagcg

SEQ ID NO: 7543 - DNA, 231 bp, Cucumis sativus
  Intron number 1 from transcript Cucsa.234140.3 (locus Cucs a.234140) derived from phytozome v7.0 (chr-ID scaffold0199 9; pos 109232 to 109462 reverse strand)
gaaccggtttcagattttcccaattgaaattaactgtatgctttacctatttctcatggctctctcgttttgattggcaaaatccatattcatctgtctatgttttttatttgatgttcttattcttattggttgtttttgtagggtgtatgattctgtgattttaaacatcagaacagctgaagaaactgaattcattgagtttaaattgattttgttccttgtattcag

SEQ ID NO: 7544 - DNA, 1099 bp, Cucumis sativus
  Intron number 4 from transcript Cucsa.088570.1 (locus Cucs a.088570) derived from phytozome v7.0 (chr-ID scaffold0088 8; pos 841704 to 842802 reverse strand)
gactgtgggataaggtattctctttgatcactgctttcttcctttcttcctttcttcctttcttcttcttcttcacaccattttattcttttgaattcaaacttcaaataaaagaaagaaactaaacgactaattaaaatgagaatacgagaagatttcaagatggaaatgacgacttctcccccacacaatattattcttttgcttagtcaagaagaaacaatccatgcacataataatactaataaaagaattttaacaaatatcacattttaccactatttattagcaaattctgtggtgatagtcattgatatcaaaataatatgccctatagcaaatatcgttgtagtcaaaatccaaaattttactatattattttgctatttttaaaaatactcctaactaattatgtttgaattataataatttggtgatgaattataaatccattttaagtaatttcaattcatactttctactaaaaccaaacaaaaatcaacacttatatattgttttggtcttccatctttattgtgcttaactgcccttttcttaatcttattctattctgcttgatgtatatatttattggtctaaattttgacccattattctctattgttttactttttcaattttaatgtaaactttcaaataatatatttttgttaagaaactgttatataatattttgtcttaagaattcaatcctttcgagaaaaatggaagtcatgaaggaaattgacagaaaaaacaacatgaattttaaaaataaggaattaaaccgaaattgctatccaactaataaaaccatatataataatctttaacaacagttttaattctcataagatagatttgatggtttaatttgtatacagatagatttggattatttcctggcaaataagtaattaaaaaaaaaactacaatgaccatttacaagataaaataaaaaaaatatgaaagcttaataatcgaaatgtaggataaattagcttttattaatttgtttgtataattaattaattgcattaaaaatgtttaattattaaataaataaatatataacaggtaaaagatcaagaggcagtgg

SEQ ID NO: 7545 - DNA, 3888 bp, Cucumis sativus
  Intron number 2 from transcript Cucsa.240940.1 (locus Cucs a.240940) derived from phytozome v7.0 (chr-ID scaffold0204 7; pos 1130020 to 1133907 reverse strand)
attttttcccaccatttttctctctttctcaaagagttaaattattgttatttttctaacatccgttttaattaacaaaatttctaaaagtatttttaaacatagcaaaaaaataaaaaaatatatataatttaatccatgtttggatatttatattttgtttgatctgaactttttttttgattgaatacccattttcgaaagaattataattaattatattataccatttttatgattatctaataaaaagaaaattaagaatgtgatattgtgaaacccaaagattaaaaaaatatcaataatattttttataataaaattaaaccttgggtttggatcaaataaaatgtatttgtaggtttggagctacgaggacaaacaaaatcaagattcatttgactccatttttaaaatttaagagatagaaaaaagtatcaagcttttattaacaattttttaaaactaattgccctaattgaaaacttgtaaatatattaaggtaaaattaaaaatgttagaagattagtggagatcatttctcgaaatggatggttgaatttgttttgccctcaaaaaagttagcgagggtcgatatgttcaacattgattttgactttgaatttaagttcttatttaatggaaagggctagaatttcccttttcatgatttgggacccactccctatgatcaaacatattatttggttggttgctattgctattaaatgattttataagaaatgacgaaatagtttttcctcctaagatttactgtttcctttactattaaatgatttttaatcatatgcctattcagaaatagttgtgttagttgtggtggattaacttaagttcaaatttaaaaaaataaagaaaaaagatagtcattctttaaaaataaataccatcatgactgttttaaatttgaaaaaattatttttaaacaatatttaatttatagttgatagacatggtagatagatagttacattttaccatatacaaaaaatattattttacaacttaaaataactactcgttagaagaataaattatattttttaaaatattttttttagagaaaaggtccgtatgaattaaaagttaggaagaactaattaaattcttttaaattaattaatatatattaaaatatctaataataataaaaaattaaagtgtgaattttgaatggtggaaataaaattcttaaaagataaaatcttaaaatattgaaactgaaaattaaactcactaaagagtagaagggtaaaaaattgaaatctagggacccattgaccatatgctcaaaatttaatgacaaaaagagatatggttgaaaatttaagaagcaaaaatatatttataaatttatggcgaaacattgaagaagggtggatgaaaaattgagagtgcaagggtacattatcttaagaccccaatgacaaacctaacccataatggcataacccacagaccttagccaataggaacctcatcccctaaagcagcattatttcctatcatataaacaattacaggcagtaaatttctctacttattagtagtttttttttcttccaaaaaaagggattgttatttattaaatgatagaagaaaggggttattattttgactgggtaattatttatttgtattaatgtggagaagattgatgaattatgtattgtcaatttaaataattgtattgtttttttttagtattaatttaatttaaattgtcttaaaaccaattaattataaaaagatcaatcaattaattaatttaaagtgttacttaaatttagttcttttatccattaattagcttttgctgatcaagcttagctagttgtttttttaaaaatgtagctagttaacgttttcttaagctaagtgcttatgtttattttttattttctttttgttcgtattttgttatatacatccaactgtcaaacatttaattcctttagttacctaaaactacattaaagatatataaatatgcatgtccaagtgcaattcataaatataatgaaaataaatgaataaaccaaagatgtgtcaattaaccctttattaattgaacatagacaaaaagtttaggctaagtttaagatatattatgtaacaaacaatctaacaaaacaaagaatatttaagatatattatgtaacaaacaatctaacaaaacaaagaatattgttgtatgatcgttaaatcataaacaacctatattcatacaatttcatcaacagacaatcttttttcagagagagaatacaaaagaaaagtatgatagttctaaatgagcgaagagaattgaattaggatataaataaaaaaatggtcattgtttaagatctggtttgttctctataatgaatgttggtaattggaatgtctcaacatgtgtggttttaacgggcagtcgttgttgtttctacaattattttgttgtcaatatgagctcagctcaattaacacttgtatatattccaagacaagagatatcaggttcaaggagtttcggttgttgttgttcatatctcattagttctcatttagaggatattgattgggtttacattaaagtgagagatattctctaacttaggaaaaccctaagtttactgagagaagagcttcacttgaagaaagaaagataaactactacgtaagtagaagccttaccgttcttaggggaattaagtgtttatttgctaacttatgattgcccaaagaaaattgaaaaggagtcttgcatttaggaggaacctaaatattgtttcaaaaaagtcaagtctcaagtgtgtcactataattgttgtagctttatagataggacaactttgcaataccttcactttacattagtggacttattttttgtagacacactatcctcaatacgtattcttgtgttgcttatgcatgattatactatagctgttacaacattagtattaatatacatctatgatctgattaccttcctagtttttcagttgtgaattagtaaaataaaattatgaaaatagaggattaagtcacgtggcagacatgtcgcaagtaggtaatcatgttctaattattttttgtttgaatgtaatgaaaaacagagcttgattgggttgatagggctggttccatccaagaagagaaaaattcatatacttaaaggtgtcagtggaattatcaaaccttcaaggtacatatcttttttaataaaactaaatgttaaaagtaatgaaaactttattttgcctttgagaggtatttaataaaaacaaaactgttttatagattatacagtgtctccttgtctcgagttctaaggcatttaataaaaaaaatgtgtattgttggcttatatattttactttagtcccataactttgtattaaaccattttagtcattgtctaagtttttatcaattatctaataagaacccgacatatattcgacacatcttttgtttataacgtcaacatgtacatggctaatattttaaatcaagtatatgggaacaaaaatcttatctaaaacctaatcaagatttttaatgtatagttattgaataattaatgacattaactaaaatagtttccatgaacaaaaacacaacattaaacaagctataactaacttttacatggttaatgtgaattttcatttagtataaatgtagagtaatttttgcttctctttctactaacttcttttttttcttctagttattcaaattcttaaatttgatgattgtactaagaatagatagaaagaggaacttctttactctttaaattattttcacactttaatatgttctgtacttgatatagaaaattttcatactatctttatttattacttgcca

SEQ ID NO: 7546 - DNA, 3709 bp, Cucumis sativus
  Intron number 4 from transcript Cucsa.174510.1 (locus Cucs a.174510) derived from phytozome v7.0 (chr-ID scaffold0122 1; pos 159309 to 163017)
ttgagtcttctttgaagcaagttaggtctaccaaggtaggtttaatcctttccgataatgactgttttgatctattgtttgatagttatttggtttttgaaaaattaactttataaatatacattcttcttttgaaagagttattttaaacttgtgtaaagtttttaacgaaaaaaatagttcttgaaaaccttttttttaaaaaaattgtttaagacttctaaagtctaaaatgataaaaaaaaaaaaactcttgaatgacaattgaaaaaaccaaaaaccaaaattaaaggcctatttgatataaacttttcgtttttaattttctgcattattcaaatttgaaaactaaaatcaagtttttaaaaactaaataagtttatagttttaaaaacttttcccagttttgaaacaaaagtagataataaaactaagaaacttataggtatggtttataaacgtgagttcaaattgtgctggaaataaatttagtttatttatttcaccaataactactttttaaaaagtatgattttgggtgatgagccaagtagatatacaaaatctcatagtattttgatgaaatattatggttgaagtatcaattaatatgcaatagtttttgttatttgttgccaacttttttagaattgggtttgtttgattttagtttattaaatttgtataaattcttgaaagttaatttttttctccaattcgattttagtttcttatttttcaaaacatcaacatatttgcttcttcattctgcttttactcataaaatggatatataatatgccaacaataagtacacaactatttcgatattctgaaggattaattttccaataacttctttttgtctacaatgttttaaaactaacgcatagttttaattacatagagaaacctaaatttatatgaatgttcatttagattatagatttaaaagtttcatattcaaactttacagattaaatacttttttggacatcttaatacaaatcatttattcatttaaaacttttgatttttttgtttttctaatttggttttgtatacttttaatgatattttggagtgactacgactttaatctcttaacactccaatatattgaagaaaataggtttgggaatttttggagtacaagttctcataatatttttaatggttttaatatactgttcatgaaattgttgtttgaatttaagtgatagatgttaaatggacaacattttcactatctataatagataaaagattatctaagaaatgacttttcatatctacttgattgtttgttttattgtttaccttttctcaatattttcaaaatataagtcaaattttgaaaattaggtttcatttgattaccattacttctctgcatgttgatttccttgggttgtttattattattttgttttgcattcctaaataccaaagtaagcaaactaggcaaaaggcaaagttgtttttagaatttggaattttactatgaattcatttgtttatttaggaaagatgataaaactattataaaaaatgttgcaataaaataagcataattttcaggaaaaaaaatcaaaaagacaaatgtgcctaaaaaatagtttttagaaatttgttgtttttactttctatatttagaatgtggccatgaattctactgtttaactttgtggaaggatgaaactcatgattaagaaattgtgagaaatcaaatataattttgcaatctaaatgccaacaaacgtaaaaacatgttttataagcttatttctttattttgtttttcgtctagttttctctatcatctttcttaagttaaagagttgagttcttgaggatatatgaacacagttgagatgtgcatcctcccttccatttattttagttttttttttttttttttaaaaaggataaaagttaattttttagtcaaatttgaaaaacaagaacaaacatttaaaacaacttcgtttaatttttaaattttggtttggttttaaaaacagcctttaatctaatcaaccaaatttaaaaatcagtagaagaatggttagtaggtgaatgtttagatttttagttttgaaaattacttattttctgccaatttcttatatatgcttgcaccttcttccttaaatgaagaagtaactactgagaataaaaaaataaactaattagtttttagttttcaaaacttttgcttggttttttgaaatactagtaagaagataacgatgggaggaaggagtgtttatagtcaatttttaaaaactaaaatataaaaactcaaatgttaaccaaaaaggtttcaagtagttatctaatgaaccaaagtaattaccttgatttgaattagtaattcttagtagctattttgtatttttgcttttgaaaattaaactcattgacacctcttttatcttttttttttcctgatttaaaaaatcaaggtaaagtgtgaaaactaagaaatgttattgaacttttattttaattcttgaacttaagtctgaacgtcttgtctctaacagtatctatgtggctgtggtgtgtctctgtccatttaaaagacaattattgaagcttttcacttttgtactttgaatatgcttaaccagaatctggcagtttagtacactatccagttgctctgtttcttaattaatacccttattaaacttccacttctttttgtttttaaccacaagttttatagctacaaagttcaacgcactcttttaacttatggcttttatgggaaatctgttttactcagctgtagaattgatcttgataagattattcaaacgttgtagtttgtgtaaattggtgtttagttttgagcttattattttaatctgacactaccagtattaaaaagattcaattgcaattttactccctgtagtgttggccaaatagtttgtcttaaaagttaagaatctagcattttgattcaataaagccttcaaatgatccttatgatttgataaaatcatatcacaaatagtcttttactataagagttacttatgaggcttcatcaaaccaaaccgtagggactgtctgtttaaatgattagaaactattttataatttaacctattgaaaactacttatacaacttctttccaaacaaatgcttttgtttgtgcgtggtgatatttttatatgtatttgagctcttagatatgtatggctagttagttccatttttctgtggcttcattgttgagcttctttttaggtaaaactatttattgaatgtctcatcataacggttgaatgtagattcttaaacatgcatgcaagtttctaataactattacagtttttcactccaagtttctccataaaagcaaatgtttgactgaaaaaagaagtacacaaggctagtatatgacccaaactcctctttattagctgatatacaattaaatttatgttcacctattagcttatgctttttagtcaagaggtgattaaagactctttggacctatatcttatgtgatcttaagaaaacctaggtttatgtactttgtaaatcaatgtatgaacaaaacactaattgttctttttttaaaaaaaatattttgtgattgactagtcgttatcttagctaaggacatgtataatttgtcaattatgaccaaattgttgaaaatttggaactttgcagactcagtac

SEQ ID NO: 7547 - DNA, 462 bp, Cucumis sativus
  Intron number 5 from transcript Cucsa.091740.5 (locus Cucs a.091740) derived from phytozome v7.0 (chr-ID scaffold0089 4; pos 2660872 to 2661333 reverse strand)
acttcatattgataagaaatccacttgatattttggtaagatacttgggaaatttatttctcactacctttatgttggcattcaacaaggttactaaaagactggatagtcatatacttgtattaacctcataatattttacctcgcatatggattacactattatttgaaaaagaactcacttttttttgcttttctttttgcttttatacaatgaatcttggaggattttctattcttccttgttactaatcaagggtgaagtttcttatgaaaaaccactatatttaaaattttaatttatttttgtttgtagttgtggtgtggtgtggagtgtaagaaccatattgtttgttgtattctttggattggttgttctgtgtacattataagtttcattgatggtcaccgaactctttatttacctttcttgacaattaatgaacttgtctcagccatcct

SEQ ID NO: 7548 - DNA, 1410 bp, Cucumis sativus
  Intron number 3 from transcript Cucsa.193220.2 (locus Cucs a.193220) derived from phytozome v7.0 (chr-ID scaffold0133 5; pos 191427 to 192836 reverse strand)
agttgaaagttaaagaggaatataacagttacagggtatgaatttctattactcttcgtattgtataatctctcatctttccccttattgcatgtggtagtttgcaatttgatgaaacttttcaatatttagggctaaggtatacctcgaactctccgaaattagtgctttgttataagagttattttctcactcacttttgtattttactcgaacacctttgttagatgacgtacttctataggatcagcagccaccaactgctgacggaaacattctttcttttatagatttggataatgaagcttcagatgggcctgattagttaattttaccccgtctagattttgggttattttccagtttttgttagttagaaacaaacggtcattaataggatggaatttacagtatgatgagctttcttgaacaggttagtttctgtaggttacacaattgtgcccttgagttttatagtatggaatttacagtatgataagaatgcgtcctctaatcctacgccaggggagttattcagattttattacaaatggaacagataaaaacaaaagtttgatcaagttgtctttggatcttgacttaacaaccttgctcgaaaactttatatggacgccttcccttttacgtgactaccagcttaataaaattcacggatttatgcgaagctatgccatcttgtcagtaattatttgaatacttattcagctgacttctgatttcctacggggatatctaagttttagagcacatcttctgtttagttaactgtcatagagtgaaaggaaattttgtaggtacttgccaagagttctcttcctatattttacatttttctcttaaatgtacagttagtattctggtcaatttcaatcttgcctttgtaatatactaaactacagttggagacatagttgacttaaagattttagaggggaagtgaaataaaaatcacttcttgcattgttttggtgccaagaaatgttggcaggtttcatttcaagttttgtaactacaaaagcactatgagtactattattcaacttttaggtagaatcaagtctagatttagaggcaaagtgaaaccgttatgacctatgcaattataatgattaggagctaatgaatattttggacaaatttaccaagtggtgtgagaggtggatgcagctaaatgcctcaagctacttattggcattcgtaatcctccttctatagtaattactacatgatattttctcagtttggggggctctggatatccatcggttaagatatttgtcaagatggttttttttggggtaaattctatgtaattttagcttgaggtgccctcacgttgatctctttcaagcaggacaggactgctcttctttttctccttttcccatc

SEQ ID NO: 7549 - DNA, 2235 bp, Cucumis sativus
  Intron number 28 from transcript Cucsa.219010.1 (locus Cuc sa.219010) derived from phytozome v7.0 (chr-ID scaffold016 58; pos 890508 to 892742)
tcccccctgaaattttggcgacgcttctaaacctggtttgtttctgaagcattatttattgctcaatccatgcagctagattgtgttgatacaaatgcttcatttatttgatgatattggttgataccgttttacagtgtgctaacctatgaagcactgatatgtgagggaaggaatggaatctgcatcagatacgtatctgatacagatttgtccagatatgtattagatatgtgtcatatacgtgttttgacgagttttttaggcaaaaaaatgaatacgcagattatattttttaggtttaaattaaagtcttcaaaaacaaagaaagaaagcaaatactaagaaatactgagcctatccacatgaaggaaaacgagacatgcgtatcgaaaaaaaatggatctattttactctatgcaactaaacaattttagagattaacatgcaacaaactactccaattaaatgaaattagggttaatagaaaacataccttcgtagcttcccaattcctcaatatctcctcacaaacatgagcccgagaccaccactagagttgacctgctattctctggacttagaaccaggctgtgggacccgttaaatgaaggaaattggaaggtgggacttagggttaagattttggaagagagaacttttgaataattttgtaagtcaaaattacaaaaatagcaaaagtctttactaatttgaaatgaagcctatttatgaactaattacatgcaaccaatgtgttagtcggagaagaatgtaggtggaggtccgcgacaatagaaaataatatgggatgccggcgaccacaaagaaggatgtgtgttagctggtgaccatggagaagtatgtgggttagctggttattagaggaaaaaaatagtgtattgagaatttgagaagatgaagggagatgaagggttcaaaaaatagtgaagagataaaaaggaaagataaaaaagaaatgtgaaaagaccatcatatatgggattaaatatacatttgatattattaaatgtcatttaaacaagaagcttccttttatgcatttgtctcaaggtgtctttttcatctttttaattcactaaattttcactcattattattatttttttaaaatcttaaattagttaatttcaaactttcaacttttactttaggtgaatctaattaaatttaaagtatgttgaattaaatattagaataaaatgtattaaaatagtttttttttctactacgtcacattgatgtttctaaattagatttttatatcaaatttacatatcctaaaaaataataaataatgtatcttcaacgtttctgtatcttagttttttagaaattgatgtatcattatatcctgtcgtactagtattgcgtatccatatccgtgtttgtgtttcataggtgctaacaataaactagttacctactgggatgcagtgtttactcaaatctgtgacaagcaccttaaaaataagtaggtgctgaataggtgctgacaaaccagtgtttacttcaatctggcgtgtgattgggttagatttaaatgttattttggaagagcatcattcatgagggaggatttaggcttggatttaaatgatattccatatctgtcttttcttctttgatttggaacgtttatgtgctttatggacaaatgattatatgcatctataacatatttaaatggttatatacatctataatatatataattggtgcaatgaaggagaaatttttcttttttatatttttccttttaaattcctattttgtcatttattacaactatttaggttgaagttgttagaagacaaattgttgtgtcttctcatgtatagggtcaaacaatgtaaaataatttttttgaaacggatacaagcttctttataaataatgtaaaatattgaattagtatcttcttaaaactttgttttgtgaactaaaataaaactgtaaatttcctgtgggatgatatgtgttatgggctaatatatatatatatatatgaagtgatagaaaatgacttttgtattcatcaacctatgattgaaggcttaaggatcttcttaacttttaattttgactgtaatttgctgcattgtactgatgttttcaatgcagcaaattcacatatttcctgcttaaactctttaactgttatttttattctttctattggggaacattttggaaatttggcaggcagagttt

SEQ ID NO: 7550 - DNA, 2990 bp, Cucumis sativus
  Intron number 1 from transcript Cucsa.104290.1 (locus Cucs a.104290) derived from phytozome v7.0 (chr-ID scaffold0092 7; pos 2864592 to 2867581)
cagtcacaggtacacttttctatataattttttttattttcgttgatttacgggaaaaaggaaatggttaggccaagaaagttcagatgcagagaaaatttccttttttctgctgagtgctgaccgattcactgttgaatcccaaaagaactcagaaaacagtaatcatatttatgttgattagagtttaaaacgttcatactgaaagatattgggtctttttgcaaaaataataaatgtgaggaataaattgagatagaaaattcttaaaaagaaaatgtagaacaaacaaattaattctacatatgcaaaaaatgaacaaacaagtcaattgtacatatgcagaaaataaaattttaaagtaaggtcagtttagacaccccctcagggtagtacatgattatgaaaatccccatttggacacaagaatatgccttaagccaagcttctcaggattagagctaacggacttacacgatttgatgcctcaatgatttactcaccatttttattatgaaaattctttcaactcaagagaacttcaccagtcctaaatcatcaactttctctttgagtttgtcctattgatgtaggggaaaaactcaattcaagatcaacttacagctcacattggctggcataccttgatttagtcagattatactaatattgcctttgcttagtcgtgtctagtaaatgaaatctactggtcctctaaatgggggtgcaatctcgcctcttgttagttgcttggttcaacttacaatgttcgttgtttgcctatcataacacaatctcctcaacttggcctaaatgtctacttaacctccattctagatgagtttctttgtcctgccaactttagataccaatggctaaatacctcaatcacacacttgacttattgatggagttgattcaacaaatcccacattaattcttgttttacttcccaaacgactctttctacttgtagctatttataatactagacctcacacctacaggtaatgttcgtagcttctttaatcggagttatgggattaaggtaatcatagtgttcttgaaataattgtaccgtggcttgattcttcgctttatagataatataagatttccgcgactcactcaagataatccacaatctttgcagcatagaggaaagttgtttcaataaacatctcccggatattaattgagcccattcaatgaacttttctggaatgctatatttgaatttaatatccatgaagaatgcttaatgagtaaaacttaatagtttttcactgccctgtttatataaaattaaatcaattgttacccctagaatttaagactggcatattgaccttaaatttattagttacaaacaagcaaaggtcaaatctcattttaagcacatgttcgtgccactatgaaaaacaattctagagtcttgatattcagtttgctctctgattaaaagaaaatatatttaaaccttccccgtgagcgtgaggataagggttcaactttcagagtaaagagccaaaattcatttcggcaggggtcccttccctgaatttctttcacacaccatgaaaagagtcttttgaagttggaaagcaaacaatactttcttttgtgttttccttttctgtggccgtcagaatcagaacgagggtctagagtttgagtttgcacactgcgtctcaggctctttttcttggagttcggtataatgttgcggaatgatctgatgcatgattgataatttagttgactaattgccctgtaaaaataaaccaagagatctggagtgacgatcgaggaatgtggcagattatttgcaacattcttttcgcttttaacaaacaaacactacttattctaatatgttacgtatcattatattatatttaggaccttctgatttggcagttttttttttattcatttgaatcaactatggtcgcttgacttttgtagaatttaaatatttgatagtttttgtcaagttgcaggtagttttgacattggtttatgctaattaagatttgaatcaagccataccaatccacttaatttagatccccgacttgactatacattggaatctcactcctacgtgtggttgataaaaaaaaaaaaaatcttaatttccaagccatgagtaaatgttacattcataaaatttgcagcagagtttagaattggatgacaagctagctttgtaaatacttcaggcagttgtatcaaaagataaataaagcacattcatgagcaacttaggcgcaatgaagcatttaaggaaagaacaattcaacaaatgctagtttggagtttagtgattcaaatcatgtactcagtattcttagacattggcgtaccttggtagatgaatcgaatggttttattaacaagaataacaaacatgtttggtccacagtcaaaggagtagggagagggaaaggaaatggaatagagaagaaaagaaattgaatggcccaatccattcctttagctaccaatggttgcttgggagatgggttgaggtagtcgctgcatgcccatcagggcagcgttgaaatgtaaaatcaatggcagtgaagatagaagaagagtgaaacaaatgcaaagggaagagtgggtgagtaaatgtggtccctttgcagcagccaggctagtgatggacagcctaaagctgtagaatagaagaatagggcgtcctttatttgtgatgtggatactccaaatttgttttccttcactgtattgttcctttcactgttctgctacaatctgccctcttactcagaacttctctgctctctcctctctcgttcttgtcggataacttatgactcacccacccttttctacaccaatttatgctatctctctctcgtctctctctctccttctcttgcacttgcctctcttaaatactcatcactctctctctctctctctcagctacttgtggttgtggtgcggtgggtgaaagtgga

SEQ ID NO: 7551 - DNA, 623 bp, Cucumis sativus
  Intron number 1 from transcript Cucsa.334790.1 (locus Cucs a.334790) derived from phytozome v7.0 (chr-ID scaffold0331 2; pos 258879 to 259501)
cgtctctgatccttctctcattcgtctcaacattggtaactccacttctccacttctccccctctcactctcttgcatccattgcctcaactcaattatctaaactgttgatttcaacaactgccgattggtttctgaaaagaatttcgacgtttaggatgtttcaattaacaattaatttatgaatttacctgatctttaacatcttcttgcttggaaatcagcattgtactatctttagttctcttctatttgttcatttagcgttaattgagaagtattctgggttattttggattttccctttttattattggctttaagtgaattaattaaactattgatttcacaaactaccgatagggttacgaaaaaaaaattcgacgttcagttgctgataatcttgtttagttgttgtaattaacaattaattcaagagtttaactgatctttgacatgttctttctgggaaatcagcattggactatctttaattctgttctattttttcatttagcgttagttgaggagggttttgggttattttgggttttcctcttttgtaaaatttttcgtgcttacttgcaggtgggaagaaatttagaacaacattagatacattg

SEQ ID NO: 7552 - DNA, 4897 bp, Cucumis sativus
  Intron number 2 from transcript Cucsa.149700.1 (locus Cucs a.149700) derived from phytozome v7.0 (chr-ID scaffold0111 0; pos 563578 to 568474)
agcatccagcaggtttgttgttcaattactattggaattgtttgacttggatatcagtgaatgtatatttgtggattatcgttctttatctcatggaaaaaagtgaaattaaaacctctagatttgaacaatattcaacatgaaagaaaagtaacaaatgagagaaaataattttgcaagagacacccgtagcttattattaataaaagagacttgtttctctttcaaaaaataaataaaatagaaagccatgtataaaggcttgggaagagaactccaacaatctttcaacaaagtgaagctctggaatatttttcactcgacagatttagagaaaaactggtgtaaaccataagtctgactctttaccaaaatgattattctcccaaatgaggagagaaatgttgtatttatagagaaatatgattacaaggttcaaactacccttctaactaactttctaacatccctattttgaaaacaaataactctcttgtatacaaagtttgttcataattgggagaaagaaatctcttcttcatcaatttctttatcttgtcccaagaacgaatggacctcttcccttgtctttacggtttacttctaattggtcccaccatgccgaggctctccctttcaacttgagagctatgaacttcacctttttatgattcagagtgttcatgtaatcaaagaaaagcttcaatatctctttccataaagacccggcaaatcaatcttcatatgtagtcatgagcttcaaatctttcttttcttcttggtgcgtaaaagtcttcttcttggttatcattgcttgaataatctgaatcttgggattcgtggagcatttcttgaacatttggttgcttcagattttcttggactagtctttgaattcttggaaactttcttgtgctacttcttactgaactcttctagctgccgccaccacttccatcgttcttgtgagcgcattaatgctttcttgaaggttggtaagtggcacgtaaattcccattccctccaatgaagattcaacagacaccaaatgttgggttgatgttcttggagagagtgtggggttttcttccacctcttgttcttacgcacaactttcctccacaattggttgattagctcttcttccggccattggtcccaaatcttggagttgcccggataccaatttggtgtaaactaaaagtcttaactttttatcaaaatgattattctcccaaatgaggagagaaatgttgtatttatagagagatatgagtacaaggtccaaactactcttctcactaactttctaacatccctgttttaaaaacaagtaactctcactctcttgggtacaccaaaacaaaacaagacataataaaaaacctccaagtaataaaatgtaatctggctggcatttcaatgggttatcttaacagtagagagggccctgaaactgatctttactgtataaaaagtaaggtgaaaaagtggagggaaagttgttataatagattcacaactaagccaagagctttcagaaaaaaaagtagagctactattgccactttgcgaatgagaacatctagcaaccaagtgaatattctcacaattgaatctccaaggggactaaaatgaaatagattgaattgatcttactcattctcacctcatactggcatataacacttagtactagtaagcttttgccataaagcattatctttggcatataacacttagcactagtaagcttttgccataaagcattctcttgcataagagatctccatttccatttagccaatatggcataattatccacttgtgagacctatatgttaggaagggcagaaaagggaattcatcggctaataatgagaaagaatgattgagggaaagagatcgtgtagagtgggtcccccgggaagcattttaggaaggctataaataggattgtttgagagagggaagctaggttttattttgtcatctttatgatgggtaggctgttgtagccgtaaaagggggtatccttcttgtaaaaggtgctgatatgttttctggttatttcctttctttgttatatttcatatcgttggttgtaacgttttggcttatatataaataaagaatatcagagtactgcctctgtttagccattgttggatgttttatttgatattttggttggaagcctgacattatgatactgaagatgaccagctataaatcaattttggaagttgagtagtctcccaattcacatttatgcatgcctccatcaccatgagaactttcccggaataaaatcacatataatttggtccaaaatctttgcaaccttagttctaagacgtggcaaagataagtaataagttagcatactagcaacagttgccttataagcgtatgtctattagtacccttggggataaaagcatactttcacttatgaagtttgtgttgactgcgctctataataggttgcctaaaaagtaggattttgaattacctcccaagtgaaattcgatataggttgaaggttggtgactctatttgcattcaaaagtaggcaattatctatccatctcagagtcaacaatatgaatcccaagcagttttagggagattgatttttaaacccaaggggcgacaccctctaaaaaaatattaataatttcaaagagatggccgaaagcaatcaattagcaataaaaaacaaaaggtgacatcacgtggtccaattagaagagggatgcaccaattgaatctgttgccatattacctaaatgagcactatgggcaaaaaattgactaggataatcaggaatcaaaataaatataagtcgtacgttgaatactaatctcttttcatttttttaatgaaaggtgttgtatcctttacaaaaagttagtaccagacatacaacttctaatgccggagaataccaaaatccttagcttgaagaactgcatccagaaagtcccaatcaattgtgtcagatggctgatctagatctaatttgagaacaccctacctatgaggggtagtccaatcatcaactagttcatttttcattaaagaggcatctagactctgcatgtttgcaacagaggctagtttggttcaacagtggtagaagcgctaaacgaaactacctcaatcacgtttaagaattccccttattctaggtgaactcccacagcagtaataagaataaccccgatcaaacaaatagttaaacaaccccaagaaagctaaatagattttagcttggaaagattgatcaaagatcaagaagaaagataacttgttcctaacttcaagatttcgaactctccacaatctaattgatcaaactagattgaaagtcctaaacatgcattctaacgcaagaatacaaaggaaaacataaagcttgagagataacgctctataagaactttcattgaaatttaagtttttttttaaaaaatttggaaactacaaccctatagtgattaaaatgttgcatgaaagtatgtcctagctctttagcttcttccggggagggccctcttgtcccttgcccttaggatgttctgttttgttatatgaatatacttgtctcttatcaaaaaataaaatgttgcatgaaaggacacaagatttaattttatgccctttcaactactctaataaatgaaatacataaaattaaataagttcatattaaagatgtgaatgaatcttaatttctaaattaattatgttctatgagtgtccaagtgactcttgaagttccaactcgtcattaaagtctgaaaatttagcttgaaagttaaacgtttgagaacaagctttaaccggttagacaaagatcaaacaataatcttgtatgcacgagtcacaaggaataagatcaataggaagagaatcaacaaccaatttagagtcaaatttcttacaaattaaaccggtgcacgtttcattcagagatgtattaataagatcagaagaaaaagaactcgtggatcatgtccctaacatcctgcttaagagtgcccaaaaaaatgtgaagaactcggccaatccataaggactagaagacgtactagacccttcatgagaaacacagaacatttttttattaaaagaaaaacacctgctctctactgattggactctttgtatggaagatctgcattttaaacctttgattgatttttttgtatttttggtggttaaaatgccattcattgctgagatgaggaagggagggaatacgttaccatttcttgacgtagtgagttggttgagatagatctttgtgaccatgtagggaagcatttttctttttgaaagagtaacaaatctctttgttgaattaatgaattgagaccaatgctccaagtacaatatgaatatcgagagcagtaggtattattaaaagcataggagattaggaggtgcatccggacatctctactaggttgacaccccagcaccctcttcgtatccatatatgcaatcctttataagcatttttcatgctcatacctatcttataatggtagtaagattctatatattctatatattcctaacttcatgctgtgtagccattttgtaggatgataagaacgtctctaaattcattcatcaatgaatttttaagctccatcataaaaaaatgcataaatttttttcttgaaggtttattttttttttttttttgtttggttggcctgctcatttctgaaggatactgatttttacttttctaaatacaaatgatgaaatataacttctgttgagggtaatgaaggataagaaaggcaggacaacgagatagcagccttatcctgagtgaaggagcgatcaagatcggctcacttcctaggaagttcctaa

SEQ ID NO: 7553 - DNA, 5189 bp, Cucumis sativus; identical to SEQ ID NO: 7435
  Intron number 1 from transcript Cucsa.237090.2 (locus Cucs a.237090) derived from phytozome v7.0 (chr-ID scaffold0202 3; pos 124634 to 129822 reverse strand)

SEQ ID NO: 7554 - DNA, 4809 bp, Cucumis sativus
  Intron number 1 from transcript Cucsa.087920.1 (locus Cucs a.087920) derived from phytozome v7.0 (chr-ID scaffold0088 8; pos 399580 to 404388)
gatctcctacgagtgtttgtctgctctcaaatacggtatttcttccatctatgcttttttcgctttttatttcttacatgtgttcaatcatgattgtactgtttgaattgcattctattagggtttactttttacgatttgatctttcggagtttttccttccataattgactgtgatttttaaatgcatggttgtaaaagttcaactgatgatagatagttttgttgatggttatgcggttggggaacttacgaagaagttcgttgtagggagagcgccttcatatcgaggacctattggtttttgccttcgattttgcgtaactgaatataagatttcagtattgcttcatggcctgaggcatttctgcttacagcagccgaattactcgattgaacgaagaatgttctttgattgtaaaatacagtgtaagatactaagaggtcgtatctgagttaaacagtttggggtatgaaattatacctttggtctttagatcagtaatgaattgtatttatacctttcagttttttctttccacttattctctatgattttctaagatgtttaggatgttatgtttttgttacatcttcatgggcgctctagattttgttttcttttttaacagaaacaactttaattaagaaaaaaaatgaaagaatacaagggcataacaaacccaacaagaaacctcccactaaaggaaggggatacaagtaaaagatatatttcccagtggatagttatagaaaagcttcgaaaatgaagcccaaaggagcacatgaaatctcaccaaagaccaaacctcacaagggtccctatccttccttctaaggactctatcatttctctcccccaaatatcccaaatgaaaataaggttcaaagttgttctgtattttctatattaaaatggagagaccttaggtcaatttatatacaggaaccgtaatttagggcaagtaaaaataagaaaaaaatagaaaacaacatggcacaacacaatattacacgagaacaaactttcaaccaaataatgcttttggaataattgagctggaatatcttctgctaagttgattgtattgaatgacatacttggactgagctcgcctgggtgtggagttttcctctagctgactcacttccttaactgtacaccccccaacaagccacaaaaacagcctttcactttgaaaggcgtatggagacagaactcctcgattattgctcgaacatctctgaccaacaatgctaacattgaacttctacaagaacaaactccacatcgtcctcacatactggccgccccaaaagagatgatttaggtcttctctgccttctgacaaagaatgcagcaaaaaggccccacaagcgaagtttttcttctaacaagcctatcacaagtgtttacacgaccaagcaagacttgctagataaaaaacctgattttcttaggaatcttaatccttcaaatggtatcaaacatggtcttcccggtgggagaggggtctaataacaatttgaagaaggatttacaagaaaatccctccctaggagtcggactccaaatacgaacatccctcctcccctccctaaaagtgcacgcctccaataaagaaagcaaagaggcaaccttcgcctttttcgtattggacaaattgtgacggaacctaaaggaaaaagacacagttctcaaaccaaatcaagaagttagagaatagatgatttttaggggaagaaaggtgataaatataaggaaggacagaacaaagagcgctccagactatatcattctaccgggttgtggctagtgagaggggggatgtaatatgtctagaactggatctgtggtttcggcaaaatggctagttaactcagttgacattcgttttgtctttgacttttaggtgagtattttatagtcatcttggtccaagttttacctgtgagattgcaaatttttctgcatgctttctgaatatgagcctgggatacatatggaaatgtatgaccttgttcttgatgttgtattacatattattcattgtgccaaatgattgtcatatcaagattcttaatgttttcctgctgtatttattattactccatctaggtaagtaatcgatgttgttggccctatatgtgttgatggatattatactgctagttttcaatttattgaatctgtagcgggctcatggatgtgaacagaatatttatcttagtttgtttatgtatctttgtcagctgagattactctataagcgtattgagcaaagatttttgacatttacagattatgattaattttttgtgatgatgacaacattaaataggctgtagtggcttaattagggtatcaagttaaaagtttattctgatagaggtttatgacgaatttttaaacgttgttggatgacatggttttgaacttttgatgtttgttattgaaagggcaccattgtagttcttcaacattttactttgtgtccaactttagaatttctcagaagagactatgttctttctttagtccatactcctgcggaaggtctatattttattacgctgtttgaggtatttatgttggtatatgtgtaaaggacatacttatgtagtttagtacttaggtggtatatgtaaataggaaggcagggaacagaatctgaattactctgtctgatttatggattaggctttaggtcattgaatcattccctttttttatttggaccaacggatactctgtttataaaaggcttcaatgaatgatgtcttgaagatgttcttacagaaattcagctttttttttaataaaaaaaaaatcatttattttttaggaacctgttagaaacacaagttgtatgttacatgaaaggagtgcatttaggcaaagccaactagtatatttaggccatatcatcttagaacagtgggtccagactgaccaaaagaatgtccagtcaatgtcggattgataaacacccaacgtcttctttaatcgaggagcataaagttctccttgatcttctcatgggttactccagtaaaacttgtggctaggtattgttctttagcacgcccatttgaacagtaactagagatgcagtgccgtatttgctttcaattagctcaagttggccatcatagaagtacccacgtcagttttctgtatttcttaaagcagtttgtatttgaatgaatgcgtctagctatggtttgatcgctgtgtcgtatagttttggttttgttatttccaaagcagccaaggaggagctcttcaagcattgtccactaaattctagtttatctttaaaatacccttcagataggaattctgaagcattttcttccaccctttttggtagtaccctgtggtaaaattgcactgccaaaaaaaaagattatgaaattcatctctatgtctgcaaatttaagaaattggaagacgggggttacttgatggaactatgcctcaagtgtttaagatgtgtgcagggttctagataaagaatttggttctttttggaccttggtgtccttgcctcttctaaactaggttacagttacccagatttaagacactagagctgaattcagaactctgttagctgaaaataaccctaaatgtccaggaaattccaatgtatgctatcactggcttggtttgatctggcctcttgtaccaaaaaagtaagccttattgcccattcttctctctatctctgcgaccttatctcagcaggctgctgtgtggattagctcttggtggaataaaatgcagttttggattgttagaattgaattggctaagaggcagagcacaaatgatacagttcactaatttccctcttaaagacgtggaatttgctatgggtgtcttggttcattgaaacttcagccattcattctacagtttgtattagggtgcagcgtgcagatatgaaaaatttacttcttgctgttgtggtccacttcgcatcatccgaagaagtgggtacaattgctacagattggagttgggacacaacggaagcctttggatagggacaaataaagctcttattgatattcttgctgtgtatagtgttggtagtgtatggatctggtgcactttccaagagacttcgcctccttaatgaggcacatgccttggccttttttatttttcccttgatagggggtaaataaggctcttcttcatattttgccctatgattttggtaatgtatggatctggtgcagtttccaagaagcaagggttcattactcacttgtgtacctcagccttttttctttgttcgttttttatgataaatattcgcaaagtcaattgttcttgtaaacaactcttacaatagctctaatttcctcattttattattcatgttactatatcgttttcgattgtattgtcccgaagaacatagattatattgtatcgtgcatatttcttgtagaagcatcaagttttttctatcgcaccaccgagaagcatgcgtatatctaattgataattcgaaaggttgtttaactttgttatttagaaggaaatttgagggaaagtagggagtatttttaaagatgatgagcacttggcagttagttcataaagaatgtttttcttattggaacttctattttattagattaaaaatatatcctacacagtggaagaaactctacctgtttttactttcttagatgtctagcgctcaattgcattgatctaccattgcacctatattagtaccttgttgactgaacgtttctactgttttctcatcctgtttcagatttgga

SEQ ID NO: 7555 - DNA, 5217 bp, Cucumis sativus
  Intron number 3 from transcript Cucsa.177150.1 (locus Cucs a.177150) derived from phytozome v7.0 (chr-ID scaffold0122 5; pos 1113814 to 1119030)
ggaaggtgtgtacttctcttcgatgctagttgtttcaatcagtatgctctctggaatttcattatatttcaagttcttactagtatgtttgtggtgccaagaaggatgaaaacaatgtattacagtacttaaaatgatggccttcaaccagctttaaatacctgaccgagaagaccaaaaataacattagactaaaacaataaaagggttaagaaattcttaataacgtctaagcaaaaaccattcaggaacggggccgaaaggtaagttctctccattctctttcctctctccttcctttgtttccttcctcttcggcagccatagaatcatgacgagtgtctccccggtcaccaccttcagttctccaacaatacctgcttcaggttaccctcccaagacctttggtgagcacatctacttaccagggatcaaaagggaagtgcaaaactgcaaggtagttgagtcatactattgcatttggtttgaaaaaggttttttgaaggttgaaaatgttggtttcaacagaatcatgcaagcttcaaaatcacagctgtgtcagtttattaatgcgattttggagctaattcagagaccagaaagaagtttcttctgcaaacacgaccaatttgaaaatggaactacaaaactatcaaagttcaaggctacagagaaagacaactgatttggcccgaattgtctttggaacaaggttacaccctcacaggcgaacgaggggcttggtttaggtggcatgaaagtacaaaacacagctcttcttgataaatgaggctggagattcttgaaggaagatatttttttatggaagcaagtagtaagaagcattcatggcaaagaggtctttgattggtattcgatgggcaagtccaagaatagtctaaggagcccttgggtaagcatctcaagagtgtggaggtcgatggaatcattggctttatttaagcttggcaatggtagcagaattggtttttggacagattcttggattggtgacatccccttcaatattcaattgcctaagttgtatagaatagttttttgctgctcagcggctctgcacattgagacaacagtactttgtcatggtcgttattgtttagaagattgctaaaagaagaagaaattccagactttcaatccctactattaccttctttcataaaaaagggtgaaagagtcggatgattgtaaattttggtcaatggacctctcaggtagatattcagttaagtccctttcggtccatctctcttcatcatctccgttggataaaggcatctttaaagccctctagcagtcctcggagaattaacattctgatctggaaaatggcttttggtcttctcacttgttctgaaatctttcaaagaaagaccaccaataagggccttttttccttggttttccctctctgtatgaaggccagtgaggaactgctttatctctttattacatgcccattttcacccatttctggggaagtatactctccctttttaagattgcttgggttttttgatggattgtcgtgctcaaatgtgtttcaactattgaagggcccgtttttggcaaaatccgcacctaatatgggaaaacatgtctagatctcttattgtagaaatttggtatgagcgtaatcaacgaatctttcatgacaacaaaaggatttggtcagatatttttaacactgcaaaatgcaatgccacagcctggtgctctctaaataaggattttaagtaccattccatccaagatctatgtctaaattgggctgtcttcatttcccaaccagccttaaagttgcagcttcctctgcaagcttataaatgcaagatctaccagttggctgctttcttcgttagaagacttcaaatgtttttgtttagtaatagggtttatgattttgtcttagcttttgtaatgattcctatctgcaagaacttgtttgtcttggctgttactctactgtcttttttgtctttctcagaatttttattacttatggatgcttctatgggatatgatgatggcgctaagtgggtgtcaatgtagttgagatgtccgggtgcgcctcctgatccttagtctcttttcttttggatgctctttgtataatattttgaggctagtctccttttaaataaaaataaaaataaatgaataaggtctatggaaatcagctttatgctcataagaagaaattgtcttttccaatttggcagcagcatctttgtgtaaatcttagttgggaaccccttttgtagagaggttgcttttgtaggcttgtttgttttgttggccatagtattctttcattttttctcattgaaaattgtttctataagaaaactatgtaaatccaaaattcattcaaccactaaatatgcttttggactgtatggtttctcatcagattgtatgcaaattcagctgagataaaacaagacggggccttggtttaaggggcttaaaggcaaagaatatggaagtcttagctaaataggattaataggctctctctttgtatttctttacttcttctcggttgtagttttgatatatcattgttccctttgggttttggacgggcgtggagttggactctttcgatgattgatcttttcacgctagtttcttttttgtggatatcataaggacgttgtgggggtgtcaacctagttgagatgtctgagtgtgcttgttaattctcagtctcctcgttcgagtggtctttgtatctctcatgtactttgagcattagtctcgttttattaataaaattcgagaaataaaattcgagactagtctccttttcaaaaaaaataaaaataaaattgacattactgtttgtgatagataattaaatttgctttcaaccacgagcttaagcttttgggtgaattggtgatttaacatggtttcagagcccagtaaacccaaacgggtattcgatccaagataggtgaacccaaagagacaccatcttgagggggtttattggagatgttaagagtcccacatcggaaaaactaaggagactcacactccatataatatagatgagctactcctcacattgcaaattggttttgagatgaaaccctgtaatatcaaatttaacatggtattagagtaggtggtccagggaggtcctgtgttcaagcccctgctttgtcgtttcctccccaattaaaatcaatttccacttgttggacctttcaaatatttcaagcccacaagtgggggagtgttggtgatatataattaaatttgccttcaaccacaagcttaaacaaaggttgaaagtttggagaagctgaacaagcacttgttggcatatccacagtcgaacaattagtactgaagatcttgattctgtaaacaaagtgggctgatgtgaggtgaaaggagtgattaggcatttttctttggatgattgatacacaatttaaacctccaaacagcataatccatacagttatattcactctacgcaggcttttggatttcttaaggctcttctccaatgaaattttaataggtgaagtcgaggaaagatgattaactaaagatttaactgaaaaagcactgctcgcttccaaagaccatgatcctttatctggagacttagagatctacccccaccaacaagcacaataaaaattgaaagtctattgcttcttcctccttcagcaactttctaaaatagattgactatgagcaagtggaagagtcccaatgattggatatgaagcctttcggttaagtgcaattctaaacagacgctggaatttgcttttcaatggagttctgtccagccaaaggttcaaccaaatagaattctacacccgctgccaacttggaacactgctagagcttctaccttgcgccactgtctagaaatagtaatccagtaacttctaaaatttgatttttctttgccacttgtgtgccaatggaagggacagctcccaagtactacaaacaacttggcaccataaggaatccagctcaaacatgaaacactatccgcatttggaaagaagagtcaagtttgtgaattttgaactacccaaaccgaggcctcccatctttttgggatttatcccatttcaccaagcgattcattttacctcctttgtttccttccaaaagaattttttcatgactctttctaaggttctagatattttcttctggcatttggaaggtagacatgtaataagtggtaagattggacaactgatttgcaaaggacattcttcctcctctagagagattgtatatattccacttatctaatttaccttggactttctcaatgatcgactgcaaaatataggatctctttgggtaacctcccaaaggaagtccaaggtacattatagggagattttcaaccttgcaattcagcattgaggcaactgaggagacctttctagtttcttcaatattgattcttgagattgaaagtatcttttttgttttctatgaatgggccccttttgatattttattcaatcaatgaagtttttttttcaaaaaaaattataaatagggaggcccctcccatgtattcgacgcattttctctcgtgtatttgacacagttttggttgataataaagttgttatgtttgattcttgaacactctttaatcattcttaggctacatcagggtgccacaaacgagaaacaattaaacaaactttaaaaaccctgttgtgtgaagtgcactggagtgagataacaaggaattaaaactcgataaccctaggaaacaccctgaaatataagaacaggagtgaaacgaagagaaaatgaggtcttgagtaagtaaacagcaagtaacatccattcaatggctcaaaattaaatgattatgtgctatagatgtaattaaatggggcacatatgtatgcatattttgtgcattgttttattatgatttgatttttgttaaaatcaatgatgtctgaaagattttccttcatattaatgtggtttcagttttttagctctcagctccttggatgtaatttgtacttgcactgaattttaaaacctctcatcaaaaggataagataaatattattgtggactgaatttgcactgaattattcatggagataattcttctgatttgtttgcactgatttgtttgcccttgctcgtggctgcagggtccagggccag

SEQ ID NO: 7556 - DNA, 1219 bp, Cucumis sativus
  Intron number 2 from transcript Cucsa.170750.1 (locus Cucs a.170750) derived from phytozome v7.0 (chr-ID scaffold0117 9; pos 81946 to 83164 reverse strand)
aaaacgcaaagaggagattacggctttccaaagtatgtcttctttatttattttaatgttcatgattctttatttgttatgctgcatttctaaacttaggtccttgagtttttctgggaaaagatttatataaatggtcataacttagccaatgtagccactactttcaatccctatgattcttctctaagttatctaccaatttccctctcttaaatgcaagttatcaaagtagttatgtgaagaatcttaccgaagttggaatgtacttcctcatttgattcaatcccgatcatattgtcagctaataacgtgcattccaactcaattaactttgtattggaagtatgatctaatttgaagttattcatcggttgtcatggtctgttcagacaataatccccagagctatcattgatggtgatcttgaagatttcacaaagatcatttaggaaacaagttttgtttcgttttgtgcccaagaccttgtccaggaaccccaagcacaagaaaatatagcttcgagcatacctttagttttggatcttcaaaattttttacactagctatagtgttgattggttttttattggttgcttccgactccgaaatggataaccaattgagggggggatataaagggtacaatcttcttccaaccttgaacattttgaagggagaggttcaagagacaagatgactttttgcctatcactttctcagttgatttcttgtagttggagtaatggcttactctgtagatgcttatgagagcattaaaagcagttccttatggccttttgttcaaatctgattccatcttgattgtttctgtctggtttagtctgctgattttccctgagcatatagacgttttgcgtttttatcatgtagcatatggttagtgaactcttagatcaacaaaatacttcacctaggaattccttttatcaacaatattcacacataagattctgatacaaacacaaacttccttgatacacaatgaactgaccgtcctattcagcctcatcaattgccgaaacaaaatgaaggtaagaaggtaagaaatccaacaaggaaaatgattttggtcacttgttttgttgaatgatgacccctggaaaattctcatgcagttgttctatgtctagttatgttactcagtgttttcttgattggtttgtcttaacacagcacccagtgagccggagtgact

SEQ ID NO: 7557 - DNA, 1684 bp, Cucumis sativus
  Intron number 7 from transcript Cucsa.286130.1 (locus Cucs a.286130) derived from phytozome v7.0 (chr-ID scaffold0265 3; pos 2281110 to 2282793 reverse strand)
ggtctcgtcaacactgtagtacctgtaagttcatgagattaattatattacaatggttaaaataacttttattatttttaaaagggtcattttttaaaatagcaagatattgaaactatttaccaaatatatcaatttttttttctatccacaacaatttttttttaaaaaaatactttaaaatatatttttattcattataaaataatttattattaaattttacactcttaaatataagttttatactgatccatcttattgaaatcgacaccaagtaattttaacattttacaattatcaaacatatccttcctctcatggccacccaaccttttcatccattttgtaattttttttctacagtttgtttcatttttaatttttaaaaattagttttcatcttagtctaatttgatatttataataatctgcaaacatttgttttattatttcaacgtaagattaaaaaagagtaatacctatatgcattcattttatttttatcgcttatatgaacacatataactaaaatatttcgtaaagaaaataaaatgaatttgtcacctaacaatatttgatcgaacaatttagtaggatgcacgagaatagatactataggtagagcacctaaatattatcttatattaaatagcagtcttaagaaattttttattcttttttggtaccactagctcttcaaccttgctatggtcaatttattttaaataattaaatagtcaaattaacttaatgataaaggattcttctaaaatgaaacttaatgataaaggaaaaaagataaattgtgttaataagcttttgttttctcaatctctttctctttaataatagatattagtatattggaaatttccgaaaatttaaaaaatccactcttacattggaaaataaactacaattttatttataaaagaaccctagacttcaaatcaggtccaataaatccatgaattcttgaaaacatccaatacacgttagaatgttaattaaaaactaaaaactattaaacacaaaaataaaataataagaatctactaatcctacggttagagatttcatccttggaaaataaatataagtaaaccaattaaaatttatttggtacttatttttaaaatccaagtttttttttaaataactaatttttaaaaaataataaattatggtttcatttggtttaaaaaactaataacgagaaacaaattttaaattggaatcaaaatatggtaaaaaataaaccatcgtttttgttttctactatatttttcattcttttaatcaaacgaactaaacatgactttagatcttttatatttttaaataagatggacacacgttattttagtacaactgaagtaagaaactctaaaatatagattttgaagttactcttcgttaaactatgtttaatttgacacaattttaatagttatagttaaaattgtcggtttgaccttttgtaaaggtattcacggattaaatacaaactaaatggtaagttaatttgtttagttacaattgtaaaattataattaaccactaaacatcgaattgaaacaactatacgaacaaaaatccaaattaataaattgaattcatgaactccaaaatctgtatttttgcttcttcagctggatcagttggagcaagaaacaatcaa

SEQ ID NO: 7558 - DNA, 2315 bp, Cucumis sativus
  Intron number 2 from transcript Cucsa.289060.1 (locus Cucs a.289060) derived from phytozome v7.0 (chr-ID scaffold0269 8; pos 562624 to 564938 reverse strand)
ttcgctatttgggaggttttgattccactggagaggttggtttatttttcttcaccttgttcgagtttttgtggggaagtcattctgtctgatcgtaacgtaatcggacagtccatgtttggagtattttctttaatttaggaaaaaaattggattgcttatcaatttcacctgcctctttttttcattctgcggattaaaaacatctgaatggaggtctctcttttttaattttctgcatactgtttttcttttctcaagctcccgatacctccaaaaaaaaagttactgactttctgtattttctttttggatgaaacccaatttcattaattcaatggaacataggaatggggaatgaaagctttccctcagcctaatgcggtttactaaaaagtcctccgtcttgcaacaagtatctgttaaaggataaattgcatagcatattgttaaacagaccaagaagccactggaaaaaaagatatgattgataattaggtaaatatagtttctttccagtccaaaactttgatggtttctcaccatccaagtgttccataagaagcttctgatgatgttgaaaaggacctgaataatctctggtctatggtgaagtttcatgtttctatatataagaaagttgatgtgtaacttgtcttcctataaaaatctttaggtgtccaattttttagtttggttgaggagctcactgtcctttttgtttggcttttattgcctttgtttgataggaaagcaagggatgtgaccttgcttgaagacgttgtctatctttagataagggagaaaggatggtaggctgtggagtctcaatccttcaaagggattctcgtgtaactctttctttcatagccttcttgattcgtctccctcaggcgagtcagttttaaaggtctataaaggattaagattcctacgaaggttaagttctttatattgcgagttttacatggaagagttaacacctagaattggcttgtgaggaagatttcatcttttgttgatcctttttgcaatatttttgttggaaggcggatgatgacttggatcggatcctttcgagttgcgagttcacaaaagcatttgtagtgactttattcagccgtttggtttcttgctagcttgttattaaatgatctaggagttcctcctccatttgcccttatgagagaataattgttttctttggcttgttgggtgtgtgcgtgctattttgtgggatctttgagagagagaaatgataagagtatttatagggttggaaagggacccgagtgctgtttggtcccttgttagatttcatgtttcctttcaagttttgattttcgaggaccttgtgaattattctatatgttctttttttgcatagtgggccctctctttcaataggattcaagtttttatttggatcattttaaaaatagcaaaataaattaaaatatttacaagctatagcaaaattttggattttatcacggatagttttctatcactataacatatcaatgactatcagtgatagaatttgctatagattgtaaatattttgtaaaatttgctatttttgaaaattctgatttttattttatatataaaaaaaagaaaatcataaagaggttcattaggagtctaagggtctatatgatgctaattttgtaaaacgtttttttttctctttggtagttttcttttgtttgagatgattagggttacattcctttgaggaaaaatgtgtttttctctttgcctgggtctatctctccttttagaatttgtattctttgagaaaaatgtatcttccttcccacatttcttttgtaattagttggctaaaaatgtattttcctttcaacacttcttttgaaaatacttggctaaaattcttggtacttagaccctccccttttgagatctatctcaagccctgttacactcaccaaaatatcgcatccctcctttttgattcaccttaactaattactaaaatacactgaatgtaatacctactaacatctcaaattctatcctacattcctactagcattcctatttgagtttaagtaaaaactagctaggttccttttagtgttctttcatcttcgaaaaataacgaaattgaaagaaggagaaaaaaaagaaagaaatgtgttctgcattttgcactctctaaccgttgtttatttccaacagttcccatattaatattaatttatatttctggataagttctctgattgtgatcttaggcttcctgatctttagaacatccaaaccagccaaaaacaagaagcagcaaa

SEQ ID NO: 7559 - DNA, 4388 bp, Cucumis sativus
  Intron number 7 from transcript Cucsa.051380.2 (locus Cucs a.051380) derived from phytozome v7.0 (chr-ID scaffold0055 7; pos 537210 to 541597 reverse strand)
tgacgttactgaagaattttttctccctgttcaaggtatttccattgattgctctctttttcttcttctttaaaagaaatgaacgcaaagaaatcacttttgatctttgaggattgacttatttgggagtgattttaaaatggttagaatcacttttctcattttaaaaattattatggaacatgtttttaaaattatactttaagtccaaataacttctcctatttgccatcacgagagcttctctaagccttttttttctcttccctttcttgtttgataagagtatgggggttgttgcacttttgcatgttagttagaggttagagcctttcgaaatgtgtcaaagtaaggtgtctaaactagagtattatttaacgcgtctaaaatcaaacaaaaagtgattttaaattaaaattaacataagtgatattgacaattttaaagtcactcctaaacatgtactttggcgcactttggttcttgatttaacaaactccacatgttagtcattaaattttagtgaagatatacttattaggtgtcacaccctgtactaagttaccctaccaaatctaggaaatgacatgatgactagtattcaattaaattatgaaatttatgttgggtaccaaatgtcaattgttgtttcgtggaagatcccactaccttgaaagcaaaattcgacgcaacctaggtgtaaattaggttgaaaacctaattttcatacgcctaattagacattcatcaagttcaatcctagtttgattagaacaatacaagatctaactgtttttttgcaagctaacttaacttattacttctaattgaattgcatataatttactaagagaattgtacataatcaaaataatcaaatgcatgaattaaagagagattgacacatacccaagttaagaaagtgtaccttagcctcccatccacatgtcgggtgataaggagatgttcgagtgcataaaactacactgaaaatttaagaaaatagaaaaaaggtttattagaatggctgaaatttgagatgtcacaacctaggcggcaaagacttcttttataaaaatgaagcggtgcagccaccctagagacaacaccacgacgttgatgaaactcaacgcgcacgtcagtggtcttcttcctcctcttccaaatctactaaaaagatgaaagcctatctttttccttttttttcttctgaatttaatccttttttcccctttctatatccccttgttcctttaatctttttattccgtttgatccgaaggagtagttttcttcttttaggtgctttccctttgaaatatccttttattcctttatttcgaatccttaagtttctcttgctgactttatcttaaacttccttaagtttctcttctttcccttaaaaccgctctgtggttccctcttgttgcaaagcccaattattatatttcataggatgaacgagtataaataatggaagggataaactctactatagttgaatcctccccacaccgtggtagaaagaaagaggtagagtgaagggacaaactaaagattcccaagaacaggcacattggatgacagggaatgaaggccaaggtaggtccaagagtaattctatcaaagaaaaggctataataggctagtatttgtaagacctatgaaccatggggcatatgcataccaatctggagcacctaactaagtatgcacggaggaactttatcggcctcaactgaataaccgctacatgggtctcgtcgctttgctcctctctagtctcattcaagggtccttagctctcgtattgtgagttttccactttgttcagttacgtgagtaagctcatctggccgtgtgtcatgaatctgattgagtcttatctcttgaaaaaagtagtagttgtgcagaagttgcctcatcttctataggttagggagctctctctctttagtaaggcaggtatatttcttaattaataacatatcttgtcccctcactcttcaagatgagaaaaggttccaacttgttgccaccgcattcacaagaaaataaggaaaactgcaggtcaaagcaaaggctacgtacactgtcgccgcctcctgctatctctcataggtaggttaggaagaagaaagcctatcctacaagaggaagaaaaagattaaagcaataagaggatataggaagataggctttcgtgcaaatagtaggttttagaagaggaaagcctatccatcaagagaaagcttagagaaggaacataaggaaggttttatatgagaggaagaaaaagaggacaaaagaactcctacgaagcggagagggatcagattctcaatattgtatacaaactcatattcccaattagagaatgatttgagtgccgtggcgctttgtagggtgccgctatgttgtaaggcaaaggatcaaatagccctttttcttcactcttttgtctcggttgatgcctctcgacttcaatttgacccaattaagtttcaaaatgacatcaacactgaattctaccttcaaattgcttaaaacctataaaatatccattaagatatccaaataagaacgaacgtaaaatcatggaatgatctcaaattaggctgagctagataacacatttttagtgctatcaatagacttataccttgttgatgttagaataattactttaaatctatattgaattgattaatcccatgatcattcataccaaattgttaagagtaacttactggattccgttgaaaggttaatgatgagtatactattgtcttcaaccaaaactccaaattcgaacgctcttggtgggatctctctagatgggataaagaaacattgctgcttatttttctggtatattggagaccatcgtccttagctctctttatgtactagttcaattatggttcccattaaatcttaatcaatctagaagtgagtttctacccatttggttcatattcaattatgaatctattctacccatttggttcatattcaattatgaatctagggccttgattaaatatatcacataatagggttcaatctaatgaattaacttaatgtggtaaattatttatccacatacatagtccccactttaattatatgtattattattatttaaatacgtctaatagttgaataataccatttttataatttctcaaacgtcctaagacccgtgatgataaaacatttcaccttttattcttctcacacacttctcttgatctggtgactgctctgaggtgccttcatttccttgtgcaacaggggttcttcatagtcttcttcaatgatctcccaaagatcttgagaaattataaaaatggttcatttgagaaatggcactgcaatactgaattttttaaaggtaattgaaaatgatggagaattgagctagagtttagaagggagagagaattatggagaaacttctccgagggttttgacactcacacttggagagcttttttagtttcttgctaacaggggtagataataccactacccctatatgtatacatttttttttcacattagtagggaaattgagagcttgatgaaatataagcgaagatcattttcatcattggtagaaggcttttttttttgggcgaatcgaaaagcaaatctatgaaaattttgttccaaataataaatatcatatcgtcgagataatagaatgagtttgtgtagttcttttacatcttcttctacctctccatgcactctctcctttccttctattctatgcataatggattaagatgactgcatagaaactttgagagcaccttttatcttccaacactttttaggttgagattaagaactttctgggaggtgtggagaaaaggagagagatatatagttttgttcttgtcatatcgaaaataccaagaagtgttgtgtatttttctagtcacttgcatatagctaaccaattaaaagtttgtcaaaagtgattatttttagcctaacagtaatattggcacttcgaggtcagaggtttgatcactttcattgtcagaggtttgatcactttcattcccaccgtctaacataagattgatttttaaaaaaatataaaataattagagctttgaaagttgaaagtatgaaatataaaataattagagctttgaaagttgaaagtatgaaataacaaagtgtatttccaaaatctcaggactacaatgttgagtttgaaaagtcaagaaccgatatgagttgaaaagccaaaactcaaggagttatatagcttaagctcaaatgttgcccaagaagtacgcttttttttttatatatatattttatcttttaatatgtagctgaagcttcaaacatttgtgaagtgg

SEQ ID NO: 7560 - DNA, 3800 bp, Cucumis sativus
  Intron number 1 from transcript Cucsa.356010.1 (locus Cucs a.356010) derived from phytozome v7.0 (chr-ID scaffold0357 7; pos 717167 to 720966)
gttagcgaagttgaaagagataacgaagttatcaggtgtctctctctctctttctcttaattggttattcccaagcatcgttttcctttcatcttttggtggtttatgccattaattctagtcaaaagaggcattagggtttgttgggggctttcatgtgttcgatcatctatatgctcgtgtttttagttctttacatagaggagtacgaatttgttgtgtaatttttctgttatagtttcttgatcgtatttgcctcctgggaaatgagaatttgtgttggtatgcctgtgggacgctttgtaaacacttagatagattagactggaactttttttccctggacagtctgcgccccttgcccaaggcccaagactttggagacgtcaagaaacttcgggccttagccaacgggactgcccgtttagggcatctttcactaatagattttgattgcatggaatccttttggagacagaaatgccaattaagaatttagaatttagaatttagatagttaatagggtgataagaactcaactctgtttcatagagtagtaccatgtagaagaagaaactctattgcaaaagtttcgttagtaggtggaatgtgctttttaatttactgatgatgaagttgaagttaatagaagaaatttgttgatttcttttgaagctatggggccattcctaggatccaatctcatatagtcagaagaagaaaaaaagcaaaaaaaagaaagaataagaagaaacctggcatagctcttcactgaagagagagtttgaaaagcaactgaagatataggatcgtacaaagcactttgcctagatggatatatgatggaaatagtaaaaaagggcagaacctttgcaagattatattatcaaatatgaatagagattccatttgtgaaaaatggttgtggagattgagaagagacactttgtgggacaaatttggtgtcatttgtaagctataaagcacagccactttagtttagctagcgtgtccaacatattacaattggtgcaatagatgtaattagccactacctatacatagtaggcccaacatttgctagacatacatggaaccagaacacttgtttaactttgaaagaaaaattcatcgaactaatttttaagcacataaatgtacaaacttgtgaacttcgaataaatttggattctatcatatagaatatagattaacattccttattgaatctgagaataataatctatgatgttaacaagcatagttgtcagctcctatacaaagcagacggtatttatgagtggcatatagattttcattttcctatcgagatccttggaactttatatcaaaatgtttttcattttctgcttgaaatacctcctgttggttactctttagtttagtttagaggatatttagtgtgggaacttctcctataagtatattgcagtttctattaagttataggttttcttttcatcatgattcatctgttgctgcaattgctttaaccacacagctatgctatttgaaattttttctagaagaatgtcaacaactttgagtttgagattatatagtttttgttttggttgtcttctggagaatgtaattttgttgtgacatctgtaatgtgtataaatgtatttggattcagatccatttgttgtaattttttcccttttttggagatgggcaaatagaatatcataatcagtcatcattaggaactgctgtcatcaccaatcaagaatggagatttggggactgggaatatgagaaaaaggaattctatcaaagcagacaaaccaaacaaacaaatgaggattctggatttgattcttttttctgttcttgacttctcacactgaaacattactgaagtataaattcatctcatgactttttcaaatcttccaactggaagtattttttcggctctttagctgtttttcttgaagttttgaacaaaagagaggtggtaagtaagaatgtaactaggaacaacgaaatgaagttgatttttttcccttagatgaaggtgtttgcttatatttttgcaagtatggagttcaactacaataattttatgctaggttgagtttttggccatttttatatggtaatactagaaagattacttttcttcaacgtcattgtcaacatctcaatctactcaaaagaagaacatgacatgccatcagcctaaaataccaaatatgaaggccttattctctttctgaaggctggtttctggtttctcattgaggaaaaaaaaatcatttgggcaatgatttgcttatttgtgaatatccacttggtttcatgataccgaagatatgatttatgtgaaacatgcctccttaacatctcgtcaccgctttttaagagtgggacaatgaaacatggagaatgagattgaatttaaacttttgagattggttggcaaagcaagttaggttacaggtaattggcatgtactcgagtatgaagcttcaaatcaccatcccccacttgtactgggaaaatttgagatcaatttataacttttgcaattaccatttagattttattcttttagattcgagtatctttttgaagttttccttttgttgggttggtttgttatgctctttattttctttcattttccttaatgtatgcttggtcgaaaagaaaattaaaaagaataaaatgttgtcatgtattggacccggataagtgagtatagaaatcaatgagtatccaacagtcgacatgtaaatgggaggggagaatgggacccatgatcataccaattatttatgaaaagcatgtaggttgagagaagaggaggaaaatatatatgtgaaggtaggagtatgtaagttagggatattagtatgtattagtaaggggcataagggtaattagatagggactcatgtatctggttataaataagagggtgagtaaggaaaggttggcaattgttgagtgatctagggttagcattctctggggagattccaagtgcctttatacttggtttatcttgtagttattcctttatatttcaatatattccagatcttaattctagttagtaggtatcctaacagagtatgtattgttgggattttaggtcatttttttaaattgcaactttcattgagaaaaaatatatatatatataaggacaaataaaaaaaatctaagcccacaaaaaggagccctactagagaaaggggctctgattatgcaaaatagtatctatagaataattacatgattgaggcctaaatgaaagttggaccaccttattttggtaggggtcttttggtgggctggttttttttgtatgtctttgtactcttttgttttttcttaatgaaagttgttgctcctatccagaaaaataaaaaataataaatgatgaggcctgaagggaaatatatataaccatctttgttaatttaatttatgttcttttaaaatcaaattcaattgattttcttttttctggtaatcttcttctgcccctatacaacaagggtacctcgttccttcatttgtacttaattttgtttcacattactatgttgaactttgatagtctgaattagaatctcctgtttgtttgtccttatattctttcattggttctcaatgaaaatagttgtttctttaataatattaataattgatcttatttcatgtaccgtccacaattatggtgttggtattatatttttcatcactattgggacttatctctataggatcctgtcctgcttcaaattgaacccatttgagt

SEQ ID NO: 7561 - DNA, 8176 bp, Cucumis sativus
  Intron number 1 from transcript Cucsa.211000.1 (locus Cucs a.211000) derived from phytozome v7.0 (chr-ID scaffold0150 9; pos 22439 to 30614 reverse strand)
aaactgtttcgggaactttcagcgtgtaagtgtctcaccgatccccatatccatcttagtaaataatgtcaaattgaattttgtttatgttttctgggttatttctgatactgattgtggatcattgggttctcgagttttgagtaataatctgctgggtgcactcatccatggcgataagtgttggataaatttgctgcaatgtttctacttggttatagctgttacattttatcgtgagcataattttgctggctagctgtgggaagtgtgggaaatgttctatactcttgcagtcttgatttgtctttactttcatttgtaactattgaaaacttcatttaagaatgttggatatctagcatctgaagtttcatttgaaaattagagagttaacaagggacctagagaaacaaagaatgtcactagaggttgccaaacacagcatgaagagaaattctattgaggtcagggacaatgtaggtttaagatcttgatttcgaggtcttcaggtcctactactcttattcattcttgttatagatcctcgattttaaaggagttccatttcattgaaggtttccacaagtgaaagaacagagtatagacttattttttttagttccttttagtggaatactatgtctttgctgagtgatttgattttttttattgtttcatttgttttatataacttttttcctgattgtatccaagagtatagattcatttgcaccttcaaaatacttcatgttctaccaaagaaaccttgaagctagaaatgaattggactgaaagctcttcagaaggaaaggtagaacgatgctcaaattaatttacattagctcttcctcttcaaatattcagacccatgtttctaggaaaattgtccatccagaagagatgaaactgcacttcctggctatcctctaatgccataaaatctcttggggaaagctcttgatgtagcctaagtattctccaggaataatcctccaagaatcaagattgtgaatcttttattagaatgaacagcatgtttcatacaagaggggaagactcctatatatagagttttattacaggtggagggtaaaaagggaattaatatagaatattaactaattatccaaataaccccttccttcttacatcattctgcccctccaaaaagaaaactcgtcctcgatttttaaaaagaaaaaagttatgaagcaaataaggaatgaaacaaactgttcaatggagtatgaccaaaccaaccttctacattttgaacaaaaatattataatcaaagggaaaatttgagacaaaaaatccaatactgcctccaaaaaatgaacctctccattggccgtaaaccttaaaaggatatcttgttcaagcacattcaaaggaccaatggctaaaaaaccactttccaaagaggatccttcaagaatcacatcttctttatcgtttgcttcaagttatttggtggtttgatgatccatttcctccataatcaatgtgtcgttgttcttgttcaatttttgcttggtgttcaatacttcttttcatcttctttgttggatatttttcacttgagactatttccaaatcaacattttcgaattcttgtttttcttcaattttattttcaaaattttctatttgaaatctttcaaccatgtttcctttgttttttcttccgtatatgaaaccaaaccgttcttgagctcttgcaaatgaattgatagttgatcgatatgttaagtcattttcatcaatgaaagttgtatttcttttgtggttttccttatttcctccaatgctacggattctaagtagtcattttgttggattcttgaatatgtttcaacatcatagtgggtataagactcatccattgattctcttgagtcaacctttcttgtttgtgtttcataaccaaaagagtagttttgaatcttgaacattcttcttgggttgtaaaaattgattcttgataattttttatgattctctaattcatataactaattttacgttgattttttgaaaaatgagtttgattgtattgttgggccctttgtcgatgtttctgtctttgtattccttcccaagcttccttagaaatatcatcagagtcactagaatcactagaatcaaatttctatgtgcataatgataagttctttgagaagattgggcatgaccaaaattagaatgttgaaattcttcttccgaatcacttgaatcagaattctagcattgtttttggaagtgaaattgactttcttgcctataccaactgctggttttttttcttggtcgttatctttgatcggtagtattccaatcttgcaaaatcttcggtgtcatctttctttcttggaattttaagggtttcccttaattagatgtgtgttgtttgtcaacgatcacaacactcaaagctccctttcgtgatcagtgtcaaaacgaatttcccgatctccattgatgacagtcaatgttggccaaggcgatcgctttgataccaaattgatgtatcctaagtattctcgagtaataatcctccaagaatcaagattgtgaatattttattagaatgaataatgtgtttcatataataggggaagactcctatatatagagttttattacaagtggggtaaaaagggaattaacatagtatattaactaattacccaaattacctctattcttcttacatcaacttcataatccatatccattttgataggaaagcttcatttctactcttttgattttctgacagcccttttttctttaaaaaggaaatgggacaaatgctcaaagtaaaagagagttgtacaaagagcattaaataaaaacctatggatcagaaggtgcacccagacatctcaactaggttgacatcccccttaacactctcatcatttcttacaagcaatctctaaattgtagtaatctgaggctaatagtcaacctttacgaaggaggaatgagagtacaacaaaacactatccttacaaagaacaaaattaacaatgcaaagaaacaactatcatggattgacctagtggtagaaaaagaagactccatcccaataactaagaggtcatgggttcaattcatggtgaccacctacctaggaattagtttcctacgagttaccttgacaactaaatattgtagggtcagattagttgtccagtgggattagttgtccagtgagattagttgcggttgacaaccctccacgacctacttaggaattaattttctacgagttacattgacaaccatatattgtagggttagacgggttgtcctatgagattagtcgaggtgtgcataagcaggtctgaacactcacgaatataaaaaaaaaaaatgcaaagaaacacttgtcgagtaaagaacaattaatatgatcaatttttatttttgaagaggaaacaagtctcttttcttattaataaattcataatagagggacaaaaactcacggtacaagaggattatacaatgaatagaaagatagacggatcaacaaatgcacccagacatctcaactaggttgacacccttttagcatcctcatcatgtccaaaaaagcaaataaaagaactaaagattgtcttttttctaggctaatataagccaatatataccataagctaatacaatgaaagtcactagaaaaaacaagcaatactgaagctaaaatccaatgaataacaaaaaaaactggccatcgaacacaaagggcaaagcatcaacttggagggaaaataaaggcttgccaattcaacaaagtctcctgcaaagagtaatcctgaaaggttttggataaagagcaccacggcgttgcattcatacgagcaaactcaaagcgatccacccatcacgaggcttattgtgaaaaacccgcggatttctttcaaaccacatttcaactaacagggccttaactgcattaatccacgataaggaagctgtcttcttcttcaaggctggacgacaagtatctgaagcacgttatttttaaattttttataaaaaacccaacatagattaaagatttggaagagctgaaaccggcaattagctgcataaaaacaatcaaataagaaatgctggatatcctcctgattgttgagacaaaggtagcaaatatgtgatgaaagaacatgagtaggaagtttcctttgaaggacttttgcacagtttagattgccgaaaatcatgatctatgtgattttcactctcttcggattgtttgatttccagaggctcttttgcaaataattatctataggtgaagctacagcctatagaaaggtgattaaccatggattttatggagaacgatccatttgcctcgagagacaaagatcttctatccggggagttgatagtctttgaatcggacagtaagcctaataaggaatgaaagtctgaaatttcttcattttttagcaatcttctggaaaaaatggactatgagttggtggatgagtcccaatgttctgaaatggagccttttggtttgagcgcaactctaaacagcctggggaattctatcccgccaagggtccaactaaaagtgggttctactgccatcaccgtttgaagagtgccaatgcatctattttgcaccatagtctagaaatactgatccacgggctttagaggctgaaagtttctttgccacatatatgtcaattgaatagactacttccatggatatttttaattacttgacaccatattgaattttgttccaacataaagcaccaaccccattttgacaatggagccaagttcttgtgcttcaagttacccatcctgaggcctccatccctttgggatttaatggtaagatcccattttgccaagtggttcagctttcttcccttgtttcatttccaaaagaacttcctcacaatatgatcagttcaagatctagatttaagctggaaaaataaaagctcgccaatttaagtaaaacgcttgaatgctgtaactttcaaaatgcttagaaaggatgcaccacgatgaggcatttctggggtgaattcaaagcaatccaaccatccaagggattttatcatgaaatacccaaaaattcctttcaaaccatattttcaccaatagcgcctttacaacgtttaaccaaatcaatcgagagattttgtttaaatacgtcctaactcatagctgctgcacatttcctcgaaaatcctcactaaacacccaaaacaaattgaagattgagaactaattttcccaacaactagctgaataaaagcacaggaagaagagatgatgaggatctctatgtgctgatggtttaacggacaaatggaggggggaaggcagctagtaggcaatttatgttgcataactgatgagacatttaggtgatcaactaacatgattcatacaagactgctcacttgtcttgggcagtatgacttccatattgccttatacaacaatttgtccaggggaaagagggagataaatgagctttgggaggcttcactgaaaatgtcccattacctactaaagaccacgttcttgtatcaaagacatcaattactctccctcctgaaattttatcaagcaattcttgaaaatcaagaaactcatcttcctttagcaagcggcaaaaagtaattgaccaagaagccaaataaatatcccgatgatcaggtaccgacccttttggaagtaaagatattatgaagagtcttgggaacaaaatgttaaaagggaccacttggctaagagagccaagttttttgccttgaaaccacccagaccgaggcctccatctattagagatctattgactgttttcccattttaccaagtggttgatcttactgtcttcccaaaagaaatttcttaatattctttccaaagttgagatgacactttcgggcatgtcataaagtaagtgggaagattgaataaaactggtttgcataaggttgctcgtcctcctctagatagattaaatcttttccatttgccttgttttgcatgaattttatctatcaccggttgccaaaaggaggtttgctttgggtacccacccaacggtaaagcaaggtatgggaaggtgttcaaccttacatctcaaacttgcagcagtagacagcaattcattcttattctcatccatatttacaccacacaaagctgatttgtcctaatttgctttctgatcggaacatcattcaaacaactcaatggcctgttttagttttgccagcatattgctgtcaaacttgcaaaataatagtgtataatctgcaaactggaggatggatacatgagtccacttttcccaccacaaatccttcaaaaagtccattatgatggagcttgtccactaaagcactcaagacttcactaactaggaggaagaggaatggtgagagaggatcgccttgcctaataacccttgaggctatattctcccccatggtctaccattagtgaaaacacatagtctaggtttcctaatgcaaccccattatccaatcaatccatttttgctcaaacttcttattccgcagaattttttctaaagaaatcccaatcaacgtggttaaaagctttcttgagatctaactcgagaatccaacctttcttctttttggaaggcctttagctaacacatttgcaatttgttatgttgtcggcacattactcctgcatcgatcttttccttcaacttcaatatgttttgtcttgtcatgtaggactggattgtgggcaatagaaattgctgccttgttatcacagtaaatgcacgtggacatcatttgaatgaatctcaattcttccaacatctaggtcttttcaaatcttttttaggtagtgaaattattgtcatcaagctacctccttggcatatatctcctaatctgagatcatattaaaatacctgtaattaattgcctaaattagagtacatctgtgtcacattaggcagagttctcctctttgttggtagtctgttgggcaccttagaaactgacctgtggaaatcgtataggctagcatataaccactcggtgttactttacaaatctctataagtatgctcattccatctctttagtggagtcttcatgatctttagttactgtcttactgagtaaattggaagttgagaactggtttacgaacagtgccagaaaacaaaatgaccatggatcaattggagaagaggtattagatgtctgagaaagagacacaattgtgcatggttcaaactgtggttcgctcatgttattgaatttgtgtttgttttattttccatgatgtttctttgagaggagggaaaaatgaggcatgcaattagtttgtctgattttcgttcatcagtttaacaatgaaatgcctttgcagtttgtgtttcagaaaaaaacggaaaaagaaaaagaaaaaagttgctgagtaaattggaaacctgcatggccttccttgggcattgcagcttttctaccaaggttcaaataagaaaaggatgagaaggtgtcttaactaaaaatatcgaaagccaaaaggactcattctccaagaatttgacctggttttcaaaataaattggaaatggcacatattttccttcttagtctgggagctttagaatatgaaaaaatttccaaccaatcaagttactttaaagccgcaaaagccaaatgatcaatttcctgctactagaaatgtattctgtcatgtaagaaagtgggcaataaacacttgaatccacctttgaaaataatcagcgaggttaatttttgttagagtataacaggcttacctccaggtccttcacgctacagcctgcaaagcttccagattcacttcattccaaaggaaaataacaccagccgaagcacaaaatgattttaaggccatctgatcaatacttcttaaacttctaggaatcaccagtatttagacacattcagaactgggggtttcgtcttgaagggactacttatgaattgaaggatgttatcctttatgatgcctccttttttacccttcattgtttgtaattatttattcacatcagtcacttgtttaagatgtatgctttggccttcgtgcttgagtacagggtttctaaaggagtgagagaacttcctggaaatt

SEQ ID NO: 7562 - DNA, 7169 bp, Cucumis sativus
  Intron number 1 from transcript Cucsa.341500.1 (locus Cucs a.341500) derived from phytozome v7.0 (chr-ID scaffold0335 6; pos 3893979 to 3901147 reverse strand)
gaaaaagccagtagccgagccagcggagtctaaaggttagacacccttcgtttccccagattggttcttacataatgaatttgtttcatctctgaaaatagaatcgattttaagttggacgttgttgggttttctatctaagtaaagttgaatacacggtgtatcataagctgggtgtcctgtatacttctgagtgatctatgtttatgcaaaactctttcattgtcatatggatttactcccaatatataggaaactggatttggtgataatgaaattgggtatttgtaacttattgtttgtttaaataagtgtttgtaagtgcaaaaaaagtgtttataaaaacttagaaagttaatttcaacggtcctaactttgataataacaatttatagttcttgttttcttgaatgatctatgtttatgcaatactaaaattctttttcctgcctcattggaaacatggttgattccccaaaactacatgctgtagtttggtcttcggaagacattacttgatgtttaatattcgaatatttattaataatcattttcgaggacaatacgtttagaaaattataagtcctgcccaagtgatcctgttttatgccaaagcatctttaactcgtgatccaatctgacacttagattatgtggtttgactctgattagcaactaagattaaagatactcatacagagagtatgctttaatttattggcttaatataaatgctagatttttcagccgttccctatttcttgaagtcaaaactcatgctgataggtaatcttaagaaagccaaaactctaaggtctttatcaggcttagctgtggtgccctttatcaagcttttcctcaactattccgtcttacttgttcccctgatattaaggttgctgatgcttggatccagaactctgaggcgtgggatttgcatgctagtcagaatcttattgatttagaaaccactgagtgggctgctttgtctcatttattatcttctgtccgtcttcattacttgcttgattcttggacctggaccatcgatccttcctccacattcactgttagatctcttacggatgatttggtgggcactgttgatctcaaatcaaggatgtgtattcttctatttggaaagataattttcctaagaaaatcataattttcttatgggagctcagtcttggtgctattaacactgctgatcggcttcaacaatgtatgccctatttgtcatctctctttcatggtgccacttgtgacatagtcaaactgcaactgctgcacatttgttcattcattgcccttttgctttgcattttttggcataccatgttgcaggcttttggttggtcaactgctttttcttttatcatgctagacaacattgcttccttattggttggttatccttttcatggtactaaaaagactctgttagctattgttcctgctttcttctgaaccttgtggggcgagcacaataaacgtcttttcagggatcttccttccagttttgatttttttattgattcttctctttctactgtgttgtactagtgcaaatctaagccaccttttcttttttcgaaaaggaaacaaccctgatgatattaataaaatgagactaatgctcaaagtacaagaaaaatatacaaatagctagaatctctaagggacaaaggatccaaaatggatacacggacaaacaaaacaaggcccaagagcatacaaactccaaacaaggcagaaaaataatcaaaacagcaactgaaaaaattcaatctctttgtattacatttctttcagattatgatgcgagaaaaatttgtcttggaggaaaagttatcacttctgaatatgaagtctttaaggagattcctggtctaggccttgtcttgtcaaacattctaaacatgcctagaggaccatatttaaaatgacttgttgtagacagaatcaagtttgttgtaggccaacagaaatatcacattcttggaggatatttggattggccttggacaccgtaagagttaaaaatatcttatcagttgtgtatggaaatttaagtcatttttcggattcagccttcaaaaggaactttacgaatcatgagatggtcaaatggatatcacgtatgaacctcattacttattagttgctgcaagcctgtaacgtccttcctcatcaagatggatggttgtgggtcaaagacaagaccccgttgctgccattgttagtggtttagatattccaaatgattttggtgtcagtgatctattcctttgcaaaatggacttgaaggggtaatcatcttatgattttgcatgatgttaggctccccgtttggctaatgagtattagcctcatacttagtttgctctatccttttttttctaataaaagcaacaattttcgttgagaaaaaaatgaaagaattaagggtataaaaaaaacaagcacataaaggcacctcaacaaaaagaagggttccacctaagtaaaatatttcctagagaatagttacaaaaagcttcgcaaccgaagcccaaagagaaacatgaaatctagctaaggaccaaacatcataagggctcctatctcttcctctaaataccttatcattcctctccctcaaatattccaaatacacgctagcaagcgacaaaaaacagcctttttgaaaagcggatggaggaggaattccttgatcaacacacaaatacttctttgaccagcgaagctaacatcaaactcctacaaaaaagaactccacacagcccgcacgaacttgcaatcccaaaaaagattatacaggtcttcctccaccttccggaaagaatacagcaaaaaggcccaacaaacgaggactttttccttgcaaaaatatccatagtgttcacacaacttagcaaaacaaaccaaataaaaaacctaactttcttcaaattcttaatcctccagaccataaaaaacagactccctaattggggaggatccaacagattgaacaatgagttacacgagaaaccctggctaggattagggctccaaatatgaacatccattcttcccacgctaaaatcacagccctcgagcaaagaaagaagagaggtcacttatgtcgttttcctattggacaaatgatgacggaacccaaaggaaaaggacacagaagtctcagaccaaagtagaaaatctgaaataggatcgttttgaaagaagacaagtgatagagatcgtgtaatttgtaaatagaacaaaaagagctatcccccacccactgatcctcccaaaaataagtatccctaccattccctacaatgcaacgagtaaaaggagagaaattaggaagctcaagagaaatgtctttccaagggttttggtttgtgcctttagcctccatccaatcaaaaaggggcgtgaaaaagatgggtggttttacgctagaccacattaatatcaagcttctcaaatcagaacaacagttgtatgaagctgtctaagctattggatgccaattagctggttgacactttttcaaaacgagatgcctttgtctagatggaaaatgaagctctagtttgggttggaataggtgccaacattgctagggtgaagcacccaaatatagactttagcttctcttgttttagctctttgtcaagttattgacagtagctttgggagtctattagaacacttgctaacaagaactagatcttaatttattataatgaactataagaaaatacaagataaacccaagtataaggcacttggaacctccctcttgagtactctcacccaagccctaaatccctccacagaataacctccctctctcacttaccctcccttattttataacaaggtgtaaccaccctagtaacctcacttacataataactactagtaaccacacttaaacaataactactagtaacttcctaagtatctaattacccttaacccctaaccctatactaatctaattatccttatacaagataaacccatgtatactaatctaggtatctaacatctaggcatcccaatgggaagcagattcccaagtgctctaagcgtattttttggaaggtgtttccgagatttcggaccccaaaaccttgggagagcttggcaatcttgggaacatggatgattggccttcctgcagtgcttactttgtgtttgtttttctgtcattgtattatggcaatttctgtgcctgtaatttttaagttgtaccttctaatgaagttgaaatttgataaagtacgtggtatgtgtcaatttcttattcttgcccactcttgcatgttgaatctcgtacacacataataagcaaaaagaaaaagaaaaagaagagtgtaatcattttataatttaaatatgagaaaatagaacacatcaacaattaaacaaaaacaaactaaattttaactgttcagcattccatgggtgaggtaagcgcttccaattcacatcgaccaaattgtattctagtgtcaactgtgacagccttgccaacttgatattggcctttccatcttggtgcaaaatcttcactgcaaggatctttaatatttggcacgactcatttaaaaactaaagttattctccttgttggaaattaggggctagtggagtgtttatagcccaagggtatttgtgtaatttattgtaccctagttgtatttccttttttgttccggcttattatagcctatatatattcttccctcttgtactcttttgattattagaaaataataagagcagcttctatcgtggttttttctctctgtactaggatttcctatgtataccttgtcttcttttcaatactccttgaaactcctttacagattgggacaccaaataattgcttccccgcatgagtattaggtggaggtggtgctttcccattctcctttcaaggagttgggtaaagttttgtggtaggtcagtgtctgcattgtggaacatttgagttgagaagaatggtacaggtggagagatcggatgaggaagtttgtaggtagttaatacctccttgtaagtttggattggacactttttttgtagttagggttggactccatcttttggttgtgatttgttccctagtttattgtttcactgctatcattggaagcatgatttattgccaaaaatcaaggtcttggctatttaatatattctttattgttgagaatattactgattgatatgaactcatgattgatttattagtaatattaatgaataaaattgtatgtttcgattatgaaatttgcttatttgagagttttgtgatcttcaatcaacttgtttgtattttttggtaaacaaatactttagaaaaaatgagttttaaagtgacaattgcttactgagtattttcttttgtcattcttgttttctaatggttccagagggaggatcaagtgatgaatccaataagcaataacatcttcaaatctaggagggggggtttatttggccagtcatgatagggttcacgcctttgaacttgaactcatctctggtttataaattagaactcctttgagactgatgtcaattgtgacctgctttagttggtgggcacaacttgtggggtcaaggcttttttgtttcccatagtatacctgggcttctcttatgaccataatcttagaccctctttttggagctcaatggtgggaaaggttataagtgtctctcttatttgaaagagcatgcttccataagtgcactgggtctgctacataccagtcctcgtttcgagttcagggtaaaagccatgcttccctagggtgtttgggctttaccatatttagtcagtctaatctgggagtgggaaatgggagggactatggagcaagggaggggcggagcagatctcatctttaactaggaaacgatgtataaaagaagaagtggcaattgatgagtggttcttaacttgaagaaaacctctttatggtagttgattgtgctggttcaaatcattggtgcattgatctttcaggtagcttcactgttaatctctctctagacatttggctgcatcatgttcagtccataaaggagctttcttggctttttggaaatctatatgtcctaagaagattagtatcatcatctggattttgattaatagcttgaattccttgaatgtggcataagttgtacactggtgcttggattccaaaagtttgaattgtctattatttgattgctctgtgcgttatcatgttggcaacacttcttgggttcttcagtattcatagttcttcaataattcttagggcatacacttcattttctcattcaagcccctaattttatagttatagtaaatatggttaaagctgttatttcaaaacttttgagggtacacccaatcaagaatttatgaaagcaagtaaaagtactggtcagtttgtttcgaggggtggctgagctgaagacttccttttagtgctgattttccaagtttttcaatgggccccttgtacaagttatttgtcttaattaggaagcttctatttttccttactgttgttctttccccttaggtttgtttgttttatatttctttcgcccttctgagagtgtatttttggaacagtagtctttttttagtgaagtgtcttttttacatttcttcaaagttggttttttgttttatatatatataatgccctcttggtttagtggctttcaattgatgccttcccttacagattgattttttgtgtcattcaatcgttgtgatgctttcccttaaaactttactctgttgtcttacatatatctttgtgtgtctttaaaatgaaaagaatgaaacattacacttccgtttgattgttgctgtttgaatgtgtagttaacttttggcatgttgcccaaacttttgcttcatagtccacaagataaaaatatcttagctcttccgtgttctgttcaaatttgtagaatgtatttcactcacttttttagttgtgttaatatgacttattccatgtcgcttctggaatgtactagcaatttttgtgtttcctttagaacttgttttccggggttattatttatcttttaaattgcatcaataaataactaggttttgcgttcttgccacaggtgtttag

SEQ ID NO: 7563 - DNA, 1942 bp, Cucumis sativus
  Intron number 6 from transcript Cucsa.094640.1 (locus Cucs a.094640) derived from phytozome v7.0 (chr-ID scaffold0091 9; pos 785181 to 787122)
atagtcatagcaccgctgcggaagctcttggtttggtatgttattaatcccatctatctctctctaatttagagttctattattgctggtagaggcgtctttcatacccgcttcaacaaacctttgttggaggaagatttacccaggtcttttgatgcatagtgaatacaaatagaaacattaatttatttgggtacgcatgattcattttaaaacttcacattgattttatgcaagtatagatgatgtttgatttttaggatttatctattctgaaattttgaatgattcattttagacttgatcttttattcaagtatagatacacggggcatgaatctcaatttgtctatcccttaggaattttcaaggctaaatgggatctaaccaaagttttcaagcccctctctttgattgttcattctctttctgaaatgaagggagaaatttctgcatctggagactacaaacttcaatgagagatgcaaatttggatgtacagattcggaactagaataaggaacatccaatttagaaggaaactccttttcacaatcctgaaaaattcatccaaaagcttctacatttgaattgtcaagtacaccgtcagattctaagttgcaattctcagcctaagcataaatacattttttttaaattgcttttttttttatttgtaggaaatagagatgtatattcatctaagtcatcaagtatatctaaaatcctttagagacgtgctactcgtgcacttttatgctgtctttgaaaggaaatgaatgaaagatgtttgaagataagttttgattatttcctcttgagctttgtttagcatacgttcattggtggtgcacaaaattatctcaaattgttttgtagttatagctttcttgtgattattaacaatcggagagctctttttttccttccttttttttaaaatagtgttggagggggtttcctctacccctatctttaggttgttcttttggctcttttgatgaatgtacgtctctgtttcatattaagaaagaaaaaaaatcagcttcacgtagctcagacttccgtctccacattatcatccacacatggaatagtaggaggccgcgggacagaagggtttttcgttgaatagagtactccttttgtttaaggtcttctttgaaccatcgggaggaaattcattaggacagctatggttgacagagaggttgttatgtctcaaaaaatctggtggcgttgtgactgtatgtttttctaagaacataattcttcaattttatctgaattatcagaagagttcttatcctcagtcccctttttttgccattagaataatggacaggcttaattaaaacggattttaacttcttggatgcaatgagaacttgttgaagcgaaagcaaaggattcacagggggttatcttggaaacaggaaggaattgcttcttggttgatgcaaggagtattaactacccgagatataattggagatgtcatttaagtgtatcttgtgattagttaaccattggatggatttttttcttatatggtgataccaatctgtagtgcatttgggagggggagtccatgtggtattattttggttaaaatatcattttcgttcctctaactgagtgcatttgggaagagtccatgtttcttagttctacaattttggaagctttgaggtaacgagtaataattgctttatccactaagttatgtgcttaactgctttaattagttaatgttacatgctgctattactttattgtacaaaatggaactcaaacggtaacgagtttgtgctgaaggttcaaattgtcatactcttaaaaagaattattatctatattcgttgtgtttgacggcttatttacgtcatttatcacttataaatttctgccttttgtttgcatgaaggtgcttcctacaaat

SEQ ID NO: 7564 - DNA, 3363 bp, Cucumis sativus
  Intron number 1 from transcript Cucsa.159090.1 (locus Cucs a.159090) derived from phytozome v7.0 (chr-ID scaffold0114 2; pos 1122392 to 1125754 reverse strand)
tcgccaagttcgcaaaattacttttctttcctcttctcaaatgagcctggggattggtatttgttcatttccttcttttatctttgcacgctcaagttgggattcttatgtttgatacgccctgatgtatttgcggctttttgatttcttttagtacatcatatatcattattcttttggtggtaaaccctagatactctagcttacaacgaaatgcctagatttaaatatttagtatgaaggaattgaggggatgagatggatatttttggcttgagagaagcacgttcatgtcacgaccataattgaacacgatctgttctataggttgctcattgagttctaaggagaagggatatttgtgtttggagtcctaaccctttggagggtttctctagtaaatcgttctttaagattttattggatccttctcttgttgttgcttgggctttgatgttttatggtggattaagattccaaacaaagccaagaccttttctttgggatcagtgagaatgataggttcgagacgaattccactagctcttatactgacaataaggtgggtgaaaatgacagatttgagaacgacgggtttgagatagttgtccctgaaaatatggttgagaagggcagtgttaatgaagtcgttatagacagagagggtaagattgataaaaataaggtcattacagagttcactaaaaacaaaaccaaacaagaccatccaggaaacatgagtaagtatgatccatcccttgacctccctattgcactaaggaaaggtattaggttttgtactaagcactccatctctaattatgtttcgtataagaacctttcacctcaattcagagccttcacggttagccttgactctaccacaatacccaagaatatccacatcgtcttagagtgccctgagtggaagactgcggtcatggaagaaatgagagccctagaaaggaacaagacttaggatttttgcacactctccaaggggcacacgattgtggaatgcaaatgcactcaagtacagagcagatggtacccttgacagacataaggttcactcagacttatggggttgactattctgagacattttcccctgttgcaaagtaaaatactattagtcttgtagtcagttgctataaacaaagactagcccctatgtcaatttgatggaatgcgttcttgaatgaagatttagaaaaggaaatgtatatgagtcctccaggatttgaagctcagtttgataattaggtttgcaagctttggaagtctttgtatgggttgaaacggtcaccgaaagcttggtttgacaggttcaccactttggtcaagtcttagggatacaatcgagggcatccttatcacactttgttcacaaaggtctccaagactgggagaattgttgttttaattgcctgttgatgacattgtgctatctgaggatgatatcgttaaaatcatccaactaaaaaagaagatgggggatgatttggaattaaagacatggggaatttgaagcacttcctttgtatggaggttgctaggtctagagagagcatctccgtgtcccagagaaagtacacccttgatttattagctgagacaggtatgatgggatgttgttttgctgatatgcccattaagttcaatgtgaaactcggaaattccagtgacaggattcctgttgataaagagaaatatcagtgccttgtgggaaagctgatttacttgtctcacactaggcttgacatctcctaagctgtgagtactactagtcaggctccttatgaataccacatggaggctgttaacaaaattctaaggtatttaaaagcaacatctggtaaagggttaaggttcgggaagacttgcagaagatgcattgaggcttatatagactctgactgggcaaggtctattattgatagaaaatccacatcaggatattgcacctttgtgtggggcaatcttgttaattggagaagaaagaagcaaggagttgtggctagaaatactgctgaagctgaatgcatggctatgagtttgggaatctgtgaggaaatctagctccagaaggtgttgtttgatctacgctaggtacctatgaaactattatgagataacaaggcagctatcaacattgccaataacctggttcaacatgacagaaccaaacacgtggagattggcagacactttatcaaagagagactggacagtggtagcatctgcatcccttacatactctcgagccaacagattgctaatatattcacaaaggggctcctcagacaaaactttgattcatgtgttagcaagttaggattttctgacatttacatcacaatttgagggggtgttagaaatagtgggcttgagccttgatgaaagcatatgggtagttaagattctttgccctattttttttattctttaattaggcttgtgctgcctataaatttctcccttttttgtagctttatgattatcaaaaaataataagaaacatatatatcgtggtttttccccatgtactagggtttccacgtagatcttgtgttttttcttcgtctttatttttcaataagtttctttttttaaaaaagaaatggagttgtctgccagacatattttcaacttcaaaatttggattctctaccaaactggttttaaatacttacgtattttttttgcaattgtttcattttatagcatctaattgaacttggtgtttttgagtgattttgctttccttagaagctagctggaacatctattttctgatatctcttagcttttagccatgaaggacatttcttcctagcttgtactttgatcaataaaattgtttgattaagttcatgttcaaattagaccatttcccgaaagaaattacaatgtttgtaatatcagttaagtccctttatagcatcaacactagaagaaaacaggacaagttatactcccactgtgtacatgactcatagtcatcaattaataaatgcagactacccaaacttggtaagtaagttatttgagctatttttttttaaaaaaggatgcacaactctttattgatttaatgaaagagactgatgctcaaaataaaaagaataaaaagataaacacaatccttctaccataatatgtaagaacgaagcagaaaaaataaagacattccaatttaaacatatatcttgaatagaattctccaaaagacttggagatccaaattccaacctcatcctttttcaacagattcaagatactccaattgttttatcctccaattattttgacacgaacttttaatcttgtttgtttttcaggtgaaatcagacttcttag

SEQ ID NO: 7565 - DNA, 1465 bp, Cucumis sativus
  Intron number 2 from transcript Cucsa.155490.1 (locus Cucs a.155490) derived from phytozome v7.0 (chr-ID scaffold0113 6; pos 232441 to 233905)
cgcttcaatcccgaggtacttcttccgaattcctttgcttcaactgttctgatctatgaatttgagaggttatttgtttttccattcacggaataatactcaacttctttgacattccgttagaagattttgcaatctacgtaacctgattacttaggtgaaagtctttgattgctataatctttcaattgattttaccatttgtcattaagtgttctcaacattctgtaattattaagatcttttaatttttacgaggaagaaagcttcctgaactcatttttaccttagcaaccaattgagtcattttgtcctactctagggtgctcatggatatgtggtaaaagaaaattcattatctatgattctgtatataaatcactttcttggacagacgttttcttttgttatgggtctttcttgttacaatatggctgttttagttgattattggatatcaaacgttcattaactcgcttcttgaatgaaggaaacgtctgttgatgattgtgttttggtgaagtacagctgtttataatttcattatttgtcccactagtatagctttattaatttcacttggatccagtggttcactttaattgaaattttactgggatggtagtttatggaatttgatgagttcaattgcatgttgctgatgatgatatcggttaacaataccaaaaaattgcatgtttgtatgcaaattaatgggctgtattgactcccgagttatgaatcataacatgtagttatcaattattttcatatgcaaatttgtcctttaaatcgaaattaaaatgccattggtaatagtgacacttgatagaggtgtttgtctttaatagatatttatttgttgaataaaaataatgttgacagccaaagtgagcataacacaactttcatccatatatgttacgactaagagactttcaaatactctacatcgatttacttaaaaagagaagaaaaaaaagtttgaagtattgtgttcttcaataacttttgcactcccaagctatgtgtgagccttgtatacattttttatcatgtcagacacgtgtttagagcgtgtgtagatgtagttctgtatgatgccgacaccttgccttcctaggttgtgcacatatataattctgatggttctcaaactccaatagctgttaaaatttccaatccattctctgataatatactcaaaatcgtggttccagtgaccttgtcattgttttcctgaacattgtttgtcatgtatgaaatcttgcactgttttaactttattcaaacctgttctctcttaaaaaataacgactttgtcctgcatctacatgaactcaacaacctaaatcgcttaaagtaatgtttcatttaaattcaatcaaaagaaaattcacaaaactcgtttaatcttggttgatgtcatgcctgaacttaacagtaacctttgcatcagggtacc

SEQ ID NO: 7566 - DNA, 3451 bp, Cucumis sativus
  Intron number 5 from transcript Cucsa.373400.1 (locus Cucs a.373400) derived from phytozome v7.0 (chr-ID scaffold0372 6; pos 246862 to 250312 reverse strand)
cactcatctggataaggataacaattgtgtaagtcttgtactcttttttggtaggaatactgttaaaacttggatttcttgccacaacaagccatggcgaagatgcatagtatgaaaagcttgtgcagatcttaacactgttcttcataatattcaattcacgcaatcaattatttcctctatgtggtatttctttttggaagcttgtgttttttttgaaacggagaaaagcaactttgttaataatataagaaactaatgctcaaagtacaagagtactatactaagagcaaaataagaaaaagacactatcatccagacaatataaagaaagatgaactcaggcaatacaaatatgaaagtgacctacaaacgatcacaaaggaaaaacaatgaaagaaccaaagcaatagagaattgaaacaatagcaaagagcttcatacaaagagaatttaaacacttcgtcgaaaaccacccacttccaactaaaattttgtattccacatgcttcaatttgaaaggagaaggggaacacgaagaagaaagaatcagctgcttcaaaactatccaacctaaataattctttgcccaacgcttgtgttttacctctgcttcattttgtttttctctctacaaattattatgaattgataatctaaaatagatttgcattatacacttgctccctccacttttgttgtaagtcggttaaaaacgcaagtgggtgggttgtgttatgttggttgggtgacacttttagacggggtgtttgggacaaggagtggaatagtgagctctagtttagggagtcgtgcactcctaagacttatagtgtaaagagttgataagatatagcttccacgtactattctatgggtactatttaatatagttgaagtccctttccaataaccctaatttatataatattacaaaataataattatataatttaaaccgtattaaaaatattaacagtagtttattgttgactaaatattagtgggtaagtacaactaattttatatagtatcaaacacattttaaacaattgttagattagaagttaatttttgatctgctaccaaacacatataaaaacatgaaatacactccgttttcataaattctttgttttcaaattgttgattccaaattctctaccaaacagatcctaagagttttagaagatatactcataagacctcttaattgtctttgaatacacaacatttttcgtgaaaggaagtggtgaattcttaataaaaatctttacctcatagcttctaatgaattttggcaatgaacgaaattttgtgggccattcttctatttttatgtgcaacttgcctaataatttccatttgcctgtgtggatgaggggatcaaaattccttgacaacttagaaatagaagactgataacttttctctcaaaatgtgagttttgttatgagatgggaaagttcgtgcttgatagaagggaatttaaactaggagcggtcgagtctgataggaagatctttattgaggacataatgaaaggaaacacggtaggttggagctggatttagttacttctacgtgggtaagggattgtttaaaggtagcggcggaagtgagtttcttcatgggtttttggcgtagaagaaagttggagtttgccattatcttttcttagattcttttttcgaacggagacaagaacttctttattgataaagaactcaaagtacaagagagttatacaaagaaagccataaagacgtagtaatcaagggagtcctctatcaggaggtgcatctggacatttcaacaaggttgacacccccttggcgccaaacattatatcccgagcacaagcaaaacaaaacaataaagaagcaatgataaaagcatccatcttagtacaaatgtccagaaaacagtacgggaccggaagaaaacaataagaatctcgggggatgggggggtgtgcaaaaaacaaaactaaaacagggggcaatcctacaaggcttcaaaaacagtagagggcttcgtctttaatctgcaaacattgaaactgaggcagcataggattaggcaggttgagaaagaaaagcagcctagttaaggtaaatgtcttgtatggaataattaacgaacacctttttaagggaacgccaagttgcagctttaagttctgctgcatgcataatttctgcccttggtcttgctttatcatggaagatacgttgatttcgttcgaaccatacgttgatttcgtttgaaagtaaagcttttgacaaattgtcccatatgatgcttgattttttgggcaaacttggacccgacagaagttgaaccacaccagcactcagtgaaacgtcaaatacccaagttaaattaaacaaggagaaaatccttacccaccaaaaggaagagacaagacagttcaagaaaatatgagaaaaattctcgctagccttcaaacatagaggacagatcgaggggagaggcttttattgggagctttcttttgcaagattttagagctattgagggccgaaggccataatccaaatcaaaatattgattcttcgtgggctgcctgttttccaaattaccgaaaaaagacgtttttccattggagagacagattttaagtgagtcgaaagagacttaacggaaaaccggccttggggatcaatggaccataattttagattttggagaatacaaaagggaggtttgctattatctccctagaatcgttcaagggtagataccgaaagggaacagaggaggtggtttagaaaaaagatcatataaacacttgttataagattgaaacctatcggtgccctcctttcttcctttcattcttttgtttttttttaaagggaatcaagtctctttattggtaagtaaaatgtaaaatgtgacaaaagctcaaagtacaatagggtcatacaagagcttagaaaaacctagggatcaagacgcacccagacatctcaactaggttgacactccatagcaccctcatcatctccaaaagtagaacctaaaacttcacaaatctaaggacaaatatagagcctattacaagtaacaataccaaaaacatacaatgaccaacggcacataaggatgaggaaagagtacaacaagtcagaaaagagaagaaaacaaacaaagaagcaaaaatggaagccaaaatccaaaatgaagctggaaaaatagaagtttgccaattaaggttcgatcttcttgaaaagtaattgaaaagaatgctaatatgttgcttaacacaatattcttgaaaaataatttcaattttgaccatgatgttcaagcctaggtaagcccatgtacttagtggcactatattattcaattttattttttacatgatgcaaatatttatattattgttaaaatattcttttcattttgcagatagctcgaa

SEQ ID NO: 7567 - DNA, 3166 bp, Cucumis sativus
  Intron number 1 from transcript Cucsa.160630.1 (locus Cucs a.160630) derived from phytozome v7.0 (chr-ID scaffold0114 4; pos 779859 to 783024 reverse strand)
tcaccaaatttaaaaaccctaatctcgaatctaacgctgttttcaagtatgaatttctggaatgtggtatgtattattctactttaaactacttcattttggttattttaattgtttgcaattggttgtggaaggcggatgtatacgggttttgcttttgattggaaacagagtattggtttcccttgtatagatgatttagggacggtgggtgttttgtggtttattgcgatattggttctttaagttttttgccctaggtaggatatggagttgtctgggtattttgaatggatgttgaactgttctgtgaggtttcattaggttggtattatcgctaattgcttgcttacttctaatggggaattaaagtgcattttcgcccacttagcggctaacttgtacgctgtcaaaagaggtaattggttatgagtttaacccctctggagatccacgttggaaagaggatttctggaatgatatctattcatctaaaaaggagtggtagatgtgtttacattggtatcataaactagcaaagattgctatggtaattatttccgtacatgcttgaatatatcgtgtatctgaaaacaaaaataaatggttgtgatgttaatctatgctgttgtgttattttcagttctcactatgagttgcccttatctcagtgttcgtttcagatttgctttctttttgtgcgctttctttaatgaacatccgttcaacaatgctactgcagaacagtgatccgttttttcttttttctcttttggccatcatcaaaattagtttctcttgttgatagtcatccattttataaattgatgaagataaattaactgttaccaatgaattcattgttgaagggaaggagattgaaaatacagacatggatgttgatttggatgaatgtaaacttggctgtgacaatggtatttcacgcgatcctttgggcacaactgaagagcaacaagtcatggaagaagagaaatatcgattggatgccaacacagaatcaaaagtgaattgtcattcccaagatatgctaatgctattagataatcatgtgacccaaagcccttgctctgaacttggaaaaattggatctagctctcaaagtcctgcactggggttaaattgcactcttcctgagtttactgctgaagtactttactttctgctttctggacattattttcttttaagatatcttgattcatgattgattaacactttttttacaattaacagcggcagcatgatgatggactttcagatcgtaatggaagcatgaaagggcgttctccgatgagtccttcttcagaaactctagaggagagtggtatgttctgtatactgtgtttagttcaacattcttttggttgttgtttcccagaaatggcgtaaaatacatcaataagaatgattctgaaaggggattgattttaaaaaagaaagaaagaaaagaaaagaaagaaaaaaacctttaattaactgattgaacagtaagggcagatttctaatggctttgttaattattattctccctcctattctaagaaggtttactattctttttctctgttcaaatttttcaatgaatggctattatcctgttcaatcagaaaaaggaatgtgaaaaaacctaaatttccctcttcaatttgaaaaattggacgatagatcttcatcaatttgttatccagcctggagcagacagaagtttccacgtatttgcagcacatataacatgctagagttgcccggaataaacctgtcctcaaattaactctcataactcactcatttcattttctgaccatgatttttttggataattttcagtttctttgaacgagaagtcctcagataattgctcatctgacaatgaaaaggtaagtttcttccttgtgatgctttaaacagtcaaagaaacattccatgccctcatgtcttaaatttttcctgaaacttatttccaattgttcatctgacaatgaaaagggaagtttcttccttgtgatgctttaaacagacaaagaaacattccatgcacccatgtcttaaatttttcctgaaacttatttctaatttttcatttttgtttacccggagtccaggacttctaactacttctctgagaagtttaggttgctcgggtattcatgttgtttgtacacatgacgaattcttcattatcagtccacgttaagggatctttttatcttgaagaagactatagtttcctcttattaacaaagagcgtttgaagggaaaaacactggttaggttaggaagaaaattgaagtagtgaaacattatgcatcttctgtgatttggacttatttgtttaaaccgaaacaactcttttcattgataaagtgaaaagagtctagtcctccaaaatattagatactgggaacaacaaaattaacaaggatacatatcgagtaatacaaaggcataaaaacataaattaagctgaactaatgggagtattccattttaaacaaatgtcctgaatggaattgttgaatgatataattaaatttaccttcacccattaatttaagcatcttggtgattcaatgatttaaaaatggttagtggacttgtcccgggagggtttgcgttcaagccttgcaatgttgttttctccccaattagaattgatttccacttgttgagtctttcatatttcgagcacacaagtaaaagaaagcgttgaatgatataattaaatttacctttaaccattaacttaagtttttggtttaatcggtgatttaagtggaataattggcaaaagctttagattgagaacaccatcatgaggcaagaagatgtgcttttaattctgatgttggagtgttttatcaagttatgtttgtattttaattctgagatgtctaagttcaccttttttggggggcaatagaattcagaattgtttacaagtttacaacttaagaataaaatgtagcattgatcaattcagtggaacatgcttcttggagattttttaaaataaataataccaataaattattattgttgaagattattactatatcaattccataggcagattctagtcataagatttaattgtctagaatatatgcatttgggtactcaatctttcctccattcaatttatagg

SEQ ID NO: 7568 - DNA, 9999 bp, Cucumis sativus
  Intron number 5 from transcript Cucsa.352060.1 (locus Cucs a.352060) derived from phytozome v7.0 (chr-ID scaffold0353 3; pos 27837 to 37835)
catcgactttagtaacctctcttccgaaagaaaatgtgagcaaatagttttatttgttggtgtagtgattttagttgtatcatatgcacttgcatatatgttaagaagctcttgagaaaacggttaacttcgctcaagaatggagccaaaaaaacattctaggggacaaatggaaacatcttaggggacgtcccttttctcaagagaaggaatatttgaagaagctctttatatgcctttgatatttggacccgtgtgtcatggacccactgatatttactacacttacttttttctcataggttgtgtttggggtggggtggagtgcatggggagggattcttttttttttttggttttcttgctgtttgattgtgctgggttcttttggaggtttccctctacttttttccttgcctggagttttcttttatacacacacatatatatttaagaaaagcaaaatgtccgccttgaaatggagtatttccttgggcttgacctaggcccttcatactgactgactgcatggtaaagtgaacatttttttaattagttacttggcttgactatggctggttctaccccagtaatccatgagagaaagaagcatggtccacttcctttttttcaagttacatcaagaaacttttttctcatattttcactcgttgaaaacatgaccacctttccatcttgatgtcatctcaaccctcaaccaccaagccaatgactacaattcatatttattttcattcttatttaatgacatgattttgtgcacatctctgtatacttgactgactgatttttaactgacctattgactatagtttttggagacatttcttgggaacatcacccctattaggtttgaaaacttgttacagaatagttccgtttgtgctatggtagaccgttggtgggctctactcaaaatccttgttagggatggctggctatgattttaggatgaaacttaagggactagaatttcttctttaaaattggaacacaccgctatagcatctcagctcccttctctcatcttggaattgaggaatttggcagccttgaagatagggtttctcaacgtttaattagaatgtgttgaagtttcgaggtttcgtttaggaggaaagatcgaagatttgactgtgaaagattatccttattggcggtaataatgtaagttgtaatggtttgagatacaaaaatgctaccttcttccataggcttttggctggcagccagtaggaggaaggactcaatttgttaaagtactttctcgtgagggtcatagttttgcatcatggatgttgaaaacaaattcattgcccttttataaggccttatttcctaaggtcagtagcccagttttctttctacaaaattagattagggacaatcaatgagacattggctgatgatttggaaaaggagttttcttaggaggaagtctcctcttccttgctgtcaattcaagtttcttagacgatggtttgattgaaactttttcaacactattggaccatgataaagtccaacatcatgaccatggtgtcaattctttgggacaagtttcttagattgatggtttgactgcagaatttttttgacacttgaccatgataaaatccaacatcatgaccatgtttagtgacttatttatttctggtgctacacttttttttttaaatggaaaatgcttttcatcgataaaatgaagagtttaatgctctaaataaaaagaaacagagtaagcaaaataacaaaaatacgatgaagtcaactggacaaaaccataaaagaaaagcaaatacaacccatatcagaataaattggcccttgaatgaaaaccactaaatccgaaactatgagaacaacaatgtgtagcaaggataatgcaaactagtgatctaagaccaaagatcaaagatcaaaatttcaaaaccagctgaggcttcaatattgcataaaaaatcttgagacaaaaagatcctttcgtctgtaacaacatccatcaaaggcaaatttgcaaactctaagatgatttagagctttggcaacggaagttttaaaaagaactcaaaacaaactataatgggctgtgttttaaaaagaatctttgagcattagtctcatttttctttattaataaagaagcttgtctccgtttcaaaaactgacataaccaaaaacggtagtaaggcatattatccaacaacgtttgcccatttggagaatgactctaggtattccaatgacctcctaaattcatgaatagactgatttatcagatataaaaaaaacaacctcctcagatgcaataatagcaatactagccccactcgtaagttgagcagccgtagctagtggaatctcagaatgcagcagttgcttgaaatcgaaaatcacttcttaccacaacacaccatggtcaagaagaaaacaaataaatgtgcctcaaatgaaaactgtattttcttaataatgaaatgggacaccaaatcggtttatgtctgttgccctattagcctcattgctcgtgcttacaaaagattattgctagagttatgtctaatcgattgaagagtgtccttgtatcttctcttaatgaaaagtgtggtatcattttcaaaagtaattgattgaagaattttctaccttttactattggtgaaaactaaatagcctttgtggccaataggcaaattttggacgcttttttgcattgcaaatgaggtgatagataatttaacagtgtttcagaagacacttagctcctacctcccctttggacccacagctggcaaaatgcctttggaaatctagaagtccgaggagggtggttatatgggtttttgctgtttgggagtttaaattgtgcttcagttatggaaaagaaactttccactcattatattttgccacatatttgtccattgtcttagatctcatgaggacctgcagcatatattattcgtcgtgtttacgacaccaagtcttggagtaagctctttcacacctttaatctcagctggtacctcgataaagtctgcaagaataatgttagacagctactaattggtccacctatggggaaaattgcatccttgctctggtgcaatgctgtcaaggcaatcttggcagaaatctggttcgagagaaaccaacgggtcttccactataaattttgctcttggcaggacaggtacgagttgacacagctgaatggctctttgtggtgctctctaagcaaacagttcaacgacttcccaatgcaagacatcttacttaattggcaggccttcatccttcctccttgattgaagatccatattggagcattgtcttctgaagattctcctctttgcagctcctttctgccagatttttctccctagtatcgttattttgtttgaatgttttattattggtttattggttggtattggctgtgtgtagcccccacttggactatttattttagttttgatattttattttcttgatgtgataagggtgctatggggtgtcaacctagttgagatgttcgagtgcacctcctgatcctttttggttttcatttttgctcattgtatggatcctcttgtactatgagcttttgtcttattatttatcaatatacgaggctgtttccttttcaaaaaaaaaaaaaaagtgtaagaagaaaggtgtactccttcaacttgatttggaaaaagcttttgatgaagttgattggatttttttggatgcaatttgaaggcttttgtatacgatgaaggacttgggtttgtggtcgtatctctagtgtcagttactcaacaatcattaatggtaagctgtgagaaaagacgttaatggtaagccttgagaaaagacattaacagtaagccttgagaaaagacattaatggtaagcctcgagatgatcattccatcattgcagggttttatgcaaggaaacccactcttgtctttaccttagtcgtttatttacatagggcactcattttggtaaaattgtgctcatcctgttggtaattcttcttgtttgaatcatttgcaatttgctgatgaaactttattaattttttccctaattcaacagcgttggtgatattatcaaaattttttaattgactttcagactgaaagaaactttaacaatagtgagcttctaggatcaatattagtgaatcagattgagttcgttgacaatgatttttggttgtagacaagattcttggctcactacatgtcttggtgctccattgagtgcaaatgcaaaaatgccttcttttggcactcttattgagcaaatccaacataaacttcatacttggaaatttgcctttatctcaaaaggtgttgggtcaagctattctatcaagtatgccaatttactacctttcattatatcattatcatcttccaactaaggttactaaatctgtggattaactttttagagacttgtttttttatttaaaacagagatgagcctctttattaattatcataaatgagactaatgctcaaagtacaagagaattatactaggtgcataaaggagtaaaatgactaaaatatcaataaaaaccacagtacaaacaagccaaactcctctaaatctcaagccaaaaaggagaggaaaaactacaaagcaaaagtactggattttcaataagaaacctagattcagcagcagacttccacactaataggttcaaaaagaaaggagagaagatgacaagaaaaggcaaaaaacaatgttgaacccgagaagtcttacaaacaactttcaacccaaaaaacaacaaaataaattcaatttctctttcaagaggaaaccattcttgtgcccaacgagaaatgatgaaacaagaaaccaaagctctgaactgccaaaaataacttttgaaaaatagaggaactgagccgagcaggaaccttgcttcaacatgcctcctaaagagcctttaaaacttgaaagaaagtctagatctgtattaaggtaaccaagaagctgtctatggcctaactactgaagtatctgagaaaaccttgtaatccactaaacaaaattcagagataattaactgatgaagcagagaacagatctactttcgagagctcaacccaaaactattccacattcttcaacaaaaaacttcaaatgctctggaacttcacaatgctgagcttgagagggaattgtataaggaccagcttttcaaaacctacaacttcctcaatctggaacaggacatttaaatcagaatctaaagggtcctttagcaatcgatcctctttctcagatgttttcaacaaatggtcatcttcctcactgcttacactaaagggagattcaaaaactaaaacgcacttctttctagacaaagagaacggagtttgactgggagtctctaaaaaatttaacctttgagttaggtaaaggaagtacagagtagttaaaatgaggatagctagaactctaagggtctggtttgtttgggtgagatggggcttgaaaaagggcacactttgccttaacaaatccagattctagtctagcaacaaccttgcttttagaagccttttgttttgaggcctccttcaatctgtttcttctatcaaagtgctttgggaatgtcaagcgacgcgggagttcctttggttttgaatgtttctttgacttgtttcttaacttaatttggccaaggaagaaatggaagaagaagaatgcaaaatggagtaagatttagaatttgggactcttctggaagaagttttagagggcactgaactggcattagagaagggagtcaaagcttttagaggagtaatgggaaaagacttgccattggaggacattggatcaacaagaggggggtcacaatccggctggatagattttacagctgtatagaaataaatgggctgagtagggtttaagatcatgattgcatcagtaaagaatcgtggaatttcattgggcaatgacggtagcttactcgaaattttttcttctccctagaagctccacttgccttagtcctttcacatttgattattttttcctctctcctccttaaccgtgactcttcgatttctttgcttgtgttcacactaattttgaaggaagcttgtttaggtatcatcgttggatgaatggaagaccttttttctggtgcctgcgagggatgcttttgacaaacaccctgttctaccacttcaaaaggatttcttgtgaaagaaggggttttttgtaatgattttagaaattccacacccttcagaagaaagaaccttcaatactccatctttcataacctggtttaatctctgcaagtcaaattagtttgagaaattatcaagtgataaatagcccttggttattgaaggaggatctatcgactcaatatcttcgaagtttaagaaaaaatttcctctgttgaagtgagttatttctaatgttactggcatgaaaccatcgtttcgttttacttgaatctttgcttcaaagacatttaggaggtttagtgtttcagttgcgatattctctagacccctatagcttcaaacgtccttttgttccaataatctagagtgaggatcttaattttaatccatcctccatatccttcaataaatgaaggctggctatgtttccttctgctccatttttcaaacttcatatgagaagggcccaaaaatttccatgattcttccttaccgataaacacttctagagatcctttcgtcaatttaatcagagttctttgcaaagaaaggattaatgattatttttgtttgaagatcctctacacttctaattttcttccaatcatcaaacacaaataatctttaaatgatccataggttatcaaaatcttctttggtaacttcctgatttattatcacccaatgttgaattgcactttgttttgctgaaactggaacaggggaagggtgctctgttctacaagctgctgaacagagaaaccaatattacatttaaccttcaccatattagcataacttgccctatgtgacttggaggggagctgtgtggaattctaaagatgatgcctcagataatttctcttgtgaattgttccggtaccagttcaaataatcatgcttcatgagaaaaatttccaaaattttatagaaggatttccagccatgtcgggaggacaaatatgaatgtaggattcttcattgttcttctcccaagatacacacttcatcacccaatctgtatttgacataaattttaagagccttatgcttccattctcatcataaccgtttcgaagaaggaaaacattccctgggccacttaaggaatttgagatctctttcaagaaccatcttagttgagactttgataaagaaagaatcttctgtgcttccacgccttcaataataaaaaatctttgtcgaaccagatacaatagaaagagttaacaacttcgcaactttcaacttccatgatctaaaaacctggaatcaagttaacagcaggctgaatggagaaaggagaaaggaagaagaaaaggaagctgaaacaattttctgaagcaaaagaatgttggtaaatagtatcatctagaggctaattcttttagaaacttgttctgaggtggacctttagaagagagtatcattgttgataaatagtatcatctagaggctaattctttttggccaaagcatacctcgaggggtccttacaaatgttgttggtacttggttcttatttgttctaccattgatctagttgctgactgtgctcaaagatgtctaaaacgtggtaaccattcatccttttggcataacccttgtttgacttgggggattgctacggttaaaccttttaatcctagtgatttggaggtgattgaatgagctagtctctcctattttctattgcttataacttcacagctgggaatgactcttgcgtcaatacgtttggatattgattccaaattgaaggttttggttacaaacatggaattttcagtctctatctcctatcttcgtccaaccagattaggactcttctgcagatcctaattttttcttcactacagtcatccatttgacaaaagatcatctaaccttctcaatctccttcgggttgttatgatgactctgacgtggaatctaaagttagcttgaatagcattttgtgaagtcagttttcctccttcctccttagtgtcttgtgaagtttctttcttagtgaagcttgtggtcttgagatgtgtgaaatttctcccatgatttgaaatggaaaacatttttaaaagcttcaactcaagggcatgctggcagaagcttattgacattttcaatcttcaatgggtcttcaatgcttccttcaaagataacgttgttcaaatatcgggttgtaagttggaaaagcgaacctatatacttcggataaatgcagtgaagtgtttacttgctggaatttggttcgaaaggaaccaaagagttcttcatgataaggatttattgtggataaatcgttttgaaggtacaagactcgatgcatccacctggagctccctttctaaggcattctcaatcttcttggtgcaagacatttgcctcaattggaaagcttttacttccctagattagaggctactttatttcttagttcaaagagattacggattgtattattttccctttatgttaaactttgttatcttccttttgtatcttttggtatatgatgagggcgctaaggtggtgcaacttgaactagttgaaatggcgaggtgcacctattgatcattttattgtgtcttatatttgctgtcttatgtatacttgtattcaatcgtttcattatatcgatgaaaattttgatttttttccaaaaaaaaaatgaagtctccaagtttttagtacaaataatgtcatttgcacaaataatttggaatgaacttgtggtacgtgccttgaattcagatgcaaggaaggatggcaatagaagtgttgatcctaacaacctcgagcattctgtgaaatattttatctttatttagtttagtttacattagtctttcttacattacatttgttagtctcatatcattatcctaatgaagaggcttctttcttgttaaaaaaaacattacatctgttagtttccttttttatgttacatgttatataactttttgtgacttggtctttgagtaatagattattatttttctccctaaaactacatgtttgaataatgagcagttctcttacattacatttgttagtttccttttctatattatgtgttatataacgtgacttggtctttgaataatagattattatttttatccaaaaactacatgtttgaataatgagccgtttgagaaaggaaacaaattgatatctggtggagaggcaagtaaagtttaccgcacaatggattatgtgggcacgaatgatagatcaattgggatattttgagctgtcccatatgccatgatgcaaccaacatgcaaatctttgataagttggttatcttctattgggttccaaaagtattatcggtacaaaatttaccaaccaatcagaggataatggttttgtgagaagtcgggcatttcgtggatgtcattaatttatcattagtggtatgtaaggactaaggatgtcagtgtgttattttggttctcaggtggtcaggatttgggattgtattgttctttaaatgttttcatggttaatcactacttggttgtagttgctaatttttgtttttaattgtttttttttatttgcactccctttgggcgttaatatcccttgaacatttattccttttgatataccaataacaagttctctgctgtaaaagaaagaactccccgtgtttagagttttttgaaaactcattttcttttcactaacaaataaattttgtttttcaaaaaaaaaaaaaaaacttgtggtttgcagg

SEQ ID NO: 7569 - DNA, 2620 bp, Cucumis sativus
  Intron number 4 from transcript Cucsa.157510.3 (locus Cucs a.157510) derived from phytozome v7.0 (chr-ID scaffold0114 1; pos 458218 to 460837 reverse strand)
cgggagtcgggagtaatcagtgctaacttgggagagtactgcccttatccttcaattctaattttttgatgtccatcaattacacattcacttgcatgccatatttgctgtgttctaaatgaacactacagtgtctattagaacctatcattaatatgatatgaaattttgctatcttttataaatattttcagtagttagccatttacaataattacccttactattattattatttttctatccataactactttattttgcatttaataaatgctatcctatttgatcccaagaggagtattgtactgtcaaaacaccaggtgttttctttttccttaatgttaattatttggatgcttgagatcaccatgggtttgcctcgtgaccactagggtcaatatattagtaaaatgtttagagagaatgatttcaagttgtgaaggctatgtacttagaatttattatccacgagtgtggagaaaaaatatagttgggctagaaagttttcctgtgagaatagtcaaggtacatgcaagtagacttagacactaataaaagaaaagtaattggacggttgtgataaattcttgaacctcatggtatactcacataggaagagtaagggtggagttgacgaggagtgagcacttttgtcaaagtggcctagcctagatgttggtgagatgtttgggtaggatcgagtatattgtggtggaaggatgaatgcatgatatgcttttggcgatgatattactttagatgtcaagggcctcttctcttcttgctattgatattgtgagcctcttgttgggtgtggttaaggttttgatgtgggatttggagaatttgtatcttttacaccttcaatttgttgatgatcacctccttgggtggagggttttgactttaggattgggagaagggttgtttgtgtttgtaggttaaatcctttggaggacttttcttctgagtcattctttaggattttattagatccctttcctatggttgagttggtttttaaagtcttgtgatggattaacatatcaaaaaagttaagttcttttcccatgtcttcctttgctttctgatggagaagacaacagaaaggaccaacgagcgaaggcaacttcctcttaagccgatccatcgtgttagcacaaccatataaaacttgataagttttgcatgtgagcacatgtagaatccctttttttgtaatttcatttaatcaatgaaatgttatgctgtgacgtgtgagtgtgaacacttggattgtttccatcaactttcttcctgtgtgttgtgcatggaatggtgtattctttcttggcaatatgacgtggatcttgatcattttctgtgtgttgccagctctcttatttcctttggacttggggctaagcttgtttgtgattgatttagcttgtagcaaagattatttttctatgattgaggaggtagtcttgaactctccctttcggggtaggggcagagttctgtgacatgtttattttgttgctattttgtgtggaatttgacaatagagaaatggttaaacttttagagcggctaggtatggcgtttgttcttgttctgtagttagcgttgagactttttttgtgggctttttctctgtctctctctctgtttttggtatgtccttgtgtattttctcatttttctcaataaaagcttagtcacttattaaaacaattctagatgcttgaaatctacttaacaatttaccaaacagtttcatcaattcatatttttttaccaaacagttctctgaaaaatacttttgctgctgcttggtaaatgacattgcccagatcatcatgtgaaagcagcttttgaattacatttccttctgtatttttgtcttcttcttctccttcattttttttttatcccgtccactttaaagtataccatgcaaatatgtaattatgatatatggaaagagtttcttatgggtaatgattaggtgttcttatgggtaatggttgggtgtagccttgtctacacctatgtccatgtaggccatcatttatcacatggtaaaaaaataataatttattttctttaaaaaaattaattttttgctacatggtagattttaattgggtaattagtgggatacatggagataggtgtaaccagggctacacccaagtgttctttttgtttcttactttgtttattcttaggcagtgggaagatctatgttttcttgtttgttgaattttctcatttcttgccttttgactagtttgacatcttatctccttgaaatgttcatctagtttacgtcaactaaatatttgatatgagggaggccagtgatgaaattgcttggtatagaatataggtataaacctctgtctgtgaatatgccttttctatattctttgaatttcttcctaagacatggttttaatgtctctttttgcaatttttgtataaactgcatgtctttgtatttgccttttctatatttttcgagtttcttcctaagttatgcttttaatgtctctttttgcagtatttcattaaagtttaaatatctttgagtttaggttggagcttagatattctgaagcgaagaaagtaa

SEQ ID NO: 7570 - DNA, 2450 bp, Cucumis sativus
  Intron number 2 from transcript Cucsa.217980.3 (locus Cucs a.217980) derived from phytozome v7.0 (chr-ID scaffold0165 8; pos 186270 to 188719 reverse strand)
tggatattccaaacaaaacattcgtattcttacaggttatattatttcttctttctgccttcgttttctaaaatcaaactgatgaactctttctcatttgagatcatttattttggtgttaattaagcacttgctttcttgataatttttgttacaagtttttggagtttttaaaaggaagaaactttttcaggtttccaagaaaaattttgttctttgtttgatcatttattattagtttaaattatttaaagtataagaattttttcataaattttctatttttatagaacaaacccactaaaaacgaaatttattacatattttgttatacgttttatttttgaccatttttctaaaaatatttatatatatacatacattttagaaaaattgtcaaaaatggaacagttaacttttttttaacccttagcgttttgagtatgaaaattatcttcggtttcttccttatccctaaaattattagttgtgagttatcttatgatttaaagttttgtaatttggataccgttttcaaatgtatgaaaatgacatctcgagagaggttagagatcaaaataaaacttattaaatttataaaaaggtcattttcaaatatgatacagtgaatgaaagtatttacaaaatatagttaaattttatattttattaataataggatattgatagactttgtcagcgatagaatctgaaaatttacagtagctttgtcgtttacgataatttcacatgaattatttccattatatacatactttgcttttttaacttcaatttctcgtttattgtatcattttaaaattgttcacaaataaatttatatatttaactataaactttcataaagaaaattattgtaattatagtctaactgtttaaaaatatttaaaaatataacaaaatttcagattctatcaatgatatatactaataaatttttataaacttttatcaatatatttgataggaatttatcgatatctatcaataatagaatatgaaattttgctccagttcgtttttatatctttttctcgtaaacttatttttctagaagagtttatttaatacccttggttttagtaatttgtaactatttgacactctaatccattatattgatcaaaatcaacctaaatagatcataatgaaaatggaaaatcatttatatattaataccaaagttattaatatccatttgatttcaacatttttctttctaatattatgctaatctatgtgttgaaaatagttttgtacagttaatgcattaatcaatttttaggttacacacaattgaaaagcaaactatttatgtactttattttaacctactttactttcttttaacctactttgtcattttttacaatttgatgagtttcaaatgatgagacttagaagataggaagtgatttttacttttttttcttttagtggagcaccatttcctatatatgctttttagtttctataatcacttttgaagaatgcctttcttttgaagtatctttaaaatcctttatatatatatatatatatatataactttcgacattacttttgactaattttaattaaatttagagagatattgttgaagatggaaaatactttccacttcacctcatctaaaccctcaattaaaaaaggaaaatctcaatagtcaatactaacaagaatatgatacttctttcttctgtctattatatgtcatctaagcatcttttctattaattatatatctatatgtaccaaatgggagataatagagggctttttcccaagtctttattttctaatttttgtacaatgtatcatagtaggtcattatcctttttccatttggggagagatgagtgagtggactaaagcgttggattgctattccgttgtacgatttttgttgtactgagggttcaaatccctctcttttcgtttatgtcaattacatgatattttttctatagttgaggaaagatgtgagatagataaaatgttaagaacaaagaatattactactttataaacaaataatttgaaagtaagcattacacaatctacatgcagtgaagttatttctagaaataggaaaaaatttaaagagttagagttgttgattacacatatcaaaggagtagtaagtctaaatacaagaatcatattttgtaaattaatcacatgattttaggtctaaagtggtattaactctttagtattgtttcagactacaatcctaatactatatatccaattcataaatggtctttgaaatctatttttgtttttggtgtcttccatttttacctattgaaagagaaatttgtggctatatatattatgtcgaactttgaactcatatacaagtgtgttgtatgatataatgaaaatgttgatgaaaatttaatattgttttacctcaacagagg

SEQ ID NO: 7571 - DNA, 5803 bp, Cucumis sativus
  Intron number 14 from transcript Cucsa.166800.1 (locus Cuc sa.166800) derived from phytozome v7.0 (chr-ID scaffold011 54; pos 166854 to 172656)
cctcccaggtgtgctcatttatttttgtcgatttaataagttatttctctttatgtttgaacaaaatttggtgaaaaattgagtattgttcaagccatattgctgtgccactttatgcctcaacgtcggatagttattaaagggaaaaattattattgttattattttttttttgatatccgtgagttcgggccagcttacgcgcacctctgactaatctcacagcacacccacctgaccctacaacatttgggtgtcaaggaaactcgtaggaaattaattccttggtaggtcgccactatggattgaacccatgatattttagttagttattgagaccctgtctccctttttattactaggccaaatcatgatggttgaagggaaaaattattattatgtcaatcaattagttaaaactacttcgtaagtataggttcggtatgcaaatcgaaaggatccagttcgaacaagtttcaaattcaaacataaaatttgatcaaaagtgtatcacacgagaatccattatttatatgattctttgataaaaagaaatcacaaaaaaatggtaaaattggaaactcaaggaaacttgtgtgaaaaatgtgaatatgaatgtccttcattttgggcttttagcatttctacttcctagttaacaagaataaatacaaagatacttttcagcagcagtgatttgtagatgacataattttcctcaatatgcttttgaccatcttcttttaggaagaaaaaaacaaaaccttcatttaatctttttttttttgataagaaacatgtgaattcctaagggacaagagggccctccctagaagaactaaaaaatgatggccttccaattgttgaatatcattgaaaggctataattacaaaaatgtttggtgtaattcgtactccaccaagaagctgtgttgcaacacagtccaaaaagaatcaaaagaattatagttatcttaaaaaattctactattcctttctttccaaatgcaccacaaaagtcttgttgcaagcaccttggaaataactttatgcaaggaggtaactaagcttttgggtttgaaatcactgacacgggccacctctttctttttggggatgaggcaaacataagtctcattacatcttctattaataattccatttttaaaaaaatcttggaacatccgtactattactaggtcggacttcaaaatgttccaagattttttataaaactctccagtcatgccatcagggccaggggatttaagacaacccatctcaaagacagcttctctaatttctttttcggtaaagggggatctcaagtaagctagaatcctgtaagctaaggcattttcagttaagaccgtcacaaataaacggcaaagagatccttgtgccatataagttggaaaagaaactaaggatctcatccacaatctccttctctgtgacgagagccttcccatcaatactaaccaaagaagaaataagacttttgcttttatgagccgagacccaaatgtggaagaagcttgagttctcctccccctctctaagccactgaaactttgatttctgaatccataatttatgttctttaacaatcaaatcaagcaggggccctctacaaacttctctttccgccgcattttcctcattgaaacaactcgactcttcaagcaaatcaagagagttaatcttatcaatcagcacctgtgtttgggagaaaatgttgccgaatgtctccttattccaactctttaagaggactttcaagctttttaattttcccatgaagggaaaaataggccagccatcaacagccaaactgtcccaccaattctctacgttttttaggaaaagatgacgatccaaccaagcattttcaaatctaaagggggtaggaccccaagattgcgccccccgttttgaaagaatcggaaagtgatgaggtggtacgaggaagtctttccacactaacttctctaaagaactcaacccaaggcttggatagaagaaatctgtcgagctttgatgcagccggcctaatccccaaatgggaccaagagaacctaccatttcgtaaggggatgtccaccatatccatctcctcaatcaagctattaaagcgaatcatacttctagtaggacgaacgtcggagctcttctcatttaaccatctgatgactacattgaaatcacccccaacgcaccaattttcattgcacaaaccgcataaaccagaaagctcccaccaaaattggtctctccaagtctatatgaagaaggaccgtacacacctgtgatccaaccatagaagctagcattaaacttacagtgaatagaaatagagaactgaccttgaatagagtcaaccatcgtgatcgagtcctctttccacaaaataaggataccacccgaagaaccataagcttctaaagctgtccacccaacaaactgactactccaaactgacttcaccaaatgctgatcgacagtcctaactttagaatcttgaagaataaccacatctggattgaatttcacaaacaactctttcacaaccgctcttttgggctgagcattaagaccccttacattctaggagagaattaatatagatcaccatcggagcctagggaattgctagcttttgccgcttgagctttcctttcccaactacctagcaaaacttttacttctctagtgagcttcttgttgttgttcgaggaagccccaccctttctatgtggttttcctttcctagtcatagcccaaatgcataagtcgtatttgagaagagccactaccacttgcttagcggaaaaggatttttatagaggctgctggttctaattctgttacacttttgatttcagttgtctctttgatggataatggaagatcggtgttttcctctaaagctattaactgaaggccctcttctctaacttttttcgtggagcttgcatcgtggaagagtctatggacatcggaagaaacatcagagcctacattttgttttgaaacaaatatctttttatgaagaaaggtcgaatctcatctttttccacaaacttaatttttgtgggcttgggtaatttctggagaggggggtggtttgcacggggagcttgagagatttctctcataattatctcaggttgagttttaatgtaggtgggcttttgagcactaacttcatcgacaacaatgcctttcccttttaaatcagaaaagcccacttccttagtcaagctcagaagggttttattgggcttaaggacgataaaactcagcttcttttgccgctgtactcgccgaaccagaattctgagtaacgtaaactgacatccttgaatttgacctctccacgcgccaaaatatcaattgggtttggatctgggccgcccgggcctttgaagaatttctcagcttgttctggcgagaaggatccatggattctggcaactttatcaataagaagagtaggattttggaaggaagccacatgcacaaggaaagaatcggaaccatctatcaagtcaaattcagccggaataaagccgcaataatttcctataactttgatattcacttccaagcagttaatgagactctaattctcttccgcaaaatcaataaagcctccaaacttatcaccgaccctcttaaacacctcctcgttccataaatgcaaggggaaattgcttagtttaatccagcctccgtaagagggaacaatcgacattctcccatgtttttttggatcccatctttccattttcaaagttaaaggacataggtagcccagcccttgttcattgagagaagatagatcagggcacttgagtagggccttgtcagtgtgaaacggattgataataaaggtattttgtatttgagcttgaaggacttccagaatcctctgccaatcattgtggaagtcgcgtttagtgacaaccagcgtatcctcccaacaaatctttctaactcttttttctcctttgctactaccttcttcatcagaatgactaggcataactcttggagattttccatattgagaacttcgcagagggtgaggaggttgagattggtttttcaatctggttccaaaaggaggtttttggattgttttcttctcagaattaggggccttaggttcgtcatcagcattaaaaaaatctagcagtaaatgcctgaatcgttcccagcctcttaaatcaataccagctggaacaactatgtttcctttttgtggaacaactatgttaagcgaatcacccttcctttgctattcaaatcaaattcgcaagagaagaatttgttttcgatttttgttgaggtccgtcttggagtcaccattgtcgtttagtgaagagataaccggaaaaggtagagcaatgagggcggaggttggagaggtaaacgaaaaaggtaaagcaatgagggcggaggatggcggaagaaggaagacgaagaaccggatgccatcagcacaataagcagcagcgagggaactctctctttctctctcatcgttctcaaggcaaccttttctcggcacacaatagcctccatttaatcctatttatttattttctgaataggtaacattacattaattgaagcatgtttaagttcagattcttgtgcaactaaaaaatatttgaagtctcatgcaagctagtaatattttaacactggtacattatgagaatcattagcaaacataagcaagaaggtccttcttctaggcatgccttttaattcttctagcacacttcttggtgggtcaggcaggtgataggatgcttatttcttcaaggaaagttgattgatatcttaacaaagcccttgtttcttttgtttattttcattaatttcttctgtctcatccattgaatctcgcgtttatgctgtaaaggagattgagcctcaagttttgaaaaacgctggttgcagtttattgtcacctgaaactgcaggatgcaaatttaagagatttgttttcatcctttcaccactgtttgccctctcagtatcctctcatttctgaaaaatcagtcacgtttcctacattttttgtttgtttagcaagtttttcactgatattcactacttcattctctgaaacttttatgccatggaaaaagactattagtttgggagtcctaatatgcttttcagatcctgatggtaggtaaattactggttaaaattgtgaaagtagagattattctgatacatagctttatgattcgtatattcttttgtgatttgagctttagtatcatttcattatatcaacaaaaccatcatgggttgggtctagtggtaaaaaggagacatagtcggattgaaatggttaaggggtcaaaaggttcaatccatgtgggccacttacctaggaattaatttcctttctgttttcttgacactcgaatattgtagggtcaggtgggttgtcttatgaaattagtcgaggtgcgtgtaagctggcttagacactcatgggtataaaaaaaagttatttcaaagaatttttttcccttttaaaaaaacgatatggagtgatttctctctttttgaatgatatgtttaatgtaaaccatggatgaactaaaatttatgagctagtgaatttcatctctaagaattgcacatatcagtctcgctcttgttctaatattctaatgtttaagtcttttcatttaaaggaaagaccattaattatttcttgttcccttacatgtcaggttttattggcaactggcggcggcgttttagttca

SEQ ID NO: 7572 - DNA, 7051 bp, Cucumis sativus
  Intron number 12 from transcript Cucsa.332770.1 (locus Cuc sa.332770) derived from phytozome v7.0 (chr-ID scaffold032 64; pos 577791 to 584841 reverse strand)
ccgatcaaccgagtttattggctcccaatattcaggtatgcctcttacactttctcacaatcaagttaactataccatacaaaatcttcaataagagggtttttttttccttcctcgaaagattcttctattcctttcttgccacatggacctgaatgctctagtaaaattctcccaaataagtttttgattttgattttttacttttctcatttctcatttcttatttttttttctcccttttggaaagagtgctctctaagggtatggaaaagaaaagtctttatatcttcgagaatagctatatgccaattaaaagatgaaatgagatagttcctaaaggtactggcaaatgtacttgataacataaggtcggtccatttaaaatgtgtggatttttccgtttttttcttaataagaatttaagttattatattaaagaagcaaggttatgttgggagatcagatgatatttgggttttattcctttctttaatctgagaagcactggtacgagatatggatacaatacaatgtggacacaacaacttctcatttctttaaattgaggacatcgacaaaggatacaataagggcacatttattaaaatatatatcgtttaaaatagatatcacttttatacgagaaggaaactaaaagttaatgaatgtatgcatttatatgttaaagaaatcattcttgtcaaatatatatatgctaaagaaatcatttgatgtgttttgctctacaaattgtttatttttatcatatgtgcctatttagtgtacttaacaagtgcttgatgcatgtttacaaatgttggacctactttggctttgtaaaactagtgtctgacacatctattgcactaacaagtgttcgttatgtgtccaacagatgttggagtctccaagtgtcagacacatgtcggacacaaaatcgttagtcaaactaaagtgttcatgctttctagtttttaatacttgcttgttcttaattttctatatagatagaaaattgctccttagtattcaactactgctatatagaaaatttctctttagtattcaactactgctatatagaaaatttctccttagtattcaactactgattcacagtaaaggacttgtgttttgattctcgaagaaaactctcctcaaagcgatcacttggatcaacattggttgctgctggtgaagacggaaaaactcttgttgataccgatcaaacgttcagaagagagagctttgtgtgctttgcttgttagttcacaacacaactattgatgccttttagagtactcttttcgagaaaaataaaggggaaggaatttccaaaagattgctcctacagttggccaagaatggagtactataacctgagaagaagtttcttatgattgtagaccatgaccaaggaaggcgaagcctcttcaagatggaccaagactggatgccaaactttgcacccactcttgcaatatagagcaaatcaataaggaaaaaggcctcaaacatgttttggacatttagagcttgtttagtaggcattctaaaaacaaaaagttgaaaacaagggattcaacgaacaccaaagttgtatttcatgttcttggatatgtgtttggtagtgttagaattagtgagcttggtccatggggagattgtgggagatttacccgaaatctttttccttttcttatctcattgtgtattctatttattctccgtcattgtatctattgtagcttatcaaaaaataataagaacaaaattattgtggtttttctctcgatactcggtttccatgtaagtcaatgttttgtatttttattgctttcaatatggtatcagagcaaagcaacaacgaaaccctagaaaatagtttaggagaaacctagaccgaactagaagccgttgctgtcgttgtcgccaccatggaaaaattactccaccagcttcaaaagctgccgacagtcactatgggctcaccctcattgtcatttgtgcagccaaacgatcataatcttcttcacgacaatgcctttgtcaggcgcgtgggcccacatgtcgctgttcgttcatttcaccatctagcccagtcttttctatgcgttgtcgcttgtccaatcgtcgcaccctttcggtcagtcataggcccacacgttgcctttgccctctggttactgccaaccaccatttgatccgtcaatccatgcgtcattttcgttttattcttcacaacagccctacttttgtattaacgaaattgaccaaatccttaacaaatcgggggttaaagttggcgagtcttcagtacattccaaaccaatcgagttgtcgatatattccaagaacatggtaatttcacttcctaatttgccttagaattatataactgactctgctgctgccttgagtgcttgatccttgacccatgataatgataagaatagttagaaaccaatccctgtatgcgagcactgcaagaaacagtagcacaccaagaatcagtgttgtaaactcctctaccgttcccgagaaacagaactcaggacgtgcctatgttagtaagactgccagcacctctcagtcaactggccctactgcaagccagaccagcccccctattcttggcgccattgttcagtcaggtatgtgtcaatcccttggccttattagtgtcgatgggaagaatccttgaattttaaacttggggcttacagatcacttgacatattctttggagcactgtctcttataccccatgtggtggtaatgaaaaaattcagatagccaatggcttttgagcccgaattgctggcataggacaaatagttctcttgacgatctctctctccagaatgttttgcatgtgtgtaagctttattacaatttgttatctatcactaagattactcatgagcaacactgtaaagctacttttgtacctgaatctgtttgttttcagaacttgagctcagggaggacgattggcactactcgacttagcaagggactttacatccttgatgatgatacctccagtagtagtttactgtcgtcctattttagcacttctgaacatgattgtatgttgtggcattttcgattgggatacccgaattttacttatatgaaatatttgttttcccatatattttctaaaattgatgtcttctctctatcttgtgatgtgtgtattcgggcaaaacaacatcgggttttatttccctcaaccatataaacccacacaactgtttggggtccatccaaggttaccacctcatctgggcaacagtggtttgtaactttcattcagatcatacctgtcttacctaggtctaccctatcaccgataaatttgaggtttcctctgttttccaaaacttctatcacactattgaaatgcaattccatacaaaaattgcaattcttcgaagtgataattgttgggaattccaaaaccatgaccttagtgagttcctaacctccaaggggattgttcaccaaaactcgtgcgcctacactcctgaacaaaataaggtgaccgagcgaaaaagactgttatcttctggaagtagcccgttcttttatgctatctacttcccttccttcatatctgtggggagatgctattctgacaacaacttatttaatcaatagaatgccttcttgtatcctctaccttcaaacttccttagattgtctgaggagttctacctttctgtttaatttctgaggttccttttcgtgtgtttggatgtaccgcttatgtccataatttcagtcctaatcagaccaaatttacccctcaaacttaggcacgtgtgtttgttgggtatccccttcatcagcgcagttataaatgttttcattcgtcgtctaggaaatactttgtcactatggatattactttctatgaggactaaccttactttcctattagccatcttcagggggagagtgtgagtgaagagtctaactgtaccttaaagtttattgaacctactccttgtatcgtgtctgactttgatcctcatcccttagtcctacctacaaactaagttccctggaaaacgtatttacaggaggaatctcagaaaggaagttgggtcccctactagtcagctgccagctccagtccaagactttgaacatccttgagatcaaggtatggaaaattctactgaaccttgtactaataataagatgagtgagaaggacaaatctgatgttgctgttcttgaaaatgtggaagaaaagaacaatggtaatgagactgaggttagagcaggaatcggtaataataaagctgaacatggtcatatagggaaacttgatgagtatgatccctcttgacattcccattgcgttgagaaaagataccaagtcctgtacaaaatatcccatttgtaactatgtttcctatgataatctctcttcacagttcagagcttttatagcaagccttgattctaccatattaccgtaaaatatcaatactgctttagagtgttctgaatagaagaatgctgtcatggaagaaatgaaggctcttgaaaagaatacaacttgggagatttgtgctctacccaagggccacaaaaccatgggatgcaaatgggtgttcattctcaaatacaaagaatatgaaacgcttgacaagcacaagacaaggttagttgcgaaggactcaatcctatggtgttgattattcagaaactttttctcccgttgtgaagttgaatactgctaaagtcctactatctgttgctgtaaacaaagattgacctctatactagctgaatgttaagaatgctttttctgaatggagacctagtggaggaagtctacatgagccccccgcctggatttgaatcccactttggtcagcagggtcgtaaactccagaaatccttatatggtctaaaacagccacccaacgtggtttgataagtttactacctttgtcaagtcccaagggtacagtcggggacatgatcatactttatttacaaaggtttccaagaccggaaagattatagttttgatagtgtatgttgatgacattgttttgttgggagatgatcaggtagatattggtaaactaaagcagagaatgggtggtgagtttgaaatcaaggatttaggaaatctgaaatattcccttggaatggaggtgacaagatctaaagaagacatctctgcgtctcagagaaaatacaaccttaatttgctaaccgagataggtatatggagatgtcgttatgaagacacttctattgaattcaattgtaaactacaaaactttgatgatcaagttccacttgataaagaacaatatcaatgccttatgggtaaattgatttacttatcccatactcatcctgatatttcctttgctgtgagtgttgtcagctagtttatgtaggctttctatgaggacacatgaaagctgtcaacagagtactgagatacttgaaaacgactcctggtaaagggttgatgtttataaagacagacataaagaccattgaggcatatactgactcagactgaacaagatctgttcttgacaggaaatctaccttcggttatggtacctttgtatgggacaatcttgtaacttggaggagtaagaagcagagtgttgtggctaggagtagcgttgaggccaaatactgggctatgagtttgggaatatgtgaggaaatttggctctagaaagtcctgtatgatattcatcatgagtgtgagacaccagtgaagctattctgtgataataaagtcgccattggtattgctaacaacccagttcaaccgatagaactaaacctgttgagattgatgaacatttcatcgaagaaagacttgacattgggtgcatatgcattctgtatatcccttcgagccaacaggttgttgaggttctcaccaaggggcttctcagaccaaacttcgatttttgtgttagcaagttggacctcgttgataattacttgagggggagtcttagaattagtgggcttggcccatagggagattatgggagatttaccataaatcttttttcttttttatctcattgtgtattatatttattctcccccattgtacctattgtaatttatcataaaataataagaacaaaaatatagtggtttttttccagatactcgggtttccatgtaagtcggtgtttcgtattttttttttctttcaaaggtagcatattaagaaatttgattccaattttgacaactggatttttgtggtcttggaggtttggccattttgtcttgcttggaactcttccttctagcttttccactaagttggtaactcaagttctatttcggatgattttcattgtggcttcagcttcggttaaagtttctcttcaaattattttgcttttctcttggttttcaggtactttaatcttcagaagtttcctgttgttttggagaggttttgtcttgtctttcgaggctcttttgtgtttattcagaggttttttttcattgttaggccctggggctgtttttttgcaagatttttctttggttatctcagcgttctctctgtgttttgtggcgttttatgtttcaagtttggttcaagccccaaactcttgcttttatgttctcattttgtttctaatcttgttttagttgtatcgttgaacatttgcccttttccatttattccatgaaaaaattgtttcttgttcaaaagaattgacatttcggaatttgtttttgttaaattaaaatatgtataatatgacatattctaaagtataggccagcttgcgcctaacccttgacacaaacggctccttgcacatccttctagccatgcatgttatatattttcacatttgaaacttctccaatctcataagatgaaaagagtcttcttatttatggaccatttttacttaaatagcagtacacactacttaatctgggttttactggtacttcagaaagatactgatgcattaacttttatatttctctaacatcaatatttatgacag

SEQ ID NO: 7573 - DNA, 3190 bp, Cucumis sativus
  Intron number 18 from transcript Cucsa.031940.9 (locus Cuc sa.031940) derived from phytozome v7.0 (chr-ID scaffold004 29; pos 1189607 to 1192796 reverse strand)
tccggaaaagccttattctcactgttagaaagcaggtcagtcttgtatttcgacacatgctcttatgataatgagatattacaagatatttcattccatgttgcataagtgcttctactctgtcatggtcctctggaaattccaaaatattcctttttctaaaatttgtgtgtggtttttttctccaactgtaccacttgatttcacttttttacgttattattattctagtcaaggataaatgtgaagcatcttcaatcaaaccttaaaatagatgataatgtgttaaggccttagccacagttttatttatcaactatggggaaggatttgagaactccaatctctccacacttctctaatgtgagtataccaaaatcatttagccaaaaagatacccttaccctcccattcaagacacttgagtaattgctcagagaaataacaaaatacttggccccactctaacaaacacattcctaagggcccacacaaatggaaaactaccaactaactctcaatcattctttcttcttcctattcttgtctctatgggaatacacctttactatgggggtctatcataatggtctcaagaatcagagaatcttcaaagatgctgtaatcctttcatcaaaaaacaatttttttaattttttgatgtttctcagagattcaatagtgaagctttcttaaaaagagcccaacaataagtattggtccccaagagctataaacaatctactcaatgagtttgaagttactttctaggcacaagcaaatgctatcttatacgaacacgaacaaaatagatatggaaaaaaactcaggaaaaggagccaaaactcccataaaacctaactagtgaccaaccttctcggaagagctcattaaatcctaaaaaaaaccctatgattcctctccaagatcacaacaacgtaagcagattgctacaaaatttggttcctatcacaagatggattctaaagaacctccctaatataatgatgttgaacacttaagaaagtaatcacaaatagatctgcgaatagacatctccaggaatgtggttcaggtccttgatgctctcctacgaagaaagcaccaatgtagcccctccgcaaaggataattgtttataacaaggtgtaggtgttcatttgtcaaagaaaattttcaggaaaaattacgagagaacccctaaaggatcactataacaaaaatgagaatctttaactcccagattcacagcagggtcacataatggaaaaagaagagccacagcctctttatttattggacaagggataagcagtactgctcatgacatggcaaattcatctgttcttttatgttggaacagtaacagatgaggaccaaaggtgaataaaaagagaccagaataggaattgttttctggatgattctagttttcttaagatattaaactcaatttttattaaaatacaaaggcttttagtccatacaggagagggaatgaagagatactagaggcattaagggagcgtaggggtgagaatgggaagaatgggtggcattgtacttctgagatatttagtggaggaagaatgcagattaaccaaaactttgttttgaaaggaaggacaagtgggagggatcacaacctcttaatacattttctgaagtttttcagtggtacaagggaaagagatgctgatgaaagttggtactgatgtaaaagggaagagtagaaagtcaatcatctaatttttctgtcttttagctggtatccttatgtaaaagaagaaagttgatgtcatatgaattggggaatcaataatcaccctatccttcatgtaattctctgtaaatagagagtctccctgttgtattgaatagattctcactagtaaaaagactctagatttggttcttagagaattagtccttgagattacttaggctacatcaaaagtaatttgggccttcggtacctctgccaaagtaaaaattgactagtcgttagtttatggtcaaagacagggcttgggagataaaggaccatgatgggggaggagttctttttttctttttttttgaaataaacgactttcattgagagaaaaattaaagaatacattgatgcacaaaaaacatgggaccccactacaggaagggagtctaaccatataaaatcaagagaataattacaaaaagtcttcaaaatcgaagcccaaggagaaacacgatacgggagaaccaaccaaatctctttactccccttttcaagtcccctaaacaccctcctattcctctcattccacaaaacccacaagatggcacaaacacatgcacgccaaagaaaccgacctctttccccacaaggcagattgaggaggaacttctcaatcatccctctaacatctctatgacgagcatgcgacaagccaaaagtctaaagaatgtcatcccaaacacgactctctagctcacaatgccaaaatcggtgatccaagtcttcctccgccttccgacacagaatacaacataaaggaccaactaacgaaggcaaaatcttggatggcttacgcaatgtattgaggcggccgtgaagaatctgtcaagaaaagaacctgacctttccccccacccaaaggtcttcccagaaatacgtctctcttccctcccccaccatacaccgaacccatgaaagaaagaccagggagctctttcgagacatctttcccttcactgaattgtcgaattttataattctctttggctgatctctttcaagtttcttgtcgctgttatacatgtttttggttagattagggaaaggggtattgctgacattagaaaggagttgggtttcattgctttcaagatattttgggattttttaatattttgttctctcaatagtagtactacttcaatttcacttgttcttaacccttatagttccttttgcttctaaatttgaaatcttaccatttgcatcaatatgttatgtatttcataaatacttcgtggagtcttttataaggacctcttgttttctcatttcttgtattgtttagcaatttcatcattgtcattcatagacttgataaatgtgcatttgtatgatatctgttgatgttctgagattaaatgttttacaactttcagataggagcttttgcagcacctgacaaaatccattg

SEQ ID NO: 7574 - DNA, 1226 bp, Cucumis sativus
  Intron number 1 from transcript Cucsa.016540.1 (locus Cucs a.016540) derived from phytozome v7.0 (chr-ID scaffold0022 7; pos 243530 to 244755 reverse strand)
gaattttgttgcagaaaaactacaaggaagatcaggcatatctctttttgtagtatcatttgacaagtttttgtagtttttcttcctcctattgaaaagagaaaagaaaagtttttttaataactcttgcttatttatttggtgtttttaaagatcttccttttttaaaaagtagtttttgttaagtatcccagaatttgaatctcttatcttaaatgaagaagtacgtgacataaaattaaactagtttttacatgagaaataattgcctgatggacctaaaatctttaaaattattatatgatatattaagtagtttttaaatccatacatcttcaaaaagttaagagtccaaactgatcgtgcagtttatatattagaaatggaatatatatattgattttattaactcctgacatcgaaagtataaattaagaaattaggattttaatctccattcggttttgtgattgttttcagtttttctccacttagtccaactctttaatttacttaaaatagattaaaatggtggtaagatgtcccaagaaaataaacgtaatttttaaaataaaaaaataaataaacattgaatagtaattaccaaacgaaatcgaggaagaatcctctttaatgggagaaagacacccaacttttcaatcacttctcctagggtgttgttaattaaagctttttattaactataatgcttgtttctatagttttgaatttccttcttacatatgtttgtatataagtcatgaataaagtattctttgtcgtctctaaaaactgagaacttttgttgattatcatttctaaacttagtacataatcagaaaaactcaagaaatgcatactatacagataattaataaatgttataaaatcaacaaatgaagataagaaaggaaaaacgtgaagagcacagaatagtaaatacaaagagtttacatgatttacagagggagagtcgtttattattagaaagaataactcatattaaaacattttccaaccattatagagtttgtggagtgcatttctctaaaccctaaagtcaactttgaagtagcagatttaagacactccgacgaaaggtaacaatacacggaatagaaatgtcaataaaacacgaacatatgatcaaatatttgttcttttttctgaatttgatgaagatttattaattattttgatgatgtagggaagagttgtagattaag

SEQ ID NO: 7575 - DNA, 3285 bp, Cucumis sativus
  Intron number 8 from transcript Cucsa.189450.2 (locus Cucs a.189450) derived from phytozome v7.0 (chr-ID scaffold0130 5; pos 219460 to 222744)
tgcgaattgtgagtcaactttttctctcgaatcctcctcatctctctggcaaaacatgatatctttattttgtatttaaaatctaatttagtacttacaatatgaaatgcaaaagaacaaatatttatgcatgccatggtggaactatgcaatttcattttaggtgtgattcatgtcccaatgcggatgcgccagattagtggtagtaggatgaaacttcttgcgttgatatggcttttcgtgtcatcaatgcagtggtttcttatatataagtatatatatcataaatggtcatggagtccatgcaagagggatactaaattctttttgtgggaagggttgatatggggaaagatgaccctcttgtgagtgtggaggtggtgggaaagtcagtgaatactgagagttcagaattaggaaatttaagggcttatagcaaagtctttttggctgaatggctttggtgattcctattgagtttgtttatcttttggtatatgattataacaagcaagtacgactcatccttttgagcggatgttgggtggggtcagaggcacctacaaaaacctacgaacaatgtctaatgaacttccattctctccacatatggttcattgttcttgaggtgacgggatggaaacatatttgggaggataactgggtagactagtccaatttggtttacatttcttcgttcacattgcttgagcactttgagaaatcgcatggtaggtgattcttttgctcttttcaagagctctccctcttcatcacttggattttgtagctttcatagttggtaggggagtgtaagattagattgtggagccttgaccctataggggcttttattatagctcattccttcatgttttgttgatatcatgtgctttctgtgcattcgtgttgtcctctttttggaatgtggaaatttcaaagaaggttagttctttgtttggcatactacccattgaaggttagttctttgtctggcatactacccatcaaaaagtaagcacttcagatgggagttgtgcaccttgatagggtcgttttgttgaattctttattgacaagcaaggaaaacctagatcatgttctctggagctgtacttttcctccgtttctttggaaatatgtttttactgagtttgacttctaggttgatatatagtaggtacaaagattacagggagatgatcaaggagtttatctgctattctccagttcaagattataggaggtttttggggtaagcaggggtttgtgcgaccttgtggggtttattggggagaaacaataatttttgtggcattgaaagggggtccatgtgtcatttggtccttgttaagttatttctttttgggcgtcattgacacaatctttttgtagttatatgttagcacttgtatattcttataacaagtatgttagctcttatattacttgaccaaagtccctcttaagcgggaactcctcttgtgggctttttcttggatgccctttgtacaaagtttggttctttattaggaaaaaaagctctcctgattttgaagagccacattataagagataaaataagcagatgatttacacttagaccaagtaaagcaacaaaagtaatccaagaaaacttcccaattatgcttcttttttacaagtattctttggtttctttcattctgaaggtccaaaataaaagcccacacaatgtgcagccacgtgatatgattcatctctcagaggagaaacttgactacttttggataatggtccttccatgtagcctttgcaaggataagatcacataagtcttcctctttgggcatattaaggaggagattttatggagaaagcaccattattttcagccaccctcacccatttttcctcttgggatgtgagttttgatctgaccaaacgatgatttttcaagatgaaaatttccatgtttcatttaaaaagaagacagtttcaataatgactaagagatcaaaagttcaatcatggagccttgaattatagccttgtacccaaacgctcgtaagctggctcggacagtcacgaatataaaaaaaatccatggtccattggcagaattgaagaggatcttccgggataagcatagaactgatgtctataacatcaatatgttttccccaaaaaaaaacattcttttcattgtcatactgcaaaatccatttggtgaagagagctccatttccaccatcaaatgtgaatgccaataccttcattgtccagggaaggatggcattttcctaatttacaatttggaggctagacacatctttatcacccctccaaagaaagtttctaaaattgttggagcagctttgtttggcatcaggaaaaaggagaagtaatgagtagggaggtttttgatagggtagctcagaggagagtaactcctgactttggaatggagaatgaggatcaaggtgatatttttttctcttttgttttttttctttttctcccaaaattttcgatgattgggactaaaagaagtgaactgatgaggcttgtttagaggagatctaaataagtgtctggccacttttcaacctgcaaccgagcctctgagcaacggattcaagcatagaaggcttcaaattcacctcaataacctctaattttttccaatttaagttcaaaccgaagttctccaaaattatggaaaacatcaaacaattttttgagagccccaaactcgtgagattaaaaaagaatcatgttgtctattaaatgaaggtgacaaatgaaaatggaccttcacccttcaccatagcctaattaaaccacctcttctgcttgaacataagcctactaaaccagttcacatcaatattgaaaagaaaagggggaatgggttacctcagattctgtcctaccctgaggccttccgtggataacaatagaaatttttgttaaatgagattcagcccttacccatataatcctagtggtgcctttttctgtctccttgttccaaaaccatttgtcattaagatcactttgcataagggaagcgttgaggatttgttgccctttaatcaatgctaattggaaaattcatattagtgtagggtggatttttaagtttttcaatcatttttgattgtatatgagatttataatataggttgaagtctattttaaatttcaaagcatttaaatttatttataccctacgtaatgtaatttcatttgttttgtatctacccagacggatcaaaagctgcgtgtgtgcgacatctgtgg

SEQ ID NO: 7576 - DNA, 125 bp, Cucumis sativus
  Intron number 5 from transcript Cucsa.002530.2 (locus Cucs a.002530) derived from phytozome v7.0 (chr-ID scaffold0003 3; pos 6899 to 7023)
aagcatttggtatggaattttatctataatctacttattaataatagtaaattatcatcagattcttatgattttagcatttgtgattagggaaaaacaaggaagcacttacggtttctcagagt

SEQ ID NO: 7577 - DNA, 1657 bp, Cucumis sativus
  Intron number 1 from transcript Cucsa.081310.3 (locus Cucs a.081310) derived from phytozome v7.0 (chr-ID scaffold0081 7; pos 161986 to 163642 reverse strand)
ccgtggttggccctgcttagattttttcgccaaaggtatatatatatatatatagatagatagatagatggatgtgcaatttaggttttttctttcccgatcgattttcgtttagtggttgattaatgcgggattgatgattgaaagtggtaatttttaggcgttggttgttctgttgcttgtattatgattgggaatttgtgttcttcgctgttatttcagagtgattgaatttttttgatgttcttctaaattggagaggtaaatcaacgtctttttgttttaatgctaaaaaaactactgcttcgttggtgcatatggattgggatgatacctgtgatagatttgatggtgtgtgaagatctaattcgaattgtttcaattgcagaacaatggtgtccttgtctattctttaaggttttataatgtaattagcaatctggtcttataaagatttggttgccaagttttttttcttgagttttatagttctgaagtgttgtagaagcctaccatagggtttcatttattgtgacaaggttttgtctttgaataatgttcacatttgctgagaaaggatgagtatatatgatcgatcagatttattatcttactgtcttgatattttggctgaatcttaattcagaatcataatttgcggttgcagtcaggatgtaaaacatgagagggaacactgtatgatatgtttatggtttatgttaactagttactagttacatgatttggtagttttgagttgtgattacttgaaattccaaatgattgattgttgtgcttttgataacacatttggattgcaattcatcaagcatttactaaattacacagaatatgaaatccttggtcatttgctctaacccccaacttcttgatctgttactttcactttatttaattccagtttctctttttcttgtgattaattaaaccttgttccagcggctgcttgagatggacatttgcagaaggaatttttttttttaccattaacttttctttttgtatacgacacacaacattgtttctaccattttgcaatttgtgtggccatgctagtcttcattgttaccagatgtccttaagggactatactttctctattgttgcctaacttttatctgtcgcccaatctatagcctgaataaacatattccactttttgtaattgtatagtttctcaacttttatgaattttgctctttctatcttggtctttcattgtttgtattgtctcagtgtattcatttatcttatctcattcaagtttgaatcttttttaaaaaaagtgtattcctacaagcctcatgcaatgattacagtaatgtaagcccagtatttcacaatcaagcgtgcaaagagatttgtgcttattgctcaattggtgatgagaataggaaccaaaatatttccatctgtttgagcggttaaattgattgaaatttcgtcttgacaactaagtttatttgcagaccatttagttttttttttttttaatttccatatgcatctaccaacattttgtactactaaattggtggaacaatgacatttttacttgaatgtagaatctatctctggaccaactcgattggctccagtagatactgagttggaaacctcaaacgagttggagatt

SEQ ID NO: 7578 - DNA, 512 bp, Cucumis sativus
  Intron number 7 from transcript Cucsa.228210.1 (locus Cucs a.228210) derived from phytozome v7.0 (chr-ID scaffold0193 3; pos 165202 to 165713 reverse strand)
tggactgagaactggcctgggtaatataatttttatcacttgatcgtttagtctgatttcattcttgactaagtagtttttcttattatgcacttctttaatataatacattctactttgtataattagttgtttttagtataatctgaaaatattaaaatattgaaatatttagaataatttaactgttaaagttaaccatactaaatgattaattcttactaataaaacagactgtaacttccacggatgtatttggattttatattttacttctagttttattattagtagtattatcaaagttgattgatatgaaatattatatgcaagcatctgaaatatttgtctcaaagatttatttaatgtctttttctggatgatctcccctcacgcaaatgaaacagaagaaattcacatattgctttctgctccatgctttattgatatagttatggcggtttccatattttccaggttcaaaacatttggagcaagggatcctcataggc

SEQ ID NO: 7579 - DNA, 7885 bp, Cucumis sativus
  Intron number 3 from transcript Cucsa.033900.1 (locus Cucs a.033900) derived from phytozome v7.0 (chr-ID scaffold0043 8; pos 447034 to 454918 reverse strand)
caagttggagtgaccagtgcaccattcaagtcaacgtatgtcctttctccaacttctttattgttatcgattgttgccattgatttttctattctgatttttctttatgcccatctgctctttatttttgctcaatattcaaaacctaagtagcacagtgggacccaaacaccacatgaacatggcaacatggcattttggttgggaagcagaagataatgtataaaatgtttatatattgttatactaatactcctatacagatacaaaatgcaaatttagtataaaaaaagatatactttactacaaacatacaacattaagtcaatgaactacatttgagatcttaaaagatatagaaagatttagttggctataactagaggaagaaggtgacttctaatactttaggatgaaacgatgtacaaggattcagttggtaagaaaatctctgttagtttcctgtgtccaacggtgtccaaattttttcaaaaaattgtctagttagataggctttttagcgtgttcgatgttttaaaacatgatgcgtaagcttggaggcggtatgaagcataagcctgatttcaaattaagaaaacacaattaaatcttaaaaataaatatattcttaacattgtaatattgcgtacatacacagaacatatcctttaattatgacaaagaaaaaaatctcaataattaatctggtaaagggaaaaatctcaatattccatctaaaagttggtaaaaaacttctctaaatcaaaagttgagaaaaatctaacctaaaagtttgactctggtgttgactgaagcgatttttatcacattattttgtactcatcactgactccctccaccaatggattatgtttatctttatcccccactttgtctttttgtgtgtttttaaattactatttggttggttttgatattaaaattcaattaataataattttcattgcctgtcagttcctcttcctaaaaattcaattaataatttttgttgttgacgccgtcggttctactttcgcccaagtttcaatgttcaagacgtgcttcatcctttatatgttagtctagtttaagatttggatctcttaagctaacctccttgctaaataacaagaccttgtaaattgagaggaatgggtacaattttgtaatacgattatgaagatctgatagagatatttaaacttgtcatcatgggatctcgttgtctaattattattattctcttaaaatttggaattagagaaaagggaggaaaaattgtgggagctgaacatgttttgagttcgttccaaaaataaacacagatttgctgttataacgtgcctgatagcaccgcaatgctattgagcagcattgtggtgcaatgccctaaaatttaagttcgtttttttaaaattaaactaaactaatctaaaataatatatgaaagcaattaaatatcttttacctagcagcctccaggcgcaaattcttaacatcagctgtttaacatgacttgtcccctaaaggtacaagaaattctcatatttcttttgcccttgcttacttgaattgatgtagcatttcaagcctactaaagattcctatttcttaagggagttgaacaggttgaatttgtatattttttccctttgggagaaggtaaaaggaatcaaaaggctcaagggactcaatcgagtccaaagaaactgaaataagaatgttcaaagatgtccaaaataccaaagagtagaatagggtgagctggtgagatttttcaacctctaactctcacttgaatcttaccggattttagctaatggttcttctgtctcacaacctgggaagcaagacatgagctccttgttcgtcaaggaacttctttttttgtagtacgcatgatggtcgctctgatagactcgccaatctctaaatggaattgccaactgggctacttggtcaaccataccttaggttttgttatctttcattacaggtgacctcggaaaacacaggagattgaaccataactatgactcaacttaatactcaaattaaacatgtcatcgttataattttggataatcagacacgcatagggtaggcgaacaaataaagcaagtatacaggacatacaagtatgcatgattaatgcgtgagtataatttatttagtatgctcactctagaaattcaagcaaggagtagaaaacatgaagatcagaaaaacccatgatcagcccacaaaattcataaacaaaagtgcctaacaaacttctaaatcaacatttggacctagttcgggcattgaagctcgaattctaatgccaaaatcttcgctacaagggtaaatacaaagaaatcatatgggttttgtgatagaacactgatgtagtgtttctattatattgataattcaaacacaacttacaataataagcgaaccgtgaacctcagaaaatgagtcatgatacagataactcacaaacatcaaacaaagtaaacctcctaatccaaaataccaaacaacacacagaacaaaatactaaaaagcaaaccagaacatcagtcttctgcttcctgtctttcaaggagtattgcagacctttcctttcactcagaaactgcccgtcctttcccatctctttctcattgatttagcttcctttttgatatatgtcatcttttttaattaactgtaggtggttcctcacgtgccttatttttctttcttctattataagtaaataacagtggtggtctaacactactctcctcctccaaatccaccttgtccttaaggtggaaatcaggaaattgctgttgaaaatcactacacacttacacttcccgtgtagcttcatgaggcggtaacccttccagctaatcaagatttcccggtccttagtattaggattcttttgataaccatattcttccgataatgtcatccatccgtgcttgtcatttaaataaggtactatttgatgcacctgcatatgatctcctaaaaccttcttcaactgtgacacatgaaaaacagggtgaattacagtgtgggtggaagttcccgtttataagctactgccccaattttctcaataattttgtatggcctgaaatatttaggagatagcttttcactcattttcttccttaaagaagtttgtttgtacggcctgagtttgagaaaaaccagatctcccagtccaaactcgacatcttttctttccaaatcagcataccttttcatcttttcttgggcaatgctgagttattccttcaagacacccaaaaatatatctcggtccttcagctgctgatctaaagcagaattgggcgtttccatattactataataaacggtggaggtagtcttccatatactgcttggaaaagagtcgtaccaagtgagctgtgatatgttttgtaccaaaactctacccaatgcagccagttgatccactctttcaatctctctccacaaaaacatctaagatattcttccaccccctattaacaactttaatctgtccatctgtttgcggatgataagctgtacttcggtggagtttagtactagccaatcgaaacaactcattccagaaatggctgacaaataccctatctcaatcagacacaatagatcttggatatccatgtagctttaccacctctttgacaaaaactacagctactgacttagctgtataagggtgtgagggccaaaaaatgagcatatttagtctatccaccaccacaaggataacttcatgtccagcagccttgggtaacccatctatgaaatccataaaatatcactccatatactgtcaggaatttctaatggcattaataacctttctggtgaaagagccaaagttttatttctttgacaaatcaaacattctgcacaatatttttttatgtcactcttcattccattccaatataattctcccgtgattcttttatacgtccttaaaagtccagaatgtcctcgaaacaccgaatcatggtatgtatgcaaaatagttggcaatagagatgaagttttggaaataactaacatgcccttaaactgcaacacaccttgatttaatgaaaaatttggaatatcagattggtgcttctccactgtgcttttaatctccttcaactttggatctctgtctatctcttcttgaataactgctaaatcaatcaatgttggggctgatatatgattaagatggactgttggagggacactagaaagagcatcagctgccttattctccaaacctaacttatatattacttcaaatgaataccccaataatttcgctatccatttctgatattgtggttgtatcatgctttggtcaggtagaaattttattgaccgttgaatgttgatctgtttttaccaaaaatttccttcacaacaaatatggttgccacctttgaacggcaaacactacaacaatcaactctctttcataaactggtcgtgatctatctcccatactcaaagttctactgaagtaagcaataggttttttagcctgtgtcaatattgccccaactccataccccgaagcatccgtctctatcttgaatggcaaattaaaatcaggcatagtcaatactggcgaagtcaccattgccatcttcaatttttcaaaggatttttcagcctcttcactccatttatagacacctgccttcaataactgagttaagggttcgacaattttaccataattctggacaaatcttctataataatcctaaaaatcctcgcatcactcaaacattagttggcgttgatcattcttgaatagctcttattttctcaggatcaacttccactccctctgctgaaatgatgtgccccaaataccctattcatgctgtggcaaactacatttcccaagatttgcataaagctcattagctcgaagaatttccagcaccaattctaagtgttgtaaatgttcttccaaacctctgctgtatacgagtatgtcatcaaagaagaccagcacaaacctcctcatatatggcctggagatggagttcattaaggcttgaaaagttgatggagcattggtgagcccaaacggcataactaagaacttatagtgccctacatgagttctaaaagttgtcttctccacatcttcttcattcatccgaatttggtgatatcccgatttgagatcaatctttaaaaacatattagctccattaagttcatcaaaaagctcttcaataactggaatagggaacttatctgggattgttacattgttcaacgctctataatcaacacaaaaacaccaactcctatctttctttattaccaacaacacgggactggaatatgggcttgtacttgttctaataattcccgaagctaatatctcatcaaccaattgctccatttcttctttctgttagtgtgcatatctatatggcagcacgttaactgcatctgtcccttgtttgagatgaatatggtgttcaatccctcgttttggtggtaatgtctcgggccaactacatacatcatcaaacttagttaacagggatggtagggaattatcaattgtaggtgtaatctcctcattgtacatttcttctatagataaattactgtgcaaggctcgacactctattaaataaccctaatcttcattattccaagtcttcatcatatgtttcaaactaacccttgtcttcattaagctaggatcacctttgattgtaatcttctttccattatgctgaaaagtcataactaacttccctccaatccacttcagttacacctaaagaatgtaatcactgcattccaagaatcacatccactcctcccaattctaaaggtaataaactatcaataaccttcccatcaccaatcaaaacttctactttgccacacacccttccctttgatggccgtctctgacccaaggatcactccataagttgtagttgttttcaaaggaagattcaatgcagtcaccaattttttaaatatgaaattgtgggtagctccacagtcaattaatactactacctcctcattcttcacttttcccttcactttcatggttccaggattgtctagacccgccactgagttgatagataactcaatgttgaaattttcaactgctcccacgtcaattggtttatcttccaattcttcatcatctggttcatcttcagtgatcttgtcaggctcccaaacacaaataactagtgaaagacccaacaatggctaaacagagtcggtactctgctatcttttatttatatataagccaaaatatcacaaacaacaagataaacgataacgaaagaaagaaatacccatataaacataccagccctctttacaagaaggatactaccctcttgcggctacaacagcctgccctctaaagaagattaaaaaataaaacctacccagcctattacaatatttcctatttatagttctcctaaaattccacccagtggggcccattcagcacgttctccttccccatcattctttcttattattagctggtgaattctcatttctgcccctcctcacatacgtatgtataattggtggcctaacagatctctaattcttctccattttttgcgcacaaccagcattctcaactccttttgttctttaattttacaacgatgcccaacataatatttctcttatctctactcacagaaccatcgtcttctttcgatgtcaatgctctttctcgaataataccttcaagatatttcataaccatctgctgttgtttttctatcattgcattcatattttcaatgttcttcgaaatcaaggttaattttcctccatcgctggaaattttttgaactctgttcgcatttccagaatttcctgctcaagaagttccaagctctcccttctttgccatgtttttttccaactgcccaggctatatgctctgataccaattggtagaacactcatgtagtgtttctattatattgataattcaaacacaacttacaataataagcaaaccgtgaacctcagaaaatgagtcatgatacagataattcacaaatatcaaagtaaacctcctaatccaaaataccaaacacacaaaacaaaatactaaaaagcaaagcagaatacagaacaccagtcttctgcttccctttctttcaaggagtattgcagaccttttctttcactcagaaacggccccgtcctttcccatctccctctcattgattcaacttcctttttgaaataactgtcatctttttttaattaactgtaggtggttcctcacgtgccttatttttctttcttccattataagtaaataacagtggtggcctaacattttgatcaaaatgaaatccgagtttaaagctctgaaaaatgtccaccaacccttgacacaaacccaagatatgtgtggtgttgtgtggaaaaagccttccccactgtagtaacactgcatcgggggcgatggatagctccacgacgctacactacattctgttaagctcctattagctccaaatcaactccaaattttccaaagtgctctggaatgcttgtaatatccaaattcctacaagtatagagatttgaagtcaatgaagaaggaagattagaggcactatgataactgatttagagactcactttctgaagatgcacataattcgaagattctatcacagcaaagaaactaattttttatttttttaaatagaaataaaactgttgtgtgtaggatattgagagcaactattgatattataaagatgtctttgattaattttgcaagtcaaaattctccacagaattcacatttttgctttgttgcaatgcaggc

SEQ ID NO: 7580 - DNA, 1151 bp, Cucumis sativus
  Intron number 1 from transcript Cucsa.010570.1 (locus Cucs a.010570) derived from phytozome v7.0 (chr-ID scaffold0015 4; pos 1650 to 2800)
ccgttgcccggtttcaggtacccccttttcccttaatttgggatcttcattcctgttgttcttgttgattttttagtgcttttataaatcttttgtagtgggggcttttgtttatcacttgcgattatttagttctgagtaattcttgttcttctctattattggctattgggtatctttttatcgaaaattggtagtttaaagtgaagattttgggatcgtacttgacttcttttatctatttcaatgttatagagaaagaatgttgagggattcaattcaatttacccacctctctctttctgatatttcctgtttttaatatttcaagtttcggatacagtttaccatcaataactcgtaattgaatttaaaattctcaatgcttaccttcctgaaggagagtctgcaccaagatcttttctgatatgtttgggactggttctaaaaaagttagtgtcattttcatcattcgaaaaatatttttattcattcaaaatcaagtttaatagtactaaaatgtgtttgaaattgtaaatttaaacactgaattgagtgtgagggagtaagagtgtgattttaaaacgatatgagtgattctaacaatttcaaaattactctcaaacatgaacttaattatttatgattggtgcactatgattgatttacttaggttttgctggatactaaaattgttttgagttttctgtttgtaagaagaaacctgtttgcttaccaatcatagacacattttagaaaatataagaagaagttttcagaaaaagagcataaaacataattaatatcaaatggggctttttacttgtatataataaaaactctgttttttttaaaaatgaaaagtctgttttgtttcaaagaactaaactctaggtgaccaaatcaaacgaatccaccatccatgcaaatcaaagtcaacactctgcagtcacttttgcagtttttcttcaagggttaaatggcaatgagttttggcattccctttacatggttaatttatcgtataagctaatgggcatatgctccatgcttgaaggtttgctcgtgatattaagttataatttggctaacctgttgtttaaaatacaatgccagaggctgctgggaaagaaagttatattcattactgg

SEQ ID NO: 7581 - DNA, 6550 bp, Cucumis sativus
  Intron number 2 from transcript Cucsa.078170.2 (locus Cucs a.078170) derived from phytozome v7.0 (chr-ID scaffold0079 3; pos 429154 to 435703 reverse strand)
tacgagaagaagctgaagcaattccgaaagcaaaagtatattcatcccttcattagacaatctttattttgactctatattcaattctgttcgcttcttttctcctgcatcgttatgtggaaacttaagaaattagatacaaactgttttaaaaataagttgacctaaaataaagaaaatattccatttgagagttttgacaaactgttagaacactggggagttgtgtttgtattgtattgatatgaacttcaacgattacaatatagaattgatgatctcaattctggaaataaaatgtagaaagtaagaacaatgcaaaaaactaagaacaaagacgaataagacttccctcactgcctttcctctctctcaaggaaacttgcagaaaccactcacaaaataactgattcaccctcctctcacttaccctccctctatttatatcaagttgtaaccacacttacacaataactactagtaacttcctatcttatccaattacccttatatctctaaccctatactaatctatgtatctaacataaaattatgaaaattgataactcaagagtcaagtcacagattcgtgaacaataaacagcccattcatcacttgcggtcacaagttcgaaccttagggtgagcttaatgcaaaagaaaaccttgttgtgcacaggctgtgcgtcttgcgcattgcttaccgtgcgcaggctgtgcgtccagcaccagcctcaacacaccactagcctctttgttcaccaaaatgcagacccatctcgcttagcttaccccgtcactcggccaagtaccaacttgtccagaaactcatttcttgtccagaaacataacccaactttggaaaatcgtaactaaaaatccacaactcttttcaagaaactttcttctataaagatgcttaaaaatgtcttaactttcttacctcaaaatttcagcttctaatttgaaaggatgtgctctgtagccctctggaagtgcaccttgcccagattcacccgaaagacatttcctcatttcttcaactcaaactcaaccctcctctgctcaaattcgtccgacaaccgtagtctaaaaactagactcggtttgtgatcttttgagagtaatttcagctaaaacgcacaagtgaatcgagagaaatgtccatctaaagtaacctatttatactgaaccctgcaaaacttttattgacacctcctactagccgaaatttaacttaagcatgcaaggacacttgtaaagtacttcattgactccacctcttcatcatctcacccaaccaaaacgcctattgttcttcaccaagccaaaatgccttatgtcaaacccttgctaacctttaagacttctcgcatgccatgcttctcgcccaacactaagccatccagccttctcgcctaacctcccaacacttaaaataacctctaaggaaagtctttcttgcctagccaaggatacattattagccgcccgtgataccatttaaaggttttctcgtctagtgtctttccaacatgccttagccacttagccaagcctaaacgcctaatgacactcctttagaagttttcttccttcttttggccatctacaccccaaaataacctccaaaacacctagcccttaagcctcaacactttagccaaaacttttcctctttttccataaccatgtcacacctttcatgacactttttatccttaacttcctaaaatacttagacttccaataacttcaatggacttacgttttactaagattcggggtttatagtggttggactagcattctcactcacatgggaagacgataaatttaggaacgaggttattagattctcagaatacatcagtacaagagtgttggatgttgtctctagggtagcctctgttatgatatatagttataacatgtcctttattgtaattgtacatagtgtctagggtttattttgttctctatataaatatgtaacttttctttaactcaagatgtataagaaatatacttctttgaattctagattacatggtatcagagccgttatggtttcgaatggtcattggcttcctcctccattaggcttaagtttaggttacctttcgctgaccgtttgtcgacaccatactgtaagaagtgccacctccgtctgtgcaagttgtctttgccgatcattgggaaacactgcgcgtgagcttcacgagccatcggaatatccttgcacatcacccacgtgccagcgcgtgagaactctgatttgacctccgtcttctaagcttgtctcgaacctctgtttcttatcagtctctgtcgttgggtctatcaaatagtattcgggtttgctgaaaattgaaggctacgccattgttttagggttttcttccaattttaccgtgatttgaattgattttttctttgtttgtgtgtactacaatcaatgtgtgacttcaatatggccgacataaaaaatttggtagtcaccaacgttattctcttagcctctaagatcacaaaacttaagttaaatggatctaattattacgaatggcgtcagaaaattttgttctattttagaaatactgatatggatgatcacatgaccgaagatcccccaaaagatgcaaagcagaagaaggattgggttcgtgatgatgcccgtttatatcttcatatcaaaaactccattgagagtgacataatttgattggttgatcactgtgagtctgttaaagaacttctggaatttttagattttctatattcaggtaaagagcaagtacataaaatgtttgaggtttgtatgcaattttttcgtgctgaacaaaaagttgagtttgtcaccagctactttatgcgacttaagaagataactgctgagcttggcttgttgttaccttttagtcctgatgttaaagcttaacgagagaagatggatgttatgatctttttgaattgactcttacctgaatttggaatggcaaaggcacaaattctctatgactctaagattccatcattagatgatgctttcactcgtgtccttttcattgaaagctagcaattgctccatttgagttagttcattctgatatttggggtccatgtctagttgtatcttaaacaggctttcgttattttgttacttttggtggcgatcattctcgtctagcttggttatatttaatgaaaaatcgttctgagttattatctcacttttgtgcctttcatactgaaataaaaaatcaatttaatgtctctctcaaaactttgtgcactgataatgcgggtgaatatttttctcattctcttggctcttacttgtgtgaacatagcattattcatcagtcttcatgtgctgatactccatctcaaaatggtgttgcaaaacgaaaaaataggcatttacttgaaactgtccatgctttatcgttttaaatgcatgtttcgaaaaccttttgagcagatgctgtttccacaacttatttttttattaatagaatacttcctctgttcttaatggtgagatttcccaccgtgttcttttttctgccaaaaatttgtttcctattgctcctaagatatttggttgtatctgttttgttcgtgacgttcgccctcatcatactaagttagatcccaaatccttgaagtgtatcttattgggttattcgcgagtttaaaaggggtatcgttgttattgtcctacccttaaaaggtatcttgtttcacctgatgtttcattttttgaggatacacctttttatttcatcaccatcgagttcatgtcaaggggaggatgacaatctttttatatatgaggttacctctcccacaccatcctcttccactgatacgcctcctttccgcccactgatttctcgagtctactcccgacgacttccaccacaagcttcagactcatgtcctccatcaatgcctccttcatcatgcaatccaaggccaagtgatgatcttcccattgctcttcgcaaaggtaaaagcaagtgtacttaccttgtttcttcctttgttttctatcaccacttgtctcccctcacatatgcttttgttacgtctcttgactacacatttgttcctaactttgttcatgaagctttgtctcatcctaactggcgaaatgcaatgattgaggagatgactgctttagagaataatggtacttgagatttggtatctcgtcctgcaggaaagaagaccattggttgtaattgggtgcttgctgtcaagatgaatcctgatggaacagtggctcgattgaaagctcgctttgttgccaaagcttatgctaaactgattattcagatacattttctccagttgccaaattaacttccatccgcctatttctttccatggctgctacccataaatggttattgcatcaacttgacattaagaatgcttttctgcatggtaatcttcaagaggaagtttatatagagcagccacctgggtttgttgctcagggggagagtgataaagtatgcaaccttcgataatctttgtatggtttgaaacagagtccttgtgcgtggtttggtaagtttagtcaaactcttgtatcctttggtatgcagaagagtacatctgatcattcagttttctatcgccgatttgataacggtatagttctacttgttgtatatgttgatgatattgttattactggaaattatgcatcgggtattttgtctctcaaaactttccttcatggttagttttatacgaaagatttgggccaattgaaatattttttgggcattgaagtaatgagaagcaagaaagatatttatttctcatcgaaaatatgtacttaatttgttgtttgaaacagaaaaattaggagccaaaccaagtggcactcctatgatcccaaatcaacaacttgttaaaggagatttatgtaaagatcctgagagatataggagattagttgggaagttgaactacttaatagtgactcgactagacattgcttattctgtaagtgtaaatgttgtaagttagttcatgtcttcccctacagcgagtcattgggctgcagtagagcagattttgtgttatctgaaagctgctcctggatgtgggatcttatacaaagatcatggacatacgagaattgaatgtttttctgatgctgattgggtgggatctcgtgaggatagaagatcaacttctggatattgtgtctttgtaggtggaaacttagtctcatggaagagtaagaaaaatagtatggattcaccaactattatctgagataggcttcagtattacagtgccagttaaattatggtgtgataatcaagctgcacttcacattgcatttaatccagtatttcgtgaacaaactaaacatattaaggtggattgtcacttcatttgtgagaaaatccaagatgggttggtgtccataggatatgtaatgactggagaacaattggaagatattctaactaaagctttaaatggaggaatgataagttatatgcgcaacaagctggacgtgattgacatatttgctccaacttgagggggagtgttatgatatatagttataacatatgtcctttattgtaattgtacatagtgtttagggtttattttgttctctatataattatgtaacttttctttgactcaagatgtagaagaaatatacttctctgaattctagattatagcctcaattgctacaatctgtttttgaagcccttctagttgttgttgagttattcccgaagaggaagtttgcacgttagggttggaatgtgctgaacattcaccaacgtcaaatgttgaatgaatttgaggattcttaacatcgagataataactaaggtcagtgggtggcagagcataccgatttgacagcagaagcggtggcggtcggctagaattaggtggcagaacatgaatcagggcatggggagcaatataggccacatgtgaaaaagagggttgcacagatgggatggtcggaactgtttgaggaagatggaccgacgcgtggaggtccggcagcggcacgtgagagggttttggcggtgtggacgatggtggaattgacaaattttccggcgttgtctggaggtggcggaaccattcgtacatgacagcaccgatccgagcatcgatgatgacattaaaactggtggctgtttcatttgtttgatttcatcactggttgtgttgtttagggtttttgttcaatgccccactctgataccatattgaaagtggagacaaaaaacctacaaatttatgtggaaacccgagtaccgggagaaaaaaccacgatattttttttcttattattttctgataaattttacaataggtacaagagggagaataaacacaaggaaattaaaaaggaaaagatttaagaattaagataaatatttccataatctttccataaataccctaaggcccaacccactaattccaaccttcaccaaactatgcagaaacttattgaagcatctctgaagcagcagaagag

SEQ ID NO: 7582 - DNA, 2221 bp, Cucumis sativus
  Intron number 1 from transcript Cucsa.283200.6 (locus Cucs a.283200) derived from phytozome v7.0 (chr-ID scaffold0265 3; pos 410969 to 413189 reverse strand)
gattctgtatctgcgctgtgcttctgactacgtacgtatgtctttttctgctttccttcactcttcttctttatcttttgaagcttttaggggaattgatttgtgggtttgttgtttttagttctttctattcgtgtttcctttctttatttaagtagttgtgagtgaaagtatgattatgttagtttctggtggtttgagttttattttctgcagttgctcaaaatggaatactcttactatatttgtcgtggacgccgtcctaatggtgaatagccagttagaaaggtttaaagcggttctttaaatcatatgggtttatgatgataacttttttcatccgtgtttaatcattgttttaaattactatattttcatcatcacacgagcttactttttcaatagtgttcgcttttctctctcttttatccccctaaagttgggtctactttagtaatgcgcttatacttatagctaaagtgaaggcaaaagttttatcgatttataaaattacagatggatgctaaagtgggttctaggctagagtattttggattttttttgcattggaacgatgagagagaaagacaaagggggtgccctgttgacaccatacattttcatatttatactattctacatcatgatttttgtgtcactgggttgtggaggttttaagttcttgattatagcttgattcaaatggcatattggtgttagttgagtgatgtaaatttaaattgctttctgttgcatggtgatgaagaaactgctagttgatctccatcagaatgttaagcagcatcttcaaagaagacatcaaatttaaaagctttctgtcaaatcacaatgttgttagtaaactgctcttgacgctagtggaattgatgtgggaaatttattcctctagatggctgtttgaatagctacgagctttctttcaacaagtattactttccgtcttaaatgattggagtgattagagagtctttttgactttaaactttacatgtcagaggatgtttttattagaaatggaatgacgagagggatgtcaatgtcaataataaggctccttgtagggttgattccttatgtttggcaaaggggatagatctcacatgcttcaatgaaacgttttcttgttcactttacctaacggccctttttgtgttccttactttttgaccgaagtatgttggtctgacttggctgcatgctgtgatggaatttcccaatgggactacttaaaacttcattgcattagtggtggataaactattttcttggtagcttgtttaaggattggactttggatgtttttcaataggggatttaatgattgcatttttttcttatcatgcatgccaatgcttcagtacgtgtagtttagtatgcaatgaatgattgattcgttctcaaaaagattgttggtcacctcgttgatgtgcctgtgatttgcttcctattattttggtgtgcgttctttatatctattgttggtaggtcttggtctttcctccccatgtcattcaacagaatcattctttctatctctttcttctcttctgttctcgaggaatttatgttaaaaaattgtttcgctacattccttcatatcatttcaggaatattagcttgcccatggttagattaatgcctccttgattgaaatccacctcaacaacctttatcttattgccaacacaccattcctcagcttctccttcatcatctctctctctaactccattttttattttttaaatctatgtaaaaaagaaaacatatgaaatttacaaggagaggattgccatggagtttttccattaacatggtaaaaaaaagcctctgacaaataatctttattgtcagagattctttgttttccttctggctaaagattccaaaagaaagccctcaaaagcttttttgttcatccatttttacgtctttataatttgtgatactctgctcgttgtgtgttaattgaatgatgtttgctctattggttctcattctctgaatatgtatatgtttgctctattggttttcattgtctgagtatgttgcccatgtatcagttctgtgtaattttttttttttttgcccctctaaaagttagcttatagctcaggaattgttgtagtgtcttttatggatgccaatggtttgccatcatgttttgcagtaggaaaatttgaccttttcagtacaatct

SEQ ID NO: 7583 - DNA, 1927 bp, Cucumis sativus
  Intron number 11 from transcript Cucsa.077890.1 (locus Cuc sa.077890) derived from phytozome v7.0 (chr-ID scaffold007 93; pos 38888 to 40814)
gagtaagtgaatgttgttcttcacttttagaatattttgatgctttgagtcccatgttcattttggggctcttctatgttgattcttgcctcatctgtcaagttaattctgctcaagtgtcttgctcatagacgaagtttgtgctgcattagtaatagttggatttattttcttgattattctcattgttttagataacaagtccattgcatgctatagcctaattctcaatcctgtaaaatatttgctagtatatgttattatttaagaggatgaaaagggaaatgtcttctaaatttcattgatttaaaatcccaaacagtccattgaattgaactttttttatactaaaatgaaacactgactttttcactgattgaatgaaaagagactaatgctcaagatacaaaatatagaaaaacaaatatagcaattacaaccattacgatcaaatacaaccaaaagtagaagacgtaactctaaacaaattgatttcaaactaaaaaaccaaatagcagcaaatcgtgaaatgttcgaatgattctaccaaaatgaaactcctcaatctttacaaacacaaaacaattaagggacaacttcttaaagactccaacctaactggaaactgttagccttaaacgagatgtaaaaatcccactggaaataagaaaggagaaacaatgcccaaaaatactactcctgaaaggcatgccaaatctccagatcagtaaatggggtttctaatgcaagagcctgatctatagttctagagcccaattgtcaatggctggaggtgatctgttacccagtcgtttggtgcacagatctctatataagtcaagaaactcaattttaatatcacagtcatctgctaagctttgcccctgtctagatagcagctccacaatcatatcttttctttctcttccaaaacgataggaactgatgaaagaatctactgttttcatccccctccttggcccatttcattttacgcttctgtctccatcgaatttcatctccgtaggataggtcaatgagttacgattataagtaggttctcctctgttgttcgttgggattgaggctgtgggatcgagccgaaggaataccaaaaacttgaagaatatgaaaaattgatggaagctttaagcaaaataatagaataagggcccaagggatggagaaacaatcttttgggacaaaataacttcggaaggcctttgaatttattttccatatcttagatttagtttgggctggttctggtgtaattgaacgtagcaaaaactttgctgattgacattaatgtgagcttagagaaagttaggagttggtaatgtaattggttgacatgctatgcttaccttctgttcattcttgtgataaaaggaaaaaacaattgctagttatatggaaaactttcaaactaaaatttaccatataagtagcagtttttttctctggttaacattggttcaaagtcctctggttagatacttgtttgctgttatccttggtgagtacggaagtcaaagttgctgcactctaggtacttatttttgtatttagtttgaagagaatgttgttaattattgtgtttaatcttggtgcattggagatatcattaattttactcactgggctactcattcttcattgggaagacctttgaaaggagtgaagatttaattaattttttgccaatttgttccatgattaggttcttgataattgggatggatattctttactgtgttcattaatggttgtagatggctgtaattgctttatttttgtttcattgtactttgagtgttactctcttttgattctatgaaatgtcttgtttcctttaacttctttcactaattatgttatctttgtcgtaggtattgtgaagaaaggcctttacttttgggcaaca

SEQ ID NO: 7584 - DNA, 1861 bp, Cucumis sativus
  Intron number 6 from transcript Cucsa.312520.3 (locus Cucs a.312520) derived from phytozome v7.0 (chr-ID scaffold0299 5; pos 1920395 to 1922255 reverse strand)
tgactgaggggaacaacaagtcaagattctggctggttcattctgcagtctctttacctagtattgctataatttttttggttactacacattttttcttgaaacaattcactaatggaagtcaaaccgaacgcagtaatagtagcctagtaggtgtttttaacttgattgagtgagttgcaacatttcgaggcaggaagcttaatttacctctaaaactatttcttgttgtagagagagagagagagcgatagtacaaatttgatataggaaagtttctttggcagacaaagcaaaacgaaggatttcatgatgaaacttgaaatagcatagctcttaggattttatacttataaattatattctacatatatgaaaccatgttagacaattaaataagtcaatgattgttaactacgatgggataggttggcctagtgatgaataggggcaatgtaaatacttaaagggcttagaaggaatgaggttaagtaccattgcatctaaaaagcacaactatgggtacaagactcatatctggcacaacacacgaatacaatgacatgataataaacacgaacacttcactttcgctagcatgtttgtgttggacaattctcagacacgtatcaaacactttttagtgcaataggtgtgttagacactagttgtgcaaagtcaaaatagaaccaatatttggtagacatgcatcaaacacttctcacatacaccaagccaacacatatatgacacaaataataaaatttgagagcaaaatgtatccaattaattttttaagcgaggacatgaatcaactcattgactttgaatctccttcatttttaaatattattatatttttaaaatgtttgttttaataaacgtgttcttgtcatatctgtgtcttaaatttttttaaatgatgtgttatgtcgatgttgatgtgacatgcggcttagatgacatgccttttttaaaaaatgtaggacatagccacacaaaccctcaacaacacacattttgtctaaatatacattctcaagaaaatatatatagatgaagaaaactcaaagtcaacaagtttatgcacttgtatgctttaatgaggagtttgatgtatttatcttttaaaattcattgtttttttttcctatacttttacttttctatttaatatgcttaacatgtactcaatatgtgtccagcaaatgttagactcatattggctttgtacacctaaggtttaacacatatctactgtggtaacaagtgtccaactcatgtccaacaagtgtggagtgaccaagtgtcttacacaaacatgttacccaaactaatttgtttgtgttttttaggtagctacctacttggattgaatattttacgagttactttggcaaccaaacataatagggtaaaacattgtcatgtgagtatattcgagatgcctgcaaggtggcatagacacttttagattatgaaaagaaaatgagagtaataagttaatgattatgtaaagaagatcaagctgttgaataatttagtgcagtagaaattttcataatattcccagcatcaaaattaatttcctgttcttttttttcttgggatgtttacttgaatctattgacttggtcctcagaattaactttatttccagtaattgagaatcaacatctgcaagtccgtaaatccatatttgaacctttgagcaactgtaaatgtgctgacaagttcaaatgctaataatctgtatgtcattttatcatgtatgcagaactctcattttcttcagtctttaatgaatggcttccttgaattggtaggttgagtttcgtgtttctttctcagctgattgcat

SEQ ID NO: 7585 - DNA, 2166 bp, Cucumis sativus
  Intron number 1 from transcript Cucsa.005060.1 (locus Cucs a.005060) derived from phytozome v7.0 (chr-ID scaffold0005 5; pos 162885 to 165050 reverse strand)
gtcgtcttcttggacgttttagagtgaattatcaggtattcctgttcacatgctgtatagctactatacttgaaagaagtgccttgtatgaatatatatatatatataattatttttatttttttgaaattggagacaaatcttttcattgcagaaaataaaaggagaataatgctcaaagtacatggaaacaataactacgtatacttctaccttaaaaaagtacatatacaaatataaaagaaatcctaaggcatcatcattctaaataaaaagactaagtttgatagacaaaagcattccaatttaagcataaatcttgatgaaggaagaatagggttaattgggtaatattctaggttaattctccttttacctcatttacaataaactctatagatatgagcctcttccctattgtatgagacatatcattctaataaaagattcacaagcttgattcttagaagattattccttgaggctactttgtctacattaattttggtaacagatcaaccgcctaaaccaacgttgactctgctgatggaagatcagagaactcttggtgatgccaattgcaagagggaccttttagtattgtgctcgttatcaaataacccacatatatttagagggtaccctttaaaatttgagataaaaaaaaaagaaaattaaagaattatcaagaattaatttttacagcccaagagaaacgttaaaggcctgaaattacttttttggttatagaacacgatcaagaaaggttgatccctattcacaaggaagttctcctttagaataggaaagctaagttgcaacctgttttttcttctctcattgtcttggcttcttaaaggctttcactgccttgttcttctggtttctttttgttggttatagtgggcatattctttgtattttctgttttatttctttgtatccttgtattcatagcattagtatcttttcattactgtaatggttctgttttcttttaaaaaaataaataaaagtcaataaatcagttctatacctaccaggagattgaaatatactcaaggatccatcaaaatgtgtactttgatcatgtagtattgaagaaaataaaaaaacaacgaaaaaaaccctttaacgttctttgggaaaaacgatgcagaatatagataagttgtcagttaaagtaaataatcttgaaacagtgagaccatgcaaaaatcagaccaaatgaaaaggagagtgaagaaaaatgatggaaccgacacaaaatttccaagcaaagaaggaacgtgttaaagatggagctaccaaattgggtaatgatgtaggcagggacgaacaagacgtgataaaagatggagttgatttgcacaaaaaaatgcaattgaagaaagcaaaaggttcggtggaggaaagagcgtgattgaaaaaggactctgatgtagtaggattaggaacaatcttctttattgattaggattatgatcagtttccttggattattaggatttggattagtttctttgactagttaagatttggattaggattggtttgttttaccattctctataaatagaggagttgtcttcttgtattggtaacttttgattcataataaagacttgatttgattcctggcggaagttcttttttatcgtttagattacatcaaactcaaagtgtaactaacttgcgttccatgctatgacctttttatccctcttgtactgatggatgatctggagtggatgcctaacaatttgtcagcaagcaactccatccattggctcaaatttgaacgttagattttgacaggatatatgttccgtagccactgaactactctttaattcatcgtacctgttatttttcttgctcttttttttttgaaaaggaaacaaactcatgcattaataaaaataggagcaatagcttagagtacaagagggttatacaatgagcaaatgctatgacagtagaacgagcttcttgtttctttgttgctctttgatgtatagattataagttttcccccaggatttggtcatctgttttttatgtctgatagatctatgattaacatggatattctaaattatcaaatacgaagctttcatatgactgcagctcacatttaaacgttgcagctgactgagcttgtca

SEQ ID NO: 7586 - DNA, 3719 bp, Cucumis sativus
  Intron number 1 from transcript Cucsa.238250.1 (locus Cucs a.238250) derived from phytozome v7.0 (chr-ID scaffold0202 3; pos 879206 to 882924 reverse strand)
ccttctctcaagggtatgtgtgtcttcccatccttctcttctttttactttcttttaatcattttttcttgttcttgactctacatcttcatcaatctcatcctcatcatcctcatcatcatcatttgttcatgtcaaagttattttcagggtggtattgtataatgttttattcatttcgattagtctaattaatcgtttgaattagtctaattaggtagaagtctaattaggtagcgcgaccgttacaaatatagccgtcctagttcatgcactagagataaaataaaatttagatctagttcttgaaatctatggtagaagaacctctagtggactcctcttgtttggcaaactagctcttgttagcaatcgacattttctaaagatatattctatcactaatagacattattattgatatctcgtgtgttgtgttgcgagtatgtatctacaactatccattaagacaatgagagacatgacctatattcatttgggtttctattattaccttgggttttttattttaataaataatatcatcatattcatttgggttttattatatattattattcgaaggtgagttttataatagatgttttttaatttgtttttgccatttttgagatgggattttggaatatattcctttttctgaaatgacttcaataatacgagtgtttgtgcctaaaaggtcaataattttgaatgtgacattaaataatatagttgaaaacaaatttcaatatatatatgttttgagggaacgaaattaaattctaatctacacttaagactctgtggtttataaatcatatcatgtcatatcatatatatatacaattttaattctatatgggttaatttcaattatctaatctaactttgtgaaagcatcttcttctgaaaagtaacccaaagtgataaaagttcactttttacatttaagattttaaaaagctcaattattggttttttgggaatctcaataccattcccaagatcacctcttttttcactaactttcacaatttgaaaaacaatattgtatttatttaaccattgagatttgatgagaaaatattacacttcaagtaatatttttaatatggcaaaaaacaacaacaacaataataaaaaggagtatatgggaatctttgagcacttggtaacatgacaacaagtttgtattatagttgcacacaacactaggccaaagaggaaccatgcatgtgagtcatctctatgtctcttccccatttctctttctcttttatcttttttgaatttttttgattttatgttcaatgttgctttctatatccagttctttattcattattgtaaattgttttcttcatctcctttccatttcaattattttgtggttcatattccattattctatgtagatatgtattatagatatttcaagttagttaatcctcaatcacgaatttgaacatgaaacttttaatcagttttttatagtcacaaactcgttttcatttttatggagtcttttagttaaaaataggtgaaaagaggttttattgtgagtgttggaccaaatttatgtttagaaattaaaaatatatgaataattgaatctaaaaagctgaacttaagaagattttattagaaaagaaaaaggaaaagaaaagaaaatcaagaaaacttttgattataaaatagaaaaggtgatgtgttcgagctttttctttgtaagaggaaaaaaacaaagagtaaaagagttatatgacagcttgataagttgtgacatttaaacaaataaaaatactttacaaaaaagttataataataataatataattttcaaaatatggataagacttgggaataaatccccacctgataattaccaaacaaaaacaaatgggtccctaataatttaaattcccatatataaaaaaaataaagaattccataaattcttatttaatgtcttttttcttttctacttctatttttcttccaattttagatctaatttttataaataaaaaactactttattccttaattataatttatattgaaatattttttaaaaaatcaaactaacacctaacatatatttatatatacccattgcaagggtgtttttctcaaatttttttagaaacaatttaataataaggagaaaatgtgaagtattcaataaagtcgaaaatgaaatgacttgatgaagctttgagaggtctacttgaggtttagaatagtagcaatcctctcgtggaagatgtgattaggcttttaaaaattactcaaaattttattataaaaagatcaatttaagttcataacttcttcaacttcacaattcatgcttgggtttttttagttgatttaagaaaatgaaaaaaaaattattggtttgtttggacgacatgtatggcatcatgtggtatagaataatcttcacatgatcaaagtggatcaatataatcaaataaattttaaaaaatcccaaaaaaagcaatttcagaattgcagcaaataaaatctgaattaaataaaaaaaaataaagaaagagtatttgtttgtttatttatttatttttctctctatctctctaagatttttgccgacaatggtgtattgtgtcagaagagaagaggaatattgtaaacatttgaccaacaaatatttttattaaaagtacatctcttctgtttgagacattgttttcattctatttttttcttttttttcttttttctatcacttttagagagagaaagtatatgatactttaaattaattaaaggcttctttttattattgttattaaaaaattgttattgtgtttgcaacttttgagatggagaaatctttttaaaagaaaattatgagcttcttctgagtggttttattaattaaaagtttagggtcagatgagtttagatccaaaatataattaaaaataaatcaattaaaatatgtaatgtgtgtgtgtgtgttgtataaaaagttgtgcaatcaaattttctaattagtagttcttgtgggtgggaatcgtggaattataatttgtattaataacacaattcatatttattatgtttaagttaatccaaaaaagtttaatcgtgaaattaagaaaatgtttataccaaaattgagttgttttaaactctaattttttttagttaaatatgtatattttagtcgtgaaactttacctttttatttcttcattcattgattcaattattgattgttgttgttatttaagaaaagaaacttgatctatttttaacattgctcttcactttaaataatatgttccatcttttgtctttctgttttatttttactcaaacaaaggtgaagattgaagaaagtattttgtcaatgagtgagtcttgggtttggatgtcctctcaatttttgccttaaattttaaagaatcaatactcctgttgtattttagaaacaattttttaaagttcatgattattatttatattttaaaaaaagtatatgggtaatttttaactttagacatagtatcatgatagatggtctagaaaattattatattcaaatttgtaacgttatttccttccaaaagtggaagaaagtataaaatgatataatgttaaatttactttttatctatcagcttaagttttatgggcatattttgataggtggagtatccagtagacgagtcatacacggcaga

SEQ ID NO: 7587 - DNA, 4226 bp, Cucumis sativus
  Intron number 7 from transcript Cucsa.051380.5 (locus Cucs a.051380) derived from phytozome v7.0 (chr-ID scaffold0055 7; pos 537372 to 541597 reverse strand)
tgacgttactgaagaattttttctccctgttcaaggtatttccattgattgctctctttttcttcttctttaaaagaaatgaacgcaaagaaatcacttttgatctttgaggattgacttatttgggagtgattttaaaatggttagaatcacttttctcattttaaaaattattatggaacatgtttttaaaattatactttaagtccaaataacttctcctatttgccatcacgagagcttctctaagccttttttttctcttccctttcttgtttgataagagtatgggggttgttgcacttttgcatgttagttagaggttagagcctttcgaaatgtgtcaaagtaaggtgtctaaactagagtattatttaacgcgtctaaaatcaaacaaaaagtgattttaaattaaaattaacataagtgatattgacaattttaaagtcactcctaaacatgtactttggcgcactttggttcttgatttaacaaactccacatgttagtcattaaattttagtgaagatatacttattaggtgtcacaccctgtactaagttaccctaccaaatctaggaaatgacatgatgactagtattcaattaaattatgaaatttatgttgggtaccaaatgtcaattgttgtttcgtggaagatcccactaccttgaaagcaaaattcgacgcaacctaggtgtaaattaggttgaaaacctaattttcatacgcctaattagacattcatcaagttcaatcctagtttgattagaacaatacaagatctaactgtttttttgcaagctaacttaacttattacttctaattgaattgcatataatttactaagagaattgtacataatcaaaataatcaaatgcatgaattaaagagagattgacacatacccaagttaagaaagtgtaccttagcctcccatccacatgtcgggtgataaggagatgttcgagtgcataaaactacactgaaaatttaagaaaatagaaaaaaggtttattagaatggctgaaatttgagatgtcacaacctaggcggcaaagacttcttttataaaaatgaagcggtgcagccaccctagagacaacaccacgacgttgatgaaactcaacgcgcacgtcagtggtcttcttcctcctcttccaaatctactaaaaagatgaaagcctatctttttccttttttttcttctgaatttaatccttttttcccctttctatatccccttgttcctttaatctttttattccgtttgatccgaaggagtagttttcttcttttaggtgctttccctttgaaatatccttttattcctttatttcgaatccttaagtttctcttgctgactttatcttaaacttccttaagtttctcttctttcccttaaaaccgctctgtggttccctcttgttgcaaagcccaattattatatttcataggatgaacgagtataaataatggaagggataaactctactatagttgaatcctccccacaccgtggtagaaagaaagaggtagagtgaagggacaaactaaagattcccaagaacaggcacattggatgacagggaatgaaggccaaggtaggtccaagagtaattctatcaaagaaaaggctataataggctagtatttgtaagacctatgaaccatggggcatatgcataccaatctggagcacctaactaagtatgcacggaggaactttatcggcctcaactgaataaccgctacatgggtctcgtcgctttgctcctctctagtctcattcaagggtccttagctctcgtattgtgagttttccactttgttcagttacgtgagtaagctcatctggccgtgtgtcatgaatctgattgagtcttatctcttgaaaaaagtagtagttgtgcagaagttgcctcatcttctataggttagggagctctctctctttagtaaggcaggtatatttcttaattaataacatatcttgtcccctcactcttcaagatgagaaaaggttccaacttgttgccaccgcattcacaagaaaataaggaaaactgcaggtcaaagcaaaggctacgtacactgtcgccgcctcctgctatctctcataggtaggttaggaagaagaaagcctatcctacaagaggaagaaaaagattaaagcaataagaggatataggaagataggctttcgtgcaaatagtaggttttagaagaggaaagcctatccatcaagagaaagcttagagaaggaacataaggaaggttttatatgagaggaagaaaaagaggacaaaagaactcctacgaagcggagagggatcagattctcaatattgtatacaaactcatattcccaattagagaatgatttgagtgccgtggcgctttgtagggtgccgctatgttgtaaggcaaaggatcaaatagccctttttcttcactcttttgtctcggttgatgcctctcgacttcaatttgacccaattaagtttcaaaatgacatcaacactgaattctaccttcaaattgcttaaaacctataaaatatccattaagatatccaaataagaacgaacgtaaaatcatggaatgatctcaaattaggctgagctagataacacatttttagtgctatcaatagacttataccttgttgatgttagaataattactttaaatctatattgaattgattaatcccatgatcattcataccaaattgttaagagtaacttactggattccgttgaaaggttaatgatgagtatactattgtcttcaaccaaaactccaaattcgaacgctcttggtgggatctctctagatgggataaagaaacattgctgcttatttttctggtatattggagaccatcgtccttagctctctttatgtactagttcaattatggttcccattaaatcttaatcaatctagaagtgagtttctacccatttggttcatattcaattatgaatctattctacccatttggttcatattcaattatgaatctagggccttgattaaatatatcacataatagggttcaatctaatgaattaacttaatgtggtaaattatttatccacatacatagtccccactttaattatatgtattattattatttaaatacgtctaatagttgaataataccatttttataatttctcaaacgtcctaagacccgtgatgataaaacatttcaccttttattcttctcacacacttctcttgatctggtgactgctctgaggtgccttcatttccttgtgcaacaggggttcttcatagtcttcttcaatgatctcccaaagatcttgagaaattataaaaatggttcatttgagaaatggcactgcaatactgaattttttaaaggtaattgaaaatgatggagaattgagctagagtttagaagggagagagaattatggagaaacttctccgagggttttgacactcacacttggagagcttttttagtttcttgctaacaggggtagataataccactacccctatatgtatacatttttttttcacattagtagggaaattgagagcttgatgaaatataagcgaagatcattttcatcattggtagaaggcttttttttttgggcgaatcgaaaagcaaatctatgaaaattttgttccaaataataaatatcatatcgtcgagataatagaatgagtttgtgtagttcttttacatcttcttctacctctccatgcactctctcctttccttctattctatgcataatggattaagatgactgcatagaaactttgagagcaccttttatcttccaacactttttaggttgagattaagaactttctgggaggtgtggagaaaaggagagagatatatagttttgttcttgtcatatcgaaaataccaagaagtgttgtgtatttttctagtcacttgcatatagctaaccaattaaaagtttgtcaaaagtgattatttttagcctaacagtaatattggcacttcgaggtcagaggtttgatcactttcattgtcagaggtttgatcactttcattcccaccgtctaacataagattgatttttaaaaaaatataaaataattagagctttgaaagttgaaagtatgaaatataaaataattagagctttgaaagttgaaagtatgaaataacaaagtgtatttccaaaatctcaggactaca

SEQ ID NO: 7588 - DNA, 4178 bp, Cucumis sativus
  Intron number 1 from transcript Cucsa.356840.1 (locus Cucs a.356840) derived from phytozome v7.0 (chr-ID scaffold0357 7; pos 1748509 to 1752686 reverse strand)
gaagttgaggtatgcccatatcttttttctctccacttgctttctttttaatacttaagtttttgtctggtatggacatgttcacaaattgctttagtttcttactccaagttcaaacactccacaaggagaactagtttcttactccaagttcaaacactccacaagcaaggagatcaaacttacctgaaatttcttggcatgcaaccctgagtaaaaaattgtaaaataatggtgatgggctttgtcatctaccagagaattttcattgatagaaaaccccaattcttcaaatatcaaaaactaatgtgttgtatcttgtttctctactttaaactcaatgtactgcactaaaaggacgtaaaagtccattctacccctaaattaaaggaattaaaactcaaacaaacatatatgggtccaataatagaatccaaaaaataaggtacgtttttccaaaagaaaataaattacaaagcttagttgattccatcatgtagcttcaattgactcaaattataaatcttctgatcaattgttgcttttgaatctgcgcaattgacttcacttcctcttgaatgtgagaattcgatggtaaaggtagttttgtttggctcttgaacgtgtaattgatcccaaaggtaacacaagggcgttctggataatatcatcttctccccttttgaaggattcgtcctcgaatcaagcttgttatctgcatcaaaaggagttaaagtcataatcattaaaagtagcactcacaccatatttacctttaatgatcaatcttgtaggcgttatcattgattttttttcttcacttgaaaaggtctatctcctttttggtttaacttcgaatctcgttgatgtggaaatcttttcattcgatggtgtaaaccaaacctccctccataaatatcatggacttttgatgttggttaatcttctcgatctttgcattttgtttctcaatcctttttttaacctcttcatggagctctagaattgtgttcaccttctcattggtttgaaaatttaccacctcgttggaaggaaaagacaacaagtcaataggtgttaaagggttaaaaccatacacaatctcaaacggtaaacatttagtgacaatatgaacaaccctgttgtatgcaaattcaataaatgatagaagatcctccctagttttggtatttttatctattagagccctaagcatagtcaccatcgtcctattgactacttcaatttgttcatcagtctaaggatgacacgtagtggagtgactaacttagtaccaaattttccccaaagtattttcaaaaaatgactgaagaatttcatatctctatcactaacaatgtttctaggaatgtcatgcaatttaactacatccttaaagaacaagtcggccacatatttcgcatcattagttttattacatgcaataaatgagccatgttgcttaatctgtcaaccaccacaaaaatgctatccttccctctcttaaatcgaggtaaacccaacacaaaatctattgaaatatctaaccaaggtccactaggagttggtgaaggcaaatacagtccatgtgcatgtggtttagatttagacttagcttccccaacacggtatatctctcacacatcttacatatatcatgtctcattctaggccactaaaaggttcactcaacatgtcatatgatttagtgatcccaaaatctcccatatggctttttaactaaaaactcctgagtagaactagtgagaatgcaaaacttagtcttcctaaacccatcaaatagcatataattagacacgacacatttttgcttgagattttcaacaataggtgcaaaataaatgtcttttgaatacaatactttaatatgttcaaatccaaacaacctagtgtgtagcatgtctgcaactacattttctttacctttcttataccatataacgtaaggaaaagtttcaatgaacttcaaccagtttgcatgtctcccattaaacttttgttggccttttaggtgtggtcagtatggacaacaaactcttttggctacaagtaatgttgccaagtttgtagtgctctcactaaggcataaaactccttgtcatatgtaggatagtttaaggcagttccattcaacttctcactgaagtacatcaacggtctttgatcctacattaaaatagctccagtttctattccattggcatcacactcaatttcaaatgttagttcaaaattagttaatacaagtaaagacgcattgcatatcttatctttcaaatcattaaaggcatggtcctcaaaccttcttaataagttcattaagtggtgcaaccatggaactaaaacctctaataaacctcctataaaagccaactaagccatgaaaacttataatttcactcacattcttaggtgtaggtcactccctaatttctgcaaccttctcagaatcaacttccactccatttttagaaactacaaaacctaggaagtttacctttttcatgcaaaaacaacactttttgagattaacataaagcttttccctccccttcaactacctatgagtctctatttgtagggctcgcaatattaacgatgtctggaattctcttaaggagcggttcatatataaagttgatatatggaggagtatttctcttcaaaggtggtagactgacccttgtgcagtcagtgttgaatagccttccttgctacatgttcttccttatgcaagccttaggtggcgtcatcaatagaatggaaaagatggtcagggaatttttctggattggggtcaactagcggactgcccaccttgttaagtggggcacttcttcctgcctaatctatggtggtcttggatttggggcccttggacaaaagaatattgctcttctcacaaaatggttgtggaggttctgtaaggaagacaatgctttgtggaggtgtataattatggccgtttacagcttggaggagaatggttggtctactaatgtgccaaataggggaaagtttaatagaccatgggctgatattttgaaacataaggagactttaaatttgtggcttttttgttgggagatgggaaaaatattagattttggacagatagttggtgtgaggctcaaccccattcgtagaaattcccagatgttttctcctcatctctgaataaggatgcttttattgctgattgttggtgaacagttagtcattcctggaatttggatcgggaatttggcaatgtagctgctattttggaatttcttcatccgtgagctccaataggtgatcgcagtagtcttaattggaagcttaatgcttttgcaaatttcactaggaagttgacctttcttaacttaactaaaaaatcttccactaccgccttacccttgaagcgcaacatttggaagattaaaatcccgaaaaggattaaattcttcttatggtccctagcttatattctcacccatctatgtgttgcctttgttttaataatgagaccttggaccacttattcctgcattgtgacttcattatgaaaggctggtctctgttgtacagagttttcagtctggatttttgtcttcccagcaagatcggtagtttgatgcttgaagggctcaatagcaaagtttttcatccgaaggagatgtgctactcgatcgcttttgcgatgcatttttggaatgagagaagtagtagaattttttaggataaatataattcttttggttgaatcaaatcttattttcttgaaataaacattttaaatacaaaaaattttaggttatgattttgaaaaataaaaatttatagaataaatcgactgtagatacaatttgggatatttttttaatctaacaattagtggctaattaaatttaaatttgttttgctatttttcctaacctaaacacatcttgctatttttcaaaataaaagtttaaaagatgctcttcaaattgatcttagtttattaacaaaagagtggcctctaaaaccttgtaatcatctcattgatcttgtttggaatacatgcattcttgttcacaacctgttttattaggcactttccaagtctctaacatgtctctccttcctctggtcttgtagaatcaccattccctggcgcagtcacccacacttgg

SEQ ID NO: 7589 - DNA, 858 bp, Cucumis sativus
  Intron number 2 from transcript Cucsa.397330.1 (locus Cucs a.397330) derived from phytozome v7.0 (chr-ID scaffold0414 6; pos 130428 to 131285 reverse strand)
ccttcaatatttcttggccctctttgaggtattctgagcttttttttttcaagttccaagatgatggttaaaatttaagtttctttctctgattatttgggaatgtaaattttgggtgaattttggattttcaactggatatgacgaccgtgttattgatttttgaatctggcgggctgtataatgtgctggattttgatatttcttattgtgaaccatggtttaccatcgaaaagcctggtctctttgtgaggtttgttttgtagctagatttcacgtgtccctttgggcttcaatttctaagctcttttgttactattctcttaggtaacattgttcttagttggaaccccttcctttagttggcttgttttggtagacttgttttttgtatgcccttgtattctttcatttctttttttccctcttaaaatgaaatgtaattatttggtgaatttctctaatctatgactggtggaaaatcaaaggagcagcttagattgttgtctgttaatttctgtttcataattgttaatatttaggatttttagctggctgtgatgactgagttattgatggttgaatctggcgggttatataatatgctggaatttgatatttcttattgtgaagcatagtgtacaattgaaaggcctggtctcttaggaatggttcaaacattattaatattgaatatgaatgaatacccttgcttttgccatctagtttatgtatatttttggctgtttttattttcttggtctgtaatggtcttattatctaaggttgtaaatttacaatttgaattggttattttttgtagctttgatattgttcgtgacacattaggcttggtga

SEQ ID NO: 7590 - DNA, 5670 bp, Cucumis sativus
  Intron number 2 from transcript Cucsa.076960.1 (locus Cucs a.076960) derived from phytozome v7.0 (chr-ID scaffold0079 1; pos 28108 to 33777 reverse strand)
cttaaacgacctcgtactgattgtaggcccgtttgtttattatgtttaatttgtcgtcacttcaaaccccttttctcaaatttgtgttcttttctccaattcggttctgtataatgattctcaagctagttcggtagtgaattttgatgggcttaattccgtaacgatatctggacaagtaatgaaattattctcgtactttttggtttggtttgatttgttgagttagctgtgaataatcagcgttcacacaaagtcattgaattcaggtttattctgataaagttgttcacaattgtgaatgaagaatgtacctcgaagtccgaattatctctcccccagcttcttgatgggtgttatgtagatcttcgaagtctgtcctttacggggcattagaacagtttgatggtccaatgcacttcatctgatagatgatacaaggcaattctcctttttatggttatagtggtggatgctttttttgtctttttgttctcccatttctttttgatatatgtgagtgtccgcgttagcttacatgcacctcaactagtctcattggacaacccctctgatttggtgtcaaggaaatttgtaggatattaaatcctagatgggtggctattatggattgaacccatcatctttaaccctttatcgaggctatgccccatatttactactaggccaaatctatggttgttacagaggtggatgtgcaaatcaagtttgtcaaaaagtagtagcaagggtcgcattaaaagttttaatgtcttcacgaattgaaacttggtgataatgctcttgttttcaactttagttggttttgaaattttacttcatattttgaaccttgttgaaaattcgtaggggatgataataaactttattaacccttcatacaacataaactttcacgatatcaaggaagaaaccattacaatgaatcttaatcgtgccagaggtagcttgtctttgtcatatatctgtatggtatgccatcttggggaaacctaaactattaattgttttggtcctcagtagtggagaaaattcattccactctgctcactaaatagaaggttgctgtacctctatgttgacaatctgtcaaagagagtcattatttgtgtgacttcataaattgtgagagaaggctttccaattatatctaatattttggaggtgttgaagatttctattgggagaaaaaagaagaaaaaaacatcgatgcatcttttcttcttttgtctttttgcaggtgcttgttaggaagatctctttttgttttgttttgttttttttttataagagaccaagagagtatttgcctccttgaaagcacccagaaaatcttcttggagtccattcaataaaaacaggtcagctcaaacagacactaagaatcgaaagtcgaaatcagctgtagaaaacaatggcgttctgagtgaaaaaggcaacggttttgaatttgtacaagcacaagtaacagtcaatttaagaaactagagatcaagaggaagaagactccacaggaacgaacggaaaatcttggtttccatggattctgtcagtttagaaactcaagtctgcggggatggatctaccagcattcaaaatccacttttgcagtgcatatagatagctgagcttcttcacaccaatcaggactctgttgctcgcaggcgctctggaagtcaatacaggcatttttcactcccaagtgcacctttgctggaactgctgcccttcagctggtgtccaagattatcaatccttttgaagtcaacaggtggctgtgctatagtgattctcagtatcgagaagttcctcggtatcttcaaagaaaaaagtcaccacatcagaaacaaaagttggattactctcatcttgcagctgcaaatactgaccatccagagaaccctcataaagtcttctatatactgaatccactgtctcacacctccattattatgagctagaagaagaagaaggatgtgatccagaaaaagttggggttgaagtagagagaatagagattgtagaaatgaaaatttgaagtgagggattttagtgaagaatggagaaatatgaagtgggttttgttttgtatcggcaagtggaagaagaaggagagttgaaagcaggtttttgaagagagtggatttggattggattggatttgaggatctttctcttcttcttacaaagataatcaaagcctccctccaccttctgctgccttgttgtttttccttttcttttctaggaagatctctttaatgtttttagtactccatggctttgctcagcaaagtgtctggggccttgtatcaattttttggtaatggtacgcattttcaagtgttagccaaaattcttcagttatttattgtaactgatccgcttttatgcttcttcccaagtagtttcttattgtgtttagacatttactgttttttttttttatcttttgttacttttgtttcctttacttctttgatctctcccttgtggagttttctatccagcattagtctctttcatttcattagcatttttttttcctaatgttaaaaagaaaaagttcacctttctcaatggtcttgcacttttgttcattggaaaaatgttcagcaatcaattatgctaatgaaagcatactagaggaagatgaggagttggaggttggggaatagtgtaatgttataaatgataggggaggtctatccaaatgcagtgctcatactagaatctaaactaagggtggatacacatgtaatagaaacactttggagctcgaggagattacagggatttaaaagttgagtattgggtgtttttgagaggcaaattgctgtatagtatgaaaggaagcaacaaagagttgaggaaggaatgaaatgaactggggaaactatttggctgctatgagggatagtggtttcttgggagagactttagtagtgagactagtaaagaaatcttcagtcggagcaacaattaaaagcatgttgaatttggataagttagtcttagttgatgacatcaccacgatcaaaatgaaataacgtgcctcagttgagttttagagatatttttgtgcagtctctagtggattggttgtgtgtcttaggagtgcttgacagctgtaacaaagccactttagccaaatggattttacgttttctccttgagcccaattctctatggtgtaggactattggaagtaaacatggtcctcgcccttttgagtggctgaataagggggttaaaggcacttactgtaatctgtggaaagatgtctagaaagagctccctgatcttcttttgtgggtttggtgtggtggtgggggtgggaagagatgtatttctgggaaaacctttgggtggggaatgaccgctatgtggattattccctagtttgtatgacttgtcttctttgaaaaatcattttgtggctgactttttggtttggaatgggaactcttgttctttcttctttgggttctgttgtgctcctcctgatagggaaacattggatgtggcagttttgattcctcttcttgagagccattctttctatctcgggaggagagatgtgagggtttggagttctcctttggagggatttttgtgtaagtctttcttttagtgtctagttaaccctatccccgtgggtgaatcggtcttttcttttgtttggaggactaaggtccttgaaaaagtctggttcttttcttggtaggttcttcatggccgtgccaatacgctggataggctgtccaggattttgccttcattagttggtcgtttcttttgtattttaccagaagacaaaggaagacttagatcacgttctttggcaatgtgagctggtgagtcatgcttgggataattttcttttagactttttgcttgttgtatggttgtcatagaaatgttagggatgatcgaggatatccttctcaattcgccttgtgggaaaggagactggtttctttggcgtgcttgtgtttatgccatattgtgggttttttgggatgagaggaatgggagggtgtttaggggagtcggaagggggagtggggagatttggtcggttattcggtatcatgtttcgctttgggcttcgatttcgaagaattttttgtaactatcctcttgaccatgattttatataggtgagcccccttcctgtagtggcggtcccttgttttttgtgggcttgggtttttgtgcgccgttttattctttcattttttttttcaatgaaagctgtttatttcaataaaaaaaagttccatcctattaatgaaatatctgtgttttattaaaagaaagggatggttaaaaaatttcaagagttgaagatttttgatcacttttaaatgcgtagggactgagggagcttgatgggaccatgcccttttagatgggagaactcttgggtgaaacatcaagaattttggaggagatagggagttaacaactaagtggacatttgggaaaatgatatcagttgctgcacactttgaaagggattataaaatgggatttggatacatttgaaactcttggtagcggagggagttgaaaacctaatcagcaaaatagataaaaaagggagaatgggtgcttggagcggagagctagagagacaaaaatcaatgcaatggcaattgcgtggcatcatcctcaatagggttttgctttgattcataaattttagttgttaaaataagatgatgttagaattttgataacagtaataatgtttgttgcttaagatttgttttttttctttaaattttgaagttcacttggttgttattacaagaagctttaggaacatatgccgggtataattaatatttgcatattatgatcccctaacttaatgatgtttagatacttccatgaagtttcttttgggcttgatccacatttgcgaacatattattggtgacaaactgacatcctacaataatcttgaagccttcatgaagagctattcacttggtttcataaactagaagttgaggttttttgggtttggatgaaaaatttcacttgagttacaaatggttctgtttaagacttcgattttctatttacttttgcttttacagaggtttcctgtccattgaacttaatattgaaagtgataaaccaacgaaaacaccgaattatgtggaaacttgagtaccgggagaaaaaacatgatatttctcttcttattattttctgatatttacaaaaggtacaagaggggggaataaatagaatagtacagtgagttaaaaaaggaaagatatttagggaagcccaccaactctaatacttaaagtagtgttatatagtatttggattgtgaggatgaagagattagatacataaacaattaatttaaatattatcattgtacgattgaactttctgtactcgttgacttgcttttcccttttaacatatcttttattacgttgctgatggcatctgtcctttgatgtgtggaatgagctctcttttccccacctcccccgcgatcttcccttattcttcttcttttgatcttcttagctgttttcctttttgtaaattggaaacagaattatgccctgctttcactctctgcagaacttccagcctctggattgtctaccggac

SEQ ID NO: 7591 - DNA, 1746 bp, Cucumis sativus
  Intron number 5 from transcript Cucsa.079910.1 (locus Cucs a.079910) derived from phytozome v7.0 (chr-ID scaffold0079 3; pos 2850347 to 2852092)
tacactacacagcagtgagtatatataggtttcctgttgtaaatatatactctcttttctctcttgtacttattacagttttgtgtcaacagttaccaaatcatcaatttctttatgagttacaacagataggtgtctcaagttatttaaaatattgtttaggacttaatatcttgtgatatattcttcatctgcaactgaacagttttccactggtgggagagctcactattacagacatgcttaacagctgatattgataatccatgtgtgcttgtctatttgttgcatttcagatccaatccttatttggttcagatttcttttttatttgattccaagacaattagcctactccacctcattctttgtattaaaagttcaagtaggacgttgatagcattttgtcattttgtactaaactatctagtgtttctcatagaaattgcattaggttgcttgttgttttgttcatggttgaatgtgcaacagtttgactggtcaatatcatattgtttctttgtgtattctcagtttttataggcataatccttattagacatccttttatgggattgttgcaatatgtaacaggataagggcgatgttcctacactttgggaagccatgaactgtgaaactttgttttatgatcctttcctaatgaggatctttagttctaattattatcaggcttttgcacatatttaagactaacctgttctcctgtgcaaaacagattttcctgttcatagttttcaaatgagttaaaaaattcctggtctcactttttctaggcattaccatcatatattactgtttgaggtggtcttttattgtacattaccgaatttcatgtgatgagatcaactttggttttaaaaaccgtagcactgttagcataatttagttcttgtaaggaattaaattctgttttaaacctttactatagaagttttcttcgttatggtgttgtaaaattagtggttaatgttgtttgagggttggcttgagtagttttggtgttaaagaacgggtttggtctttctttgtatccaaggatttgatgttaagctcttgtaaaaaaaaacagatttgattttaagctgtaaaactcacattttctgtaatatttaataacttgttttaattgctttctggatgttgtttgtgattaatttgcactttagctttgaaaattttctttctttagtaaaattgtttccttgttcaattggctagaacgcataaatacagtggttcatacattgcccaattcagaaaaaacatcttatgtcagtatacatcccgttttgcgttttctgcgtacatagtgacttccatgacaaaatcaccttgtggagtttctattatagcaaaaaagatatgtttcattaaaggagaggtggttagagtctcccctggccgagtgaagaaccttcaaggttctttgtaacatatggttaaggctactcacctctcggtggatcagtaacccgattacaggaaaaaatatttatgtactagaccttcatacaggaaaaaatatttatgtactagaccttcataaagttgtttctgtatccctgattccaaagcttattaaagcatcaacttgtagccttaactctggtctttgtatctgaacttttgaacctttcatttccaaggtcaatggtatttgctttcctttttatgttacttaaaaatttgttaaatattttctttgtttgtaggaactttatc

SEQ ID NO: 7592 - DNA, 2780 bp, Cucumis sativus
  Intron number 2 from transcript Cucsa.061610.1 (locus Cucs a.061610) derived from phytozome v7.0 (chr-ID scaffold0065 1; pos 100803 to 103582 reverse strand)
ctctcacaaccaggttagttcttcatccccgcatattcaattgattttgtcatttcacgggcttaaatgcaggtccaagcctttaactcctttagagtttgtttgttatctgatgaacacttaatccagttagaggttgattggtcattagctttttatccttgctatttattgcgttctttaactggattttacttttccatcctgtattcattgttttggcttttatgggttttacctaaggctttcaaatgatgcaaattgattagaatcaagctttcagatgtgataaatatataacaataaaactagaaatttttttcagcagatttaatgggtgacgcggacacatcacacacacatatattttttctcttcctaatgaagaacaaatttttctccttaatcatgatgtgatccaaatttgcaagaggaaaagtcctggaaaagaaagctttgattctagctgaatggaagaagattgaaatcatcaaattatatttctacgaagacactctatgcacactgcctagattttcataatactacaatagaaagccctttgatagcattctaagcattaaaaagtttgcagtctttatgaattaactttatctttatgaattatgagcagtgcccaaggaactcggttcttgattctgtggaaatctacaatactctatttgcaaaacaaaagcacaaacgtttaatatacgattctcgtcatgttatcccttttacatagaatgcatcgggcatcatggaggaaaattgaacaagaagtcctttgtttgcatcattggtgattaactttaagtagtttaataaaatacatgtggaaatttgtatggaggacgacccaaatttttggggagaaaatgaaatgtcttttatttatttatcttctattctttaactagggtttcccttaaggaagtatatggaatgcataattggtctcctttaaagagaaaaccttccaccaaatgataatctcgatcatggatatgagcagtacaatgactccaaatctcaccaaagtcttcatcagtctcatatagcattggaagatggttaaaggctgtaatttcagctgagagcataatgaggagagtctcttttctgcttaaggcatctgcaactccgttttctttccccgcttgatgcttgattaagaaatcaaatctttggatataagatacccatctggcatgcatcttgttaatgtttttttgtgcttggagatacttcaaggagaaatgatcagtgagcagcacaaactccttagataataagtaatgctcccactgttttaaggccctaacaagtgcataaagttcctgctcatatgtgctccagttttgccgagaatgactcaatttttcactaaagaattctaccggatgaccttcttgggaaaggacagcaccaattcccactccactggcgtctactgccactttaaaagggctgtcaaacttcggtaatttgaggactggttggctggcaagctttcttttgagggagtcaaaactgtgctgctgtttttctccccaataaaaggctcccttcttgaaataatgagtcataggagttgttatagaactaaagttcttaataaacgtcctgtaaagatgccaaccccataaaagcttgaatctcctttactgatttaggtatcggccatttagttacagcttccacctcgctttcatccatcttcacttgattttcagatataataaagcataggaaagatatttcttccgtgcagaaaatacatttcttcaaattagtgaacaacttactcttttgaagggcttcaaaaactagcttcaggtgctgcatatgatcttgttcattcttgctatagattaagatatcatcaaagtagactactacgaatttgtttaagaataaatgtagcacttggtgcatcaaccgcataaaggtacttggggcatttgataagccaaaaggcatcactaaccattcgaataacccctcattagtcttgaaggccgtcttccactcatctcctgaccgtattctaatttgatgatatctgcttcttaggtctacctttgaaaaaacaagagctcctccaagttgatcaaggagatcattaattcttggaatagggaagcgatacttgaccgtgattttgcagaagttggtatggtgtaaatccaagtatgttttctggaaattttctcttatcttcccaatgtggtgaagatgtttatttatactagaattttacagttgggtaattgcttagttgtaacaactttaacagcttttggttagttatctaggtggcctatttagttacatcatggtatgttggaagttgtggtcggccggagaagaagttggaaagaggaagaaagaaatcaatggcaagttcgtaacttcacttaccatgacgtcaacaggaggtcaattaacactgttttaaaaaagtgggacgtttttcattttggatttctaaaataggtcggtcgtgcaattattccagatacatggatcttagggtgaatccttaaaccaagtcaacatatgaaattatgagattagtgttttgaattggaaaaggaagttaccaatatttggactttggtattaatacgccaattttttctattattaatcttaacaataactttaatttgtgaggttgcttatattatctggattagttgtgtcatcattgctaaaataaaaatttgatacaattttctcattgttgtgctcattgacagagtgacagcgaatac

SEQ ID NO: 7593 - DNA, 1205 bp, Cucumis sativus
  Intron number 2 from transcript Cucsa.149960.1 (locus Cucs a.149960) derived from phytozome v7.0 (chr-ID scaffold0111 0; pos 925329 to 926533)
ggtggtaatctcaaaattattattctatttcccccttttttctaaaagtaatattatttctttattaaaatagaatttggtattccaacacatacttaaccccacattttttaattttttattcacatcacaaaatataatttaatacaattatcatattttgtttccatttcaattgataactcaatcttaaaatgagttgagttagtatgatatatcttttatttatcaaattttagatcgtgatcaaattcatgaacaacaattaggaatactttttatttttatttacattttatttatctatactactccaaagaatgtcttcttttaattgttattctaaaaaaataaaagaaaaaaatgtccacatttattctaggaatgattattggttataatatttttttaaaaaaatggtatgaaagcagattatttaaaattttaaaattacacaaaatctctcacatatgaattcaactgtgtatagttcaaacaaagacatatgaaattagacaaaacaactatgcacttttaacacaaacaagttataattgaattgtaatgattgatatttcaaacgattatttatagctacaattaattttagtagtaaactttttgtttctattttataacgtttactaagactttaggaataatgtttttttttggaaagtaacgacaaaatgaaggtagttagaaaagaaaatatacaaattgggtgtacaaaactatttttaaaaaatagattagtttgagatttggaagaaaatggtatatagaacacaacttccatttatgtagtcacaaatattttgactagtttgacagtcttcagccatgtgaagtgtaatagtttaaaacaaaactaattctctaaattaacccatatgatactttttagatttgaaatttggactctaagagaaagaataatatcaatgatattgaataatagtgagctctggaacttcaaatctatatattatgagtattctgcatacaacacatgtgttaaatataactaaaacaaaatttaaaaaaaaaccattaattatatagacttttggaatctttttgaattcatgtattatgtcaatcaaatactatacgaaccattgaattcttttgatttgagacttttgaaggcggggtttcaaattgcaggtgagaccatcagaggtggtgaaacttccaaagaa

SEQ ID NO: 7594 - DNA, 5674 bp, Cucumis sativus
  Intron number 4 from transcript Cucsa.323270.1 (locus Cucs a.323270) derived from phytozome v7.0 (chr-ID scaffold0308 0; pos 2718067 to 2723740)
ttcatagttttgaagccattactccacgaccgaaggtagcaagttattgccttgtttggaaaattattctcaagttggtggatatttcctactttgatatagaactatatgatgattattttcttttttgtattatattttattgtactagttgtattatatttgccaattttttttgcttctttgtagatgtgttgttcttctatttaagaaaacccttttctctttgtgaggtatactaaaaattacattctttggcatggtatcagagaaggtttttgaaaccctaaaaaaccctaaaactcttatagccctttgccagcgctagccatgtgttctgccccctcaaggtttgtcgttgccagtagttctactttgactgatcgccttgccgaccacaacttgtcggacgtctctagtacctgcattttcttgcgatttttgtttgtaagttggtttttttttgtttgccgttgtttgttgtggtccttgccggttacccctttctgagtcgtccgctgccaatgacaagattggtttgtgttttcagatctgttctctccgttttttttacctttgttgcttcaaccatgtcaaatactaagttacctatggctaaagtcgataattgtatccattccaatagccccactatccaaatcaccacaatgcgacttaatggagtcaactttcttcgttggtcacaaggtgttagactttatattcgtgaacaagggaaacttggcttcattatcagagagaaaactgcctcaaaaccaaacaacccattgtttgctgcattggatgttgaaaactcccatggttatgacttggcttgtaaactccatggttgaagacatcaactgtaattacatgtgctactctacgaccaaggaatcgtgggacagtgtgacacaaatgtactcttatttaggcaatcaatcacaagtttttgagttgaatctcaaactaggaagatataagccaaaaaagtaactcagtgacacaatactttcactccttcgaaaagatttggcgagacctagatctctttgattcatacgagtagaaatcgagttgaaatgtcaaattaggagatatacaccaaagtagtgtctgttctccttaagttaaagaaactataatgctttggtgtctgaaggctgatgaacaaccaaacctttcttgtatttggtgtatatgtctagatttgtaagccttctgacgccatagcattatagtttctttaaaataaggagaacagacactcctttggtggagatgccaatcattcaaggtttggttgttctcccataagaaggcttacaaatgttttgaccctccgaccagaaagtactttgagagtatgcatgtgtcttttttggagaatcaacccttttttttggccaaaattctctttaggggggagacctaatcttgaaagataatttttggaacacttcacttatcccaaacatcattgattatgaaattatgagttctaattctttgatgccaagtgtggagagttcttcttgtaggcagagaaacagtaccgactgacttgacaagtaaaaaactacgggtttacactagaagaaacttaactcaaaagaattgagaacagatggttgatctatcacaaaatcaatctaatacctcgataaatgattctaaagatccaggtaaaatacattctccttcttctaattctctcagtttttctcataatcccttatctgatgtctctgatcttgatatttccagttgcccataggaaaggtacttttaattttgtcaaatatcccattgcaaattgtctttcttatcttagattgtctgacagtcacaaagccttcacatccaaaataaccaacctgtttgttccaaggaatatacaggaggccttaagtaatttgaattggaaattagcagtgatggaagagatgaatgctctgaaacaacattgcacatgggacatagttgaactaaaaaaaaaagaaaacaattgaatgcaagtgggtgttcacggtgaaatgtaaagttggtggtgttgaaaggtacaaggccaaattggttgctaaggtgtttacttagacctagggagttgattatcaaaaaacatttgctctagttgctaaaatcaattctatcaaaattttgttgtctgttgcagttaactttgattgacccctttattaaatggatgttaaaaatatctttctcaattgggaacttgaagaagaggtatgtatggatgttccacccgggtttgaggtagatctcgaaattaacaaattgtgcaagttaaagagatcattctacactctcgaacaatctcttagagcatggtttgaaccctttgaaaaagcaggcacaagctatggattctattaaatcaccaattcacccaaaagcttaagctggtggttgaaggaaaatttaattatatatcactcatagattcaattaaagtcaagtcaatcatatgatgttttataaacatacagaaaatgataaggctgtagagtatactgatgatatcattctaccgtcaatgatgagacaagactggcgaagaaaaagttagtcgatgattttcagatcaaagacctaggaactttaaggtacttcttaggcatggagttcgtcaggtccaaaagtggcattcttgtccaccaaaggaagtatattcttaatatgctagaagagaagatttctttggtttcaaggtggcagaaactgcgattgagcagaatctgaaattggaagttgcaataaaaaatgagataaaagaaagagaaaagtaccagagacttgtgaagagactcgtatatctttccacacacattctgacatcgcttttgcagtcagtatggtaagttagttcatgcatggtcctaagttaactgactttgatgcagtttatagaaccctaagatgtttgataggtacttcagaaaaaggaatggccatctcaaaggtgaagttcacattgatgctgattgggcaggtagcacgatggatagaagatccacttttggttactgctcctttggtggaggatgttacttggcgaagtaaaaaacagagtgtttgcaagaagtagtagagaagcagaatttagagctttacctcatggtgtttgtgaggctatatggataagaagactgttggaagaattgaagttcactcagacaatgtgcatgcacatttactgtgataataaggcagcaatttccattgtccacaatacagtccttcacgacaagacaaaacatattgaagttgattctgaaagagtaacggctgtgttagaagctaagctaaaatagctgaaagagctaccttatttcaaaactctttcatagatggacttctcatagagtgggtaaaaactccatttccagtttatgtagaatgaaattatggattttctcctctaaatgaatatgatggaagcaacggtttgttctagagggaagttcatgccagcctattagcagtggcttagtataatggttagagagtccgtttgaagaaacagaaatctttctattaatcaactttggcaaatggaaactaaaaatcatcaggtcctgattccttcaaatgtgaattttttagaaaggatggggacaccaagaaagaacaaaattagagtgttccaagagtttttcaaacatggcattatcaatgaaaggacctagaccattagtgttggtgcactgtccctatgctatagagtatacagtccatgagtctcaaagccacctctttatcctctgccttattctaacagattttagagcgccatgatctctattttcaattgggtcgtggttctttctatcgatatatctaatttatcttattctagaggattatccattcaatggaggagactcttatgacatttgtagcctggagtagagttgtttagtcgtggtgcacacagcacagggagttaaattagtcatggaattgatgttttttagaaccccttgggttaaatctgtaaataagcaggaccttatggttgcacctcatgagagcctttttgtggttcgtttagatcgaatgcagtagacatttttttctttaataaaaaagggaaacaaagctttccattgaaataatgaactgagactaatgcgcaaatttacgaaagaatatacggaacataaagctataaaagacttgtcagtgtaagaatggtaaatcaaaaccagaccaagatatcaaataaaagaagagaaaataaaagattcacatgaaatgagacttctatgattgattgaattttgaagaaataaaaaaccagcttcttgaggcttaactatcaaccaatccatgaccctcttcaaaacatcaaaatcaaaatctaaagattaccaaaatctttcactaagctcaacaggctataaaatccaaccaagttgccaatagattcatggaacttggagcaaaatttccccaaaattatctcaaaacgagcccgataagcaattgaatgcccgaagaaatagctgtatcttcaatgacaaatttaatttcctcttatggcttaaaacacctttcacgttaaagccctacgaaggtggaagatccttttgtagttatacgaaattgccattacacaaatttacttaaacatagccttaaattatcctttcccttttttgttatttcatatatccaacaattgtttattttcatgatgaaataaatggttgcctttccaatttccaattatactataaatggaagacttagagatgaattttgggttttaagggtaactagacaaggagatctccctcctttcaactaaatattagtcatcacttttctccacaaagcagataattcatgaaaaagcctccaatcccattttccttttagtaccatttagcttctttttcaagcctcggatagcaagccagccagcttcaagcgattgagaagcaaattgtgaacaagccaaatggcttaatttgccatctgcattaccatctataaagaatttgctcagagcttttgggtggaaatagccttttaacctagcgcttcttgctaaaaggtgagatggatatgaatgttatgtataatataaaaagtttggaatgaatgaagagtttgagcttcaatattaacttgaatgaaatgccttctgagtcccaagttctctaaagatctctagaaaactgtatttggagtccaactagagatatctggacaagtactgtttgtaatttgacgttccaatgatgcactcaacaaagaaagagtgaaaacgagtcttttatgcaccccgattgttttagctccaggcaccgggtcaagtagagaagagcgatgaaagaaaagagaggaatggctaatccacgatcgtatctgcactgcataaaaaatgaagacgtaaaccatcttgtccttttgcttgatggccaatcagatctttctttaacgcaacaccctcttggtttccctttaaagaggctcagaatgcctcagttgttggtaaaggtgattaatcacattccacctctcaattgtagccctttttcttatcttgtatgatgatagaatagatgtatcgtactgttatgcttatcgaggtcttgtaaatggagctaaccgttattacttcacatgcaggtcaaagcatatt

SEQ ID NO: 7595 - DNA, 3888 bp, Cucumis sativus
  Intron number 1 from transcript Cucsa.266170.1 (locus Cucs a.266170) derived from phytozome v7.0 (chr-ID scaffold0235 2; pos 647609 to 651496)
cttcccaacgtggctacgcccttttcttcgataaggtacttcgtttttcctgcttcttcttctgattcacacgcaaatactgataaccattttgtgcagtgaagtgatattaaaagggcattgagtatctgttgttttaattcgaattcacatgcaaatactgataaccattttgtgaagtgaagtgatatcaaaagagcattatttgttgttttaatttggactgtaacactagttggagaacacttcgattcgtacttcccttgaaaaattctaaggtaccttcaacccataattctcgtacactaggacaatgactatagttgaagggggacccttgaaatcaggctaacgggccatcaaattttcctacaatattttacttctacttgaacttaatatggttttcatcttcgacacttctgttgggcagcacacactagtcaggatttttgagtctatagagaaacatggaacctaataacggaccaaacaattgtctaacaaataattattaacaaatgcctaacaaataaagacttttgagtctatagagaaacatgcaacctgataatggaccaaacatcacaagggtcactcttcactcctctaaggactctatttgttcccttactcccacaatccccacaaatgaagcacactcttctcgtcttgtctcaaaaacctccccttcttcttcttctttagaaaatgcagatggaagaggaactctttgatcctctccttgtattctgtgtcaggtcacctggaaacggaagatctcataaaaataactccaaattgatgacaagaaatcacaactccaaggtatacgatctaagtctccctttgccttttgacaaagaatacaacagaatggtttaatcaaagagagcaacttccttcaaaatagattttacttgttaatttgtttgtgggatcgcttgccaaatagaaaaccttcgttagaggaggaaggtttgaacaatctacaagagaacgagttacaagaaatcctaaacatcactgcaaacatgacaatctgctgtaaaaagggagaagaaatatatcgggattttgctcaaaattgaacatatgagggttcatttttctcctttagagaagaaacttttcctcttgcctccagaaaggaaggttttttgatatgccttctccatacactgttccactccctaccaacattgtttcattctctcggtcgggttcatctcaggaacactgaaaattttgtttttcttggggtcaatctcagccgagatcgacctcgagattcttcccaaattttaaaaacttgaaggaaatgtctcggtctctctcggtcgagtgtgtcaccgagatagtacgtttttttattaaaaatttgaaattgaggttaactcttctcgggccaaatttgccatgacagtcctcgagttgaatataaaagcatttaggttaactattcccaggccattgtggccccgagatggaccgagctgaaaaacaaaagcaattatgtcaatgatctcgggccaaagtttccccgagctaaagcattatgtagtatgatctcgggctaaggttacctcgagagagaccgagaaatttcctttaaagattttttataatttgggaaaaatctcgaggtcgatcttggtcgagattgaccttgagaatttttttttcagtggtcccaagatgcacccggtcgagagaatggaatagtgatagttgcttagtctatgccccaaacgtggagtggagtgcactccagtcccctcaagtctgagggccaaacacagactataagaactcataatataataatctacaccctcaaactcagactattataagtctaaactattatgaggcactcctcaccccaaacgcccccaagaatctagaatgaatggttttctggattatgtccaagaaggagaccccgatatgaggtagcaacaaactttacaatagattcgatgtggtgaatgggataatgaatacatttattttatttcatgtctgtagagagaggataattttgtcttctatttgaggttgaaatatacattcatttctggagggatagattctccttcatggtggatctcacttcttatgaagtccttctgataagaaaggataacaagagagtgagaaagaggaagaagaaagcaagatgactcaaagaaaaatttagtttttctttttaatttacattttccagtgatagttgtattgagcaggtaaatagttagctaataaaccataccgatgtattttttggggtccccatagttagcttaaggaacatggaatgggttgaaaactcgtctgaagcatgtatcttccagcgtaacctgttcctggtgctgtttaccacttagtcagtcagcagctaagctagaacaatatagctgccaatttctctatcaaaaagccttctcctcagccccaaatcccaatcttggtttagattacagcttccctacggtcaatcttatttggaagcaacaacatttctaaaaaggtgaaatattcctatggtcctttgcttacggaagtctgaatactcaagagaagctccaaaggaagttcccgaactgatctctttccccttctatgtcttgtctttgtttgagagagttggaaaccattgatcacttgttcttacattttgatttcacttctaaagggcggactgttcttaatacctttgggttggatagctgccttcctaagaagattgatgacttgatcatggatggtctaatggtagaagttttcttggaaaaggaaaaatcctttggagttatgctttctgagcgcttttatcgcatctttggatagaaaggaattataggacatttaaagataagtttactgattttgattcttttgggctgttgttcaacatacatcctcttggtggtgtacaaattacactaagttcttttgtagctacaacctccgtatgattattaacaattaggaggttcttcttgtatacatttgggtgtggggtggggggggggtacctcaaccactgcccccactaggttgttcttttgttcctcaagaggtttgtccttttgttttatgtaatatgttttcctactttcagcttataattttcaagtgctagatatttgtacttttgtattttctcagcttgatgtgtgcttgagttttctgatgtaactgtttcagtaagtcgtagtattcttggatatgatgagggtgcttggagggtgtcaatctagttgagatgtctcgcggctattgatccttagttttattgttctttgtatatccctcatgtacttagagctttatctctttgttattttctatttaataaagagatctgtttcctttttttaaaaaaaagtaatatattcctctgttccttatcccaaaaaaaaagaaacccataccaacataccttgttgaccagctctaacttttactttaaattgtataccttagcaatgaattgaaagatggattttttttagatttggttgtggaaattttttttccgagacttggaatgattatgttttcattatctatggtctacaatagatgtggaaaattcatggcatggttttagttttgggatgtatattactgttactgttagttcaatttcgaattatcatgtataagtgtttcagccagccaaaaggttctattttaaaaaatgtgaaaaaaatagtagtccggatgtatcatattctagttgttttttgtttgttgaatggtggccgcggaactgtggatgtttttttgatcatgaatgagaggtgaagtagttaccgccaacataaatttacattgtaatatgaatgttgagactaatcaagatgttgtgaacagctt

SEQ ID NO: 7596 - DNA, 1163 bp, Cucumis sativus
  Intron number 1 from transcript Cucsa.321690.1 (locus Cucs a.321690) derived from phytozome v7.0 (chr-ID scaffold0308 0; pos 1537127 to 1538289)
agctatccaccgatcatagtacgagcattgaagaagtaagattgactcttttccgcttatgatattttcagtaccatcattcttgttaatgtacttgctttgctattctttccttctactcatgtagattcattttttgtccatctttcttcaaattcctgcatgaaaaatttgttcagtccgtcttttgttaaggactttctgactcccaaaatgcacaaattggcaactctttttgcatgtagatgtgtcatttacaagtattttttggtggctagatttttttttatttggtctaaattttgtttgacattttttttgtaacaaacattcttattaatgaaagtagtattttcattaaaaagaagatatatcgtatgttggaaagtgggaactcaaaaaactagctttgggacagtacgatgggaactcttttggatttagatatatcatatgtcagaaaaggaggaactcagagaattagcattgatgttattataaaaaaatatttatattttccaaatttccaagacattggtctattttcctccttccctcgcttgccagtggatgatgcaccagagatcgaatagtttctaatcaattgtcgtctagtagccatttgaaacccctagcaaccatgtctggatttcttgcgctctgattaatcaaaacaaatgaacttctatttttttttctaattgtctggcatagttttagaaaattcattttaattttccttttcaaccacttttgctgatggctggaaatgaaacttctttctcaaattacgttttttggtcatctgaagtgcctgtggtcctggataattttagaagacctatttctgttcttgtttaaaagcttctttcaaattcattttctttacagttggtgtttcataggcactgatagtagtttattgtgtttgtttgcatttattcttattatcttttgctgtctgatttgtcttaatttgggttttgtagtaaaaaagccatacaataacagaatattttgtcttgcaggcataagtagatgtcatttctactaatacacaaatcttcgatcataaaatatgtcacacttattagttgatttattatttctctgcactcaaataagtttgatcatgccatgtcaggaagtaagaagaataaaga

SEQ ID NO: 7597 - DNA, 6104 bp, Cucumis sativus
  Intron number 9 from transcript Cucsa.050460.1 (locus Cucs a.050460) derived from phytozome v7.0 (chr-ID scaffold0055 5; pos 9387 to 15490 reverse strand)
gcagtggaaggaggtgctactattgttcaaataaggtttgcctaatgtcttgtataagttgatatataattttaagtcattacttcaaaatgcatggaattctttgttgcattttatatctcctctcaacacctcagttcaaaggttaaatggctttagaaattaacccataagtgtagtctggatgttccttgggtgctcattgggcgagcgatagtgaagttgtcatctagatttgaatatcttaggccttgaaccatgaaggtcgtgtttggtagccattttgtttttaaaaattgagtctataaacccttaactattttgacgaagaaagaacacaagatctacgtggaaccctagtacagggagaaaaaccacggaatagatgtcccttattattttttgatgataatgaaggtacaaaggggaaatatttataggcaacacgagcctaattaaaataataaaaaaactagggcaaagtaaatctcaactacgcttgggctttcaacatgacccaagcccactatttctaacactctccctcaagttgggatgtaagtttcggaaagatccaacatgctaacacatgattgaaagttttgtctaaggagcccctttgtgagtataacagtaatctgttgactcgagggtatgcaaacgctgacgaatttagtataggcccggggggctcaaaccccccctcaactttattgtctttatataatatgtataaacaaaaccaattaatgcttaatatttgtagacagtttagtggtaactatgcttgtccgccccccttccaactagatttcaagtctttcttatgtagtttttttcagatttttatttatcctctaagttacaactcgaagtcccctgttgataaattttttggatctgccactgtatgtaaaggatgtagatgctaccaatatctagtctctctaagtgtctgtcaatcttcacatgtttggttctgtcatgttggatcgggttattggcaatgctaatggctaccatgttatcgcagaataggctcataagcatctcttgattctgatgaagatcagaaaacaccttctaaagccagatttcttcatagatttccgaactcatagacctgtattcgacttcaacgctacttcgaaccataactccttgcttcttacttcttcaagtaacaagattgcccacacaaagatgcagtatcttgaggtgaattttctatcatcaatagaccctgcccagtcagagtcagtataggcctcaatacatcttctgtcagttttcctaaacctcaaccctttaccggagttgcttttatataccttagaattctattaatgcctccatgtggtcttcataaggagcctgcatgaactaactgatagtacttatagcataggagatgtcgggtctagtgtgagggaaataaatcagctttccctcaaggcgttgatatttctatttgtcaacaggaaacctgtcacctgaatttttgagtttgacattgaactcaattggcgtatcaacaagataacatcccgtcatacttgtcttagctaataaatcaaaggtgtactttctctggcctagcaacctccatctcaaggaagtattttagattccccaagtctttaatgtcaaactcatccctcatcttccttgttagttggatgatctcaatggtgtcatccccatacagtataatgtcatcaacatagatgatcaataatgcaattttctcagtcttggagactttttttgtgaacaaggcgtgatcgaagtggccttgattgtatccctgggacttgacaaaagtagtaaacaacctgttaaaccaagctcttggtgactgtttcaacccatacaacaacttttgaagcttgcaaacctgtttgtcaaattgaacttgaagtcttggaggatgacttacatacactttcttctaaatctacattcaagaaaacattcttaaaatcaagttgatattgaggccaatctttatttgcagcaacggacaacaagactctaacagtgtttaacttgacaataggaaaaaagtctcagaatagtcaaccccataagtttaagtgaatctttttgcaactaacctagtcttatgtctgtcaagggtaccatttgctttgtacttagtgcaaacacccatttgcatcctacaatcttgtgtcccttgggagtgtgtagagatcgcagtcttccacttagggcactctaaggcaaggtggatattcttggctattatagtatagttaagacgacaatgaaggctttgaactggggtgaaaggttctcgtacgaaacataattagagatggagtgctttgtacatgacctggtacctttcctcagtacaataggaagatcaatggatgaatcatacttacgaatgttttctagatggtcttgctttgtttcgttgtgagtagattctgcaatgacctcattttcatcaatcgtatcctctctgtctgtgatggcttcatcaacggccctttttaaccatattttcaaaggattgtctcggacccgtcattctcactcaccagtatgtgagttagtggacttcgtcttgaatcatttattaatatgtgtcaatagaatcaatcataccttaatctcgtaaaagtttaggatcttcgaccggagctggtccaacagtaggagatctaacttcctttttaagattcctcttatagtaggttttccagggagcttgatttgtaggtaggactgccctgtgggatttgggtcaggtaaggaacccagagtaggataggtagacttcaaaggaaccacataattagactcttcactcacactccccctctaaaatagactaacaggaaagaaaggacgatcctcaagaaaggtgacatccatggtaactaagtacgtacgtgaaggtgagtggaaaaatttgtagtccctttcatgcagatgacatccaacaagcacacaagttgtgcctgaggagagaatttagtttggttaggctcatggctatgaacataagctatgcacctaaacacttggagaggaacattagagatgagactggtggaggggtaggattccttgagacagtctaaagggtatttggaggtgtaggacatgggaaagcattcggttgatgagataagctgcagagagaacatcgccttataaataggaagggaagtagacaacataagggaacaaataactttcaaaaggtgatggttctttcacttgacaaccctattttagagggtgtaagcacaagaactttggtgaataattcctttagacaacaaaaactcgttaagggtgtggttttgaaagtcacgaccattatcactttgtaggattgtaatctttgtatgaattacgtttctacgaagtgatagaagtcctgaaatgtggaagtgactctagatttgtcggagataaggaaaacccaagtacgatgggtatggtcatcaatcaaggtcacaaaccatcgttttccagaagaggtagtcaccttagatggttcccaaacatcgctatgaacaagagtgaggttgggttgacttgtatggtttcgagggaaaagagactcgatgctgttttgtgcacacatcacaagctaaagaagaaaattcgactttagaaaaaagacgatgaaataagtgcttcatgtattgaaagttgggatgacctagacaaaagtgctacaacatatcgccttttgaaagtagcaaagtgtgaagataaaagactaatcctagaaatctaggaaggagatcatcatcaactaggtagtcttctgctgtgtcgaacagtgccaatcatcctcccggagctaaagtctgcaaaaaaaataaaaataaataatcagttaagaatgttgctttgtagttcaacgcactagtattcttgcttatagatagtatattataggaaactcgaggcacatgcaacatattgtgtaaggttaatccttcaaaaagagaaatctgccccttttcgacaatgggagccaaggagctatttgcaattcttattttctcatttctagcacatggaatgtaagacaaaatgatcagaaaaacctgtcaaatgatttgtggcgccaaagtccaggatccagatgttcttctcatctacactaataagactgaaggactgagatataattttttggacaatagctcctagtgtagtcgggttgggctcctaggtggctgagaaggggtgggagacgactcactcacataagcttgtcctgggttctgtttgtcgttggaagagcatctgttacctcttgaggaatgaccatgtaacttccaacactgctcatggtatgccattatttcttacaatgctcacaaatagggatcggttttccattgtgcctctcactaccatgactaggggacttcgcactgagggcagtagaattaatggcggggttgttagactactcataccattggtgcgatcctcaaggtgagcctcagaacaaacctcgaccagagagggtataggtctttgcttgctccagtatatgtctgcggacaatatcaaacttagggttgagaccaaccggaaaaacatatatcctaccaatctcctcgatctttggagtattgtatgccattgttgggacaatttcgaacaatttctctacataggtccatttcttgccagaaaagggagaatcggttagaaaatgatgtcaccattcattgtcctcagtttacattcgtgaacctgtttttggttctatactattaatcaatgaagactgaataagagaatcctcgcttttccagtaccatttctatgggtctctcggtggaggatgaaatatctcacttgttagaaagccaaatttgtggtgcccttcaagaatcattttgatagactgggaccacgaaatatagttttggtcattaggctttttcactgaaaaatatcctgctgaatgtgcactgtattagacatataaaaagaggataaagaggcgaacgatgctacaagattctcatatacatcggtgggattgtatgaagttaggactagggttggtaaaagtggctcctaatgtcttgaattgccgcaatttgttgtcgaagcatgtccaattgttgttgtgctattcacagagaggaagtctgtatgtgaggatttgattgtgttgaagactcaccaccattagaagaatagatgtgagcagcagaaatgtgggtgatggttcatcaatatctcgctctgataccatatcaaaaatagagatgaaggaagaacacaaggtttatgtggaaaccctagtacatgcaaggccacagtataaatgttgcttattattttctaatgagaataaaggtacaaagtagaaatatttataggaaacacgagcctaattaaaataataaaaaaatagggtaaagtaaatctcaattactcttggactttcaacattgacctaatcccactatttctaacaacactacttccacctctaactttctttatttgtaccaacattgtaccaacggttaaaaaaccaatccaaaatttgaaaactaaaagtagttttcaaaaagttgtttctggaattgactaaaaattcaatcaattgtatttaagaaaaatgcaaattatcagaaaacatggaaatgaaagacttaattttaaagaacaaataacgaaaaccaacatcaagatgttaccaaatgtaaacttagtttttagtttttgaaattaagcctgtgaagaaccttttacccttttcacctctaaatttgttggtttggtatctactttctactgttgttttcttttttaaaaaaattaaaaaataaagttcttaagaacttgttttttaaatttaattaagaattcaactctcacttaaaaaagatgaaaaccatggtaaaatattgagagtaaatagacttaaatttcaaaaaccaaaaaccaattagttaccaaactaggcttaattaacttttgctagaagttgagtactaggcatagttttgtaaacttttattcaactgttaattttcttccaacgtaattccctcttatttctatgaacagagaaaaag

SEQ ID NO: 7598 - DNA, 3455 bp, Cucumis sativus
  Intron number 8 from transcript Cucsa.355770.1 (locus Cucs a.355770) derived from phytozome v7.0 (chr-ID scaffold0357 7; pos 311421 to 314875 reverse strand)
ggtaacttcaatactttctatcttgtttgacaagtttcaaaatcttgcacgatggatccagttaatgttagttttagggaagctggtggtggtagttattattgtttaattttccagtgctgcatagcgtttattcatttcaggctatataacagtgatcgtctgacatgcttatagagtttgcaagtgcatgtgactgctttttgatcaaggggtgaagttattattcttttgttgtgctgaactaggaagagtaaacattttaattctctgatgcaaaatcagatttgtacgctacatagtaatatatatgttagaagtgttacttttaggaaccaaggtaatatgagctacctttgtcccacattggttagaatgggatgaccaatgtggtacttaagtggcttgactctttcacctcaatagctagcttttggggtgtagttctcctacgtgttaaagtacctaacagttacttttttgcttcttttggaagtgttcgtttctttatttttggattattaggttggtaagtgcacataagtaaaattaaaatttcttttgcatcttggttaccaaggagtcaggacataagtgaaatttactttcagtttcgtaaagaatgctgaatgtcttctggattttggtcttgaatatttgagagaattgacagttattttgaggcgggaaatggattccattggctttcacattttagctaaaatagtgattattgttgttcggattacaaaggatgcatgccaatattgtatgggggtatatttggttacataacttggtctccaagcgtctggtgtgccatatgtgggatgataacaagttagagactagtgtgcgcatatagaagaggataagaatttaattttatgtttaaagaaggtctgaatataatcggtcagctttttataagaataactgaaatgtaatggttctggtcaaggctccagttttggatttgaaattaaagaaaaattgaaggatccttccagcctttaaactgaaggaatctaaatctcatcaaccggatgctgtcttatagagcttccagctgaaatatgccccattaagattactcctcgaaggaaaactacaaactaacatacaaaaaaggttaccagacgtattaagagataagttcctgtaaccaaattcccaatctgcattacagtacatttcattattttgtttagttgtttttgtaaaacacactttttataaagatttcctaaaacttctagtttaacagttcaagtgttgattcttaaaatcttcttaatctccaaccaagctccattggttttgaacttgtactatattatggggcaaatttgatagggaatataatttatgaactattaaatcacctattaacccaaaagtctgagtttatgggtgaaggcaaatttaatattatatcaacattttaacactcccctcatttgtgagtttgaaatatgtagaaacccaacaagcgaaaattaatattaaatggataataaaggggcgagcacaggatctccaccattgtagttttaaatggaataaaatacgttatatttcaaatgtaaggtgaatagctttcttatattaggagaaagacttaatacatcaaaggaaagaatcatgataaaaataaaataagatcattgatgattttatagctaatgaacatatttacatccatcataagcttagtagtacaagcttttcattctacttaattttccatgagtttaagaaatttgaaatactcgcaactctggtactgacagtagaaaatcccaatggaaattattcacctcaattttgcagtggaactgaaaactggagtctcgaaagggacccttgttatgagcactgtcaagagatggctcaccaagcaaatgacacctacagaaaaatctgtgggaaccacatgattggcagtcaaattagggatcaacagataaacgagggaaaatctatgaggttgggactactatatgcgatgaatggactacatttgtaagtatctattgactagaaagtatttggacctttccaaaagattttatctcagtcctggtgaatggtaaaaactcaacatcaacaatacacaatggaggtgcttacaaaatgtaggattgggtttttcaagggtgttcttaatacgctaggacaatcatgaatcatatttacaaatctatctttcgttctgttgggcaatggtgaggtgtgtaaagaggccgcagaaagtctggattgtgtactgtgggtctgctagtttgtttcaaacttgagggatttagaatagtattttgggaatcttgggagtcatatggctaccaattgttttcgtaggtttgacagatgaggtcttattcattcacctttcatgatagaagggtgtttctttggcaaaatgcttatttcatgattatatggaattttttgctagagagaaatagaggatctataatgatgaggaaagttcttggaagggtgtgtttgggcctttgctaggtcccatgttccctttaggcttccgttactaaggcttttggtgattattctttattattcactcctttgaattggagctcttttctataatttttttttctaagaattttcagctttctttatttattttgtaaaattttataaatgctatcattgttggtaatttataattaaatttgtcttcaaccacaaacttaagcttttgggtgaattgatggtttaatatggtatcagagcaggtggtccagggaggtcctgcgttcaagcccctgcattgttgcttcctccccaattaaaattagtttccacttgttgggcctttcaaatatttcaagcccacaagtgagggggagtgttggtgatatataattaaatttgccttcaaccacaagcttaagcttttgggtgaattggtggtttaataatcattatcattattatattgtttttgtttttccatttctctcctgtaatctttggtctttggtctgttctcactaaatgttctcttcatcaagagggaaataaacaaatgaataagggtgttctttttttgaagaagaataagcgtgttcttaagcgggctaaaatctggataagcgcattcatatcataccaaacttctaataataagttactgtacggacctgctttgtatctgaagttgcagttgcctactcatatgctcttcaatttaattttacaagaatgctgatgaaattttttgttcatccactggaagtataagatatttgaggcagtaagctggttggaacctgataaagaatagattattattttctcagaatggtgaaataagtttgaagttagattctggagttgaattgagaaatcaacgactttatcagtttgatttgatctaattgtactttgcaggagagtacttgggtctaacaggggaaaagcttaaa

SEQ ID NO: 7599 - DNA, 5310 bp, Cucumis sativus
  Intron number 11 from transcript Cucsa.204960.2 (locus Cuc sa.204960) derived from phytozome v7.0 (chr-ID scaffold014 16; pos 121111 to 126420 reverse strand)
tcactgacaaggaaggattctacaagctcgatcaggtagaccattttgcttcctgtcacatcgattggtaaagaaaaaagatattatgttaccaaaagactatgctcttgattttttcaccgaggaaatgctacaactggtattcgaataaatggtcagtggtaaagcaaacctttctgtttacaaggtttctacttaattgctgtagttttagtttaatagctggttgtagtcaaaactcacatcattttttattttatttgttattgttgagcattccactttgaaaattcaagggaccttgcaatctttatgttggagttttcttagactttctgaactatttagtgtattctgtatatatttatcatttagatttggaacagtttttacttatttggttatggtctctctcctatataagaagaccttatagttgtatgagaattataaatacaataacattattcataataattatgttggtatctaccatcggaatcctagacacgacttcataggtgcatcctacttctggttggagacgcgccactgtcaatttcaaagccgacctcatcggcgcattcgtctgatttgtagcagacccagatccgcgcatgaacttgtacctctcgccacatcaatagcctcctgccatctgtcctctttataaaatatatgagctactcctccattttatctaatatagtattgaaccatccaaaaaagagtgatagatgaaacccctcccaaagaaaactatcacagaaatgttgtgtagtttctaataatgattgaaggactgtacaaaagatcttgtggtttgaactctactgacaggcgaactgctgtatactataaacatatcacatatgaacgctagatggatggtagcctctgtagaagattttcttcatttttaaaatatctgaaggccttcaaacttttctattgactactctaataataggttctgacttcttttgactacagtaaaagaaaagaaaatttttattgagaagatgaaggctttgctatatgctcatgttaccttcaacatgaataccctgtcagctattttcttatcaatggtctttttatgccatatccaccatattagacgccaaatatctgctagctctcctggtataatatgaagttgaaatgcttgaaagacagttgtaaaatcttgttagatttgaatagtagtgtattttagtttaggttctttggtgtgtgtgtgtgtgtgtgtgtttcttttaagatatattattatgatcaaattagtttttcaattagtgtaatttttatatttttgataattgttatctttaatttaataattgttattcgtttgatcattttttcccattttaacgttttaggtaacttctaaccattatactattgaagcgagaaagaagcacttcaaattcaacaaactggaaaactatatggtacaggatcaattgaattttttttaatgcttttaatcttaagcttcagtaattatgttactcatgctgggatattaaagtctatttgatattaattactatgtaggaagtagtagtcttcaagttcaattcaatataagggaggtgttattttcatgtcctttcttattccaattttctttccatgttcaggtactgccaaacatgatttctgttgctgatatcaaagcaactttatatgatgtctgtggtgttgtaaagactattggagatggttacaagtccaaggtaaagtccataccccattgatccctttttgtgaatgtactttgcatgtcaaatgatttgttaccatattcttttctgaactttaggtagcattgactcatggaccagaaaatgttaaacctcaagtcaaacaaactgacgaaagtggcaaattttgtttcgaggtatgtttctctaaaataatggcaatacattttacgttgttcctgttggcaaaagttggaaggatacaatttttttcttttttgtttttcaaaaattaagatactgaagatttgttgagcagaatgaaggaatatacaagggtgtattaaaaattaaccccaacaaaaaggagacataaaaactacaaggagctgatcataactataaaaattccctcttttcaaatctcatcacccgacctttccacctccagataaaaattatataatttctcttgagccaaactcccaatagaatagcaaagaaactagagtgccacgagaaattggacttggaaaggtgctttcggatagttgatggctactttgcagtaaatggagaccgttcatttgaaaggaaacagaggtccttagagggaattgtgctggaggtttagataaaaatgaagtatagtatatttcgagatgctttgagagatagttgaagaaagctgggagagtcgtggtgagatttgctgaccataagggtacaatgtcaatcaagccggatttttagatcgctcgggcaccacagatacaatttctcagtttaatttagatgaataatatggaaggcaaccaatgcaatagtcaaaataaatactaagggtatatcaatggaaagaaggtgaaagaaatttgacttaaaaaatgtattgtgagtctattaataatttaatcaagattgaacaaatactaattctataggtgaagattctaaacactcaactgtctttctcaagcactaattaatcctcttgattaattaagaaatcaatattcgttactagttccaataaaatacaaaagctttattaaacatgtctttttgtgactgctaaaagaattcgaagtccgcagatttaaagatcctatcagttatggattttggttttgactagaaactatctcttttaagtgtaagattgattgactagtaggttaaaacttaaaagtatggaaatgaagattagaaacacataaatcaaattcatattcacctaatcaggataaatatattaatccatctataaaaatccggtggttccattgattgttgttaaaattgtctgatacgtgtagttcaaattgaaatgaaggaaaaacgttacaactcgtgcgtttgaattggaaataataggtatggtatgattctagattgtgttgcctttgttcctttgatccccctccattgttcctttgatccgtcacatatggaagactaaaattccgaaaaaggtgaaattttttttatggttgctcgcttacagaagccttaacactcatgagaagctacaaaaaaagtttcagtaccctatgctcagcccctcgatgtgttgcctttgtttcaaagaagaggaaaccatggaccacttatttttgcattgtttttgtactaggaaagcttggaacactttgtttagaatttttgatttggagctttgtcttcctagtaaggttgatggttggttgattaaagggctcaacattagaggttatagcccgagaggaaacatcttatggagatatgctactcggtcccttttgtggtgcatttggaaagagaggaatagtagaattttttgaagatagttataattcttttgattctttttggactgtgttgcaacacacagcttcttggtggagtacgaattacaccaaacacttttgtaattataacctttctatgatattcaacaattggaaggctatcattttttagtttcttctggggagggtcctcttgtcccttgcccttaggttgttctcttttgttttatgaatacacatgtttcttataaaaaaaaatgattctagattgtgaatcattctaattgttcttgaattgattcaataatcatagaaattacttttagggtaaaaagcaagcatgactcggttgttctttgatatctgcaatactcaacaaaatatttaatataaccaaattaaaaaatatcaaaatatcattaaaactactgaaaaaaatcattaaagccatcccgctttttctctcacacacatgccccatggtaaaagtgtgactttttaattattaatcttggccgtttaactttgtttattacttttaaattcttttttagaatttttcatgaatgtggaatatcaagtatgagtgtttgggagttaatagttatataatgttaagctattcccccccttattttaggctttgctatttatacattttattgttatttattaaattgaaacttacaaaacatgatatgttctgatacacaatacactacaattttattttgatctgtactgcgtttcacaataatttagctactcataacagagggcgaacaacaatatttgatatattgtcagtataggaatttgatgttgtcatgtcgattgactgtccccaaatcaatctccatgattccaagccttgaaaattccattttttgatatcaaatagtttccttactctccaatttagtctcaaccgaaattgccatcttgactctccaaaattcctcccttggggctcaaacagaccttaccctttacaagaaaactcacagcaatgttgagataatctaagcagggttgaagcgttgtagatcatagtgtgaagtcctaaataacatagtatgctaggatgaaataggcattggcatttatttgtttatttattttatttttatgaaaaacaaattttattgataaatggaataagagaagcttcctattaaaaaaaaaaaatcaaagaagcttaaaaggctgccatcacttaaaggtactaattcattgccattggaaaccaaagactaaagaggaaaggctatgattgttaaaggggtattggcattttaattcttagtgtctcactgctctaacatggtgtctcgacctttacttttgaattttggtatttaggcaattctgcaagttattgttgttcgtgaaatcctcttactttcttgagttgtctatctacttgtgcctcattgtgttttaaatctctcaggtcccaccaggtgattatcgcctatctgctatggcaatctctccagaaagtgctcctggactactgttctcgccatcttatgttgatgttacagtcaaaagtcccttactgaatgttgctttttcacaggtaatattctgaattttcgcggacttcttagccttatggtacttactgtttgtagactattcgtgagtccgttaataattataaaaaggatattctcatattcctgcttttataccatttgttagtttcttcacatgataaagttttttttatccgcttccattgatttattttattttgtacaattgattatcaaggcactcgtcaatatacttggttctgtaac

SEQ ID NO: 7600 - DNA, 3389 bp, Cucumis sativus
  Intron number 12 from transcript Cucsa.157150.1 (locus Cuc sa.157150) derived from phytozome v7.0 (chr-ID scaffold011 41; pos 188712 to 192100 reverse strand)
tttatcataagaataggctcatcaaggtatttatatctatatcaaaagtgggtgagaaaccctctctcttcatttttctatttttatgttttacttcatttaaattgctttcattattatttagattcttgaattaaatcattattaatattttcttaaaaatcttgttttactgttcttttatatattcatttatatgtattatattgttacgacctttcttgaacaagttctgttttatagaccgttcaactattcattgatattgttatttttgtttttttcatttattttttaggttggaataaaattaatatggttgtcatagaactttgtgataaactttacatttgtgatctgtaacttcgacttttgtatttttcatatttctatccttcatttaaaaaaaaatcaaagcatcatcttttctacaacagattagtgtattttaatagatataattaaattttaaactatttaatttttcaacgggaatctctatgattatatataaacataccagtttttcaacaaagaattaataattgcgaaggtgcaagtaaattgcattacccatttattttatgtatttaaagaatatggtaattttttagcagaaaggaaaccatatttttggtccttaaggttctagtttgatgtgtatttggtccttgtagttttgaaagaaactttttttttaaggatacgagtctcactattattaatattgaaaaataaagagacaaagtttaatgtacacgagggttatacaaagagcgattaggggaagggaggatcagcaggcacactcgggccatctcaactaaggtgatatccctttagcgcccttatcacatcgaaaaagcgacaatacaagatcaaaacaaaatgctacaaatacaaggccaaacaaaatgataaagtaatctgtccaagacaaaatcataaatcataggcagcaagttgagaacaaagaagaataagaaaaataagccttgatgagcaaaaaactgtttgaagcagagggctgatccggaagtcctgatgatcaaggacttcaaggtaaagaggctgtaaaggcttgccaatttaacacaatctcctgcgaagagtaatcctgaaaatctttggatctaacaccatgaagatgcattcaaatgagcagaatcaaaacgttccatccaagttgatggtttatcatggaaaactctttggtttctttcaaaccagatttcaactaagagggcttttacagcctttacccacaataaatcagctgtcttcttcttcaaggctggaccgacaagaacttgagtcacattgttcttaaaatcatcatcaaaagcccaacaaatattgaatgcttggagaagacagaaccaacatttagatgcaaagatagtcaaataaaagctgctgaatattttctatgttaccaacacaagggggcaggcataaggtgagaggacatgagagggaagtttactttgaagtattgaagcacagtttaattttccaaacagcataatccagatggagatatttaccgttcttggactattagattgcccaaaccttttgtacaaagagcttttcgaaggagaagaagtcgaaagatgcttaatcaattattttaccgagaaagaacttgaggtttcaaggggccaaaatcttctatccggaaaggaggctggctgtgaggatgagatctgaaataacaaggactgaaagtctattatttcctgatcattaaacaatcttccaaaataaatggaccaaaagctggtagaagagtcccaatgatctaaaactaacccatttggattgagtgcaatcctaaccagtcttggaaatttacactccaaagtgattttgtccatccatgggtagttgatctcatttgactgttagttgtcttaacacaaatactagtgtgataatcatctttcttatatgactatggtgatgtggaagttttgaatgagatgttaacatgtattaatattttatagatatttaatgattggactaagctgaggtagatctttcccctttttttcattcttctcctttctccaactctggcaagacaccactggaaattagtttcccttcttcccccaatatgtgtacttgatccaaacacaagcttacacgtataccctcttcccatcccaccatatctgctactttctaagcttgtttggaaattattctttcacccattttatgtttgaaaccctctcttcctctctgaatctacttttccatgaaggttcctaagaaaggttctttgtttggcaagtcttgcttggtcaggtgaacacctcgataggcttgataggaggactttgcttgttgggcctttttgctgtctgctttgttggatcgcagaggaaaaccttgataatctattttgagactgtcagtatgtgcaggatgtgtcgtgtttgtttctccagaagtttggaattagctatgttggccaaaggagtgttcgagcaacgatcgaggagttcctcctccatccgcctttcagagagaaaggtcggtttttttggcttgcatgggtgtgtgatattttggggtagggaaaggaattacagcgagatttggtctctcgttagatatcatgtgtccctttggcttttgatattgaaaaccttttgtaactattctattggtaacaatttttaattagttggaattccttctatagaaggggtattttggtaggttggttttctttatgcctttgtattctttcattttttttcaatgagaggttgttttgctaaaataagaactattttttaaacttcaaagaataaagtttttcttttggaacttacattaaggtgaaaccttagaaccaaaaacatatttttaaataattgtttttattcttttatgttatttatttttttaaaatttttaaaaaatggcttccgagaaacgatttcttttgtcctgtgttatatggttgttaatgatctcatttgcaacgtgcaaattattcttctacttaatttcttttttatcttagattttcaagggttactacaaggaaagcatgctcttcgtgtatttagttatgataggtatttggaaacttaaaagtaagataaaaattagtctttattaattaatttaagaatggtcttaagtgtcattatcttctccttttttcttagttgccaaaactttttgtcggctatcctttgctttcaattttgcaagcttggggctctggttgttttactcttatatacactatgccattgcttgccctgtgaaatatagtttcctccatgtaaaatatgaattaagctattattgtttctgataaatgattattattatttgccagccattttggaggctttgga

SEQ ID NO: 7601 - DNA, 4564 bp, Cucumis sativus
  Intron number 7 from transcript Cucsa.189380.4 (locus Cucs a.189380) derived from phytozome v7.0 (chr-ID scaffold0130 5; pos 114480 to 119043)
caactgctgtatccatttatcgaaagaagtataaggtataacatccagacctgtctgccctagcagcttcctaatttatttttagttttctatcctttgataaatatatgattaaaatattagattttctcgtccttcatgttaatatgaacaatacacttgcaatatcgtcaatctaaaaataataaaagattctgttataacaagatactgagagtcggcaattggaaggagtagaaagattatgtcacaaccccttctcggcactctctctagctcaagaaagaggcgtgaagccagcaagcataaactctcttatgacacttactgactaagaacttacttgaataaggcataggagaatttgaaacataatttaaacacagaaacttttctttaagttgcagtggaaaaggagttaaatgaatgataacagcgtaaaatgttgcaacgcaaacatgaataaaactttacaactcaggggttataagaaagttttcaaacatcacaacacactcaaaacttaacctcaaatccaacatagccatgcatgagactaatatgtaagcttaagaaaaatagcaagaaatgtaaaagaaaacgtggcagattgagaatagtaggtcaagctttgggatcatgatcacctgaaaaatacagagcccttgcaaaattagcaaaaaaatttatgataaaaaggtccatgtcactacattttctaaattgcaaaagtagcaaactaaaaactgataaccctctgatagccctgtgataatcctccgatagccctctgatagccgtctgatatcactaattactggtcatatttgcaaaataaaagaaaaggtgttatgggttgtttttttctaaatgtttttgccatctgatgcaattttccaaaaataaaaacattttgaaatgtgagttgaaaggcttagtgagtgactcgctttaggaaaatatttaactcatgcttataaatagaaacttagataataggctaaattataaaaaatgttcatcaactttgatatttatgtcaaaaatatccttaaactttcaaaagtttcaaaaatgtccctaaactttcgaaagggttgatatatacccttaccgttagttttggatggaaatcgttaaattttttatttcaaagtacccctaaattattggtaagtttcatgaatacccttacacttataaaaattcaaaatatttccattaatctaatttttaccccaaatttcttggccttcaaaataaaactaaaattttaagttaaagctatagtttttaaatttccatcaatacgtggatatttctatcaatgctttcacatttccatggttcgttatttgattgaaggggtaatcgatatttccattacattgtagaaaaatccacgaatcacaaaaactaaacatgaaaatgacactaatataaatataatataaataatagacatttttacttatttgaaaataataaaatatatatttactaatttaaaattagtttttgagttttttgtttttataattttccaaaaatatccattgaaatcgaaatttttgtaaaattaagattttgatatatcaatcaacatcgatattttaaacattggttaaaacataaaattccacaaaatttcatgaagttaaaaaaaatctccataaaacatactaaaacaataactagtcaaataaaaaaaaaaatctcacaccgatagatctattagactagtcaaatacattttcaaatacatttctatatttgacaattaataactattgagattagttgtgttcatgatgtacctttatgtgttaatagtcaaataaatttaaaactatggttttaacttaaaattttcattttcattttagtctgtgagaaaattggtataaagtttggatcaatgagagtatttcttaactttctttaagcacaagggtatttttgaaacttttcaatagttcaggggtatttttgaaacaaaacttttaacgatttccatccaaaactaacggtagggtatttttgaaccttttcaaaagttgaaggacattttttaagactttgaaagtttaggggtatttttgacacaaacatcaaagttgaggggcactctgtaatctagcctagataataagcataagtaaatcttattttttcggttttcgcaaacatctttagaaatagatctttcagaaatcatgtgcaaagcgaaagtgataacaataagctcaaacttgatttacaaaaaatcacacccaaaaaaaagaaaaaaagaaagaaaatcttatttctctaggacccacctagctatgttgtagtagggcacgatcaatactcctaacgtctaaccttgttgtagtagggcacgcccattattaccaacatcaaactatgttatagtagagcatgctcaatactcctaacatttatctctttatgggcacatagtaacttttctcaagactaatgactcgggtacagttccatattttaaaacaaagaattcatagctttctaaataacttaatttgaaaacttataactcatgctctgctcacttgctttacatcttacttatatttaagcttatgtaagtctcatgcttaacttggtagcttaaaacagcttgtagctcatgcttgaaaatttactcatatcacttggtccaaatacctgattaaaactcatgcttaataaacttagcaaaatatagaaatattgcttggataaacaaatgctaagaattagtaaagcatactaaaatactttaacttagaaatcatgctttcaaatacttataggaaacttaaaatcctttcgtcactcatagtacttacctaactgccccttggctagaaaacctgtccaaatttctcttgccctgaaacttaggaaattgatccttaatttaatttcttgaacttagtttatactctaaaatagcttagaaactccaaagttatcaaactatgatggacacatggcttgcatccccaaacaccttgctgcctaactttcactggttgctgtcgttttacctaaaagtttccagattgccctttcagcttgaataacttaaaatccattactcaaattaaaaaacttccttctacaagcttgttccaaatcctcttaacttacttacctcaagatttcaacctcaaactcctcttgatcctccagaaagatctatttctttgggcccttgctcggattgctcaaaaatagcacaatctgctgaatccagccaaaatcttcaaggagttcttctcagctctcctcacacactcaccagacacatataactctgaaattattccaaactttcggatttggcatggaaaaaaaatgagggaatttctccaccaaacattcccttttaatagtgccgaatgtaagtcacacttcagacatgttttccttaattgtagaccagtatccttattctttttaaattctttatttgtcacttgtctcctactaacttgaaagattccaatttgaatgcatagttcatttctcacgcattcttggttgcatggccttcgcttccttcttctaacttaacttcacaacaactcaacttagttgcacccccttctctaattatgaatgacatcaataagaactacaaagcacataatggaacctaaacaagttaaaagaaagagctgggttttacagattaacattcaggaagcatgtggcattggctaatttggcgaatagtcctcaatttggtttgtgggcttaacctcatgacacaccatgaaaagttataagaggaagattaactgtcagctgtctattatacaccacctactgcagctgtatattatattttcttaattcttgagtcaccagaaaatgaaatgaggaggatgcagtctaatggggaaggtgacctttaaatttatagttctgagatgctgaataacttttactttccaatattatattagtctaaaatcttgaatattttcattcttgtgtatacagtgattagggtggctggctgtccgtgtttgtttacaatcttaagtttcctagcatcaattcaagattattcctgcttctggacttaattagaatttagaatgaacagggtctaaaattgacatgaaatgatgaacatatagtgtttgattagctttgtttattctattcccctaataagaaataactaataaatcttgaagttcttattcttctgttggggtaaatttttaattcctaaccatcatgggtttggcctagtggtaaaaaaggaaacctagtctcaataactaggaggtcatggtttaattcatgttggctacctacttaggaattagttttctagagttaccttaacacttaaatgttgtagggtcagataaattgtcccgtaagattagttgagatgtgcgtaagctaacctggacattcacggatataaaaaaaaataattcctattgcctctgcaatcatatgaacattatttggttttttccactctcatccttttccaggaacatcagggaggacaaataggcctgtctgtaga

SEQ ID NO: 7602 - DNA, 7477 bp, Cucumis sativus
  Intron number 3 from transcript Cucsa.001310.1 (locus Cucs a.001310) derived from phytozome v7.0 (chr-ID scaffold0002 0; pos 39148 to 46624)
actggggtaatgctatatggtcatattttagactatcatttattcccttggtgattgaataagagatgagatatggaagaatatatgagatacagaagaatagaaagatgatgtgtgtagtatatattttgtgttgatcattatatctggtcactcgttttactcttatttatacttgtgtatattgtctactactggtatataaatttagaaaacacttgaaaatgacaatagaatggattagcataatcttaactgctggagtcaagtatgacgaggattgtacaaattaatactaaaaggatttatctgcatggtataagggatcatatttaatctagggttgtgaattgagagagactggataaaggtgtaagatatgggaggaggagtttatagtttattatccaaggagccgatgaatagatctaattatgaatgaacttctaagggctataaattactgacgtggacatgacaataagcgccttccagttgttaataatcatgagcaggttgtaattacaaaataaccttgtgtagtttgtacacctaacaccaccaagaggccgtatgctgcaaaagagcccaaaaagaatcaaaagagctgaacttatcgttgaacaccttgctatttcttttattctagagatcccacaagagagcatgggttgcacaactccacaaaaattttccttttccacaaaagctgccccatacaaatgttccatcatccattcatcgacctgcaatgagagacatccatccaacccaaaggtctgaaaaatcatatttcgccctttggatgcaaattctcagtgtaaagaaaggtgatctacagtctcagcctccttctgacaaatcgggcacatggaaggggaaaaattccaattaggaaacttcctttggagcttttccgggtgttgagacttctataggcaagggacccaaggaaaagctttgattttctaggaattttcagtttccaaataagattgatcagaggaagattaactttagtagcccccttggtcaactttgggaaagtagacttggtagaaaactggcttgaagcttccaactgccactgagctgtctcttactctattcaccacccaaccagtcagcagctaagcaagagcaatataattgccaatttctctatcaaataatctcctcgcttgattggaatcaacccaacctgccactacaacattctttttttgaggaaataatgtagttgtcacggtgctaggaagtaagaggctgggcttgcacaccacctatcgtcccaaaactttatgtctcccatcacccaccacaaaatcagcaaaggtaaaagaatgctctttttcttttagaatgccattccataatatgaagttgcctctatcgttaggctttatagaactccacccatgctcctccatgctgtaaatccacaaggcgttttcttcatgataaaatctccaaagccacttcatcaagagagcagaattcttttgattgagagagtcgattcccaactccttgtaaatcgttgggagagaggtccacttccagctaataagatgggaggctggtttatcaaatccaccacccaaacaaagtcttgaataagctgtccatgtaagaaataaaacctttcggagccttcaataaggagaaaagtaacagggtaaactttgaagaaccaattgaggaagataaggtctatcaccttttgacaggaccaatctctgccacttatcaattttagtttaaaagttctcctcaagagtgacccaagcctccttagctgtggcattcccaccaaggggaaacttaaagtatacaacgtgtaatttatcaacttttgcaatccaactccatagctttaaaagcaacctcctcatcacaatgattaatttcaataagagtaagttttggcaacattgaggaactggcctgaaccaagtaagaaaagattgacaatagactgccaaaccctaatattttcatcaactcaagagcaaaaggtcaaattcttcgcacatttaaggtgtgttgactcttgaagggttgccaaaggaaaagccatggatcaatcttctttcattacaatagtgaacaatattactgaaggcatcacctacaatggtaaaaaggaaagaggtcagggggtccccttgcctaagccctctctgatccataattttcccatgcggttttccattaataatgatagaagaaagacagtcccaaattcacccctccatcttttctcaaaacctttgagcttgaggatcgcatctaggaaggtctagtcgaatttatcacaagcttctcaagattaaactttaacagagcccccttcttcccattcaccttccattcttcaagaaattccgaagtagttaagatggcatcaaggatttacctcttttccacaaaagccatttgagcatcatggaatggaagcaagggcctttttcagtcttttgttggggaccttcaaaataattgcgtatacagatgttaccaagctgatatgtttagaactcacttacctgtgtaggcttcttctttttggggatcaagcatacgttatacattaggattaggattatgatcaaatctttaatctattaggattaggattaggaataggattagtttgcttttcaattgtaaatagtatacttgtcttcttgtattaacaacttctaaacattaataaaattctcatatttgttatacatcaaattggtattagagcagccgtttgggccaacatttattgccatcagggaaaatcgagaaataaagacgtgacttcgattacaaaatggagctttgtgagttgtgctcgttgttgaacaacacacattttaaaaagggggagccttgaaagaaaaacaattttttatgaagaattttcaagaatggaattttatagaggaactactacaattttggacagaaattattatttttgtcattaagaacaaccaagaaagactgagaaatatgcaagaaaattcaagaatcgatcctgcaacaattatgatgaacccttcctcaattagattttcttcactcttacaaagggggtctttcctcattttttgaaaattatgcattttttttttataatagaggatattgtgaacgaattagttcttgggttcattgtgtttatcatgaagattggcttttttttttttatgttgaatgttccaagatatttccgtttgagtggcttacttttttatttttactttcatttttgttttaaaacttgagaacaaatttttttttggaggaatagaatgatatattaggaattagtttaaccaagtgtcattgcatcttttgtttatggtattgttttataaaatttgtggaatacttcaactaaattgctttttaatttccactaatttttatttaactccccagtcatgccattaggctctgatgatttaatgttcccaaaatcaaagacagcggtccaaatctcctcttcgaaaggagcctgtaaagcctgcatagcctcaccattcatcgacctccaattcagctcgtcacagattaaacaagggttatcttctttcttatacaacttgctatgagaattaacaatctcatcagtaatctcatggtctctctgaaaaattctacccccactgtcttctagcatcaagttgacatttttgcttcttctggctgaagtccatctatgaaaaaggttggaattttcatcttcttctttcaaccactaaatctttcttgtttgagctcaatcacattgctccttgaccaccaactgaaccaaatctgccctctactttctttggaaaagaccccttcctcttcatgtttatcaagaaactcaagctttttggacaagcttttctttgacagcagcttttgaagaccaccttgttccaactctttaaaatacttggcgaaaattgcacaaaccaccctaaattatggggttggttacaatcactctcttaaacttttaaattgatcaatttgcccttgtagtttgttaatggttgcaattagctcttattttttaaattaataatttttttttatgaaacaaattgctttcattgtaaaagaatgaaagaatgcacatgcatacaaaaaaaactcgcccaccaaacaccttaactactaacaggagggggaccaactaagtaaaatgttacctatagaataattacaaaaaagctaagaaatcgaagttcaaagggaaacatgatatctagccaaagactaaatctcattatgctccttctccctacccctacaaacctgttcaatcctctcgccccaattttcccaaacaatagcgcataccctgaccactcaaagaaacctccctttacctttaaaaggcggatggaggaggaactcctcgatcatcgctttgacactcctagagttagcaaaactgatggaaagagctccaccacactgcccttacataatggtagtcccaaaaacgatgatcaagatcttctttcgccttccgacaatacacgcagcaaaagggccggcgagcgaagtcttcttcctaacaagagcctatctacgcccaagcaagatttgctaaataatgaacctaactttcttgggaaccttagccctctagactaaacaacttagaatagggagagagggatctaacaagaaactaaacaaggatttacatgtgaaacctctacttggattaggagtctagacacaaacatcccttctcccctccctaaaaatatacccctcaagcagggaaagaagagaggtcacctctgtacttccctattggtcaaattacgacgtaactcaaaggagaaagacacatgattctccaagctgaccagacatctgagaccatgcagtttttgaacgaggatgaatgataaagataaggaaataaagaacaaagggaactctcctcacccagtggtcctcccaaaaatacgtatccttaacatcatccccctcaaagcaatgaattttgatagagagaaagtgggaagctcaaaggaaatattcttcaagggattttggtgtgtgcctctataacccctttcgtcccattcaaagggatgggggccatgcttactcacaataatcctatttttaaattaataattataattaggtatttttaaaattaaaaaataaaaataaattccctctcatctctcatcccttcctctctcctctctcttccccctgcacaattatcccttcccatcttttgatcttcgtcttcctctcttttatctctcttagattttaaaattttagtaaatttaaatttagattgatatgaggtcattgctattagattctattctaaaaggtcttatgttaataataatcttcttatttatgtatgaaatatgtgtagtaataatcttcttatttatatttcaagttcctgtcaaagaacttcaaagcttcctaaggtaaatgagcgcttctacaagttttgatattaggatcaaactgctttccagaaggacccgccctttacatttcattctatccaaaacgcactctatcaaatggaatttcccagaacttgcatagttttcaattaaaggataaaattctgcatcctgagtttatttattttcttttttgagaaaagaatccccggttataaaaacctaactgaaaatgaatttgaatattttatctgatattgagagttcattttcgccattcttcctaggtttgcttctgagagttgggttggaaggaaagagcaaggggcgaaaaatataagcaagataaaaaggttggaaagttacgtgaaactaactgtaaattaagtggtatttggagaaagaatctcaggaggtttaatgttgggatataaaggctttctttaagaaaagacattgaagggaaagggagaggaagaggaagatgaagatggagagaggagtggtgaaggatgtgtgatgagagagaagctttatgcttttgtttattattttattttaaaatacccaatcataattattaatttaaaagtaaggtgctaattgcaaccattaacaaactagatggtaattgtaaccatgaacaaactagagggttataatcgattcatttgaaagtttaatggtgtgattgtaaccaacctcataatttaggggtggtttatccaatttttccaaatatttttcaaacccttaagcttttccataaacatgtttaccggccgtccttccgtcttcagacctttccaccaagtctccatatatttactaaaagtatgatgcttcaaccacatatttttgaatctaaaaggagtagggccccaagactataagcccaaatgaagaagaatgggaaagtgatcagaggtgacttggaaatccacagtagcatttcgaatgaaatccacccaaggcttggaaagaaggaatctatcaatcttagaagcagcaaaggaggagatggttctagatcaatgtctttaatttttgaacacaatgtataattattataccggtttttctttttctttctttctttaaaaacgtgcccttggttttctttacatgtcccaacatatctgaacttcaagaaacagtcatcttttacatcagtgcatgtgatatgtgggaatttagatgtgttcatgattcataagggcctgtcactgtaactccattcaatatagagtgtgtttctttccaaagggttatttatttaatttctcttttttttcctttatcttttttgttttgtttttttttttaaatttcagactattttgtattgtataatttttctcactttgggagggggagacaattactggccttccttttcaggtagtagcttagtttaccatgagggaaagttttggtaggtctactgtgaagatggaaattactcattttgagcgagaggcagaagtgtggtgttgaccattctgtcaagtgatgaaggaagaggaataattattggagttgtgattagtttgtcgatgaacaaaatttgtttaaccacctttccattttagcttagtattttttaaaaaagaatcgggttaattggaatgtaacctgtttggaatttactgtttatgtcatacttggggaaaaatgatactatgttgtttacagtatatcaactaaagtataaaactaagcaaatttgtttctgcgtactgtgcaaatatattgatatatatatatgtagtcatcttacttttgcattgtgcaattttttcttagcaatgcaaattgggaatggagacatcttgtggcaaatttagcaatttcttgagtttctgtatagtttgtacatatgatagttggggcgtaaaaaacaaatatggaacatagtcacacattgtgctgtaattgttcttgctctaactgtgtgattctatgtgtaagcatctaggatgttttgcttacgtatacatgtatatgttttctttcagacg

SEQ ID NO: 7603 - DNA, 2259 bp, Cucumis sativus
  Intron number 3 from transcript Cucsa.184670.2 (locus Cucs a.184670) derived from phytozome v7.0 (chr-ID scaffold0127 4; pos 318244 to 320502)
tgcaggctgagcacatcaaggaacggtctaagcaggtatgtacttactgtttgacgatgtatgcttgagagtgtattttgggattttatatttgtagatttgtaccgttcaaataatcttgtctatgttctatgttcttacatgaactgcattattttgtttttatttattccttcatgtttctttcccctttttttttttattatatatattttacttactatttatttcgaggtggacttcttggaaatgtatagtatatatgatgagttcttgatgtgttaacttaatacttcacattcaagagttgaacccaaagcatattttcacagtacttaaacaccaaataacatcatgatacatattatgtttatatgatgtgtatgaactagtctcgtaatagtttaattgcattggtaactcagatacttggtacaagcattatcatttacaatgacttaggtgctagattagaggttagtaggttgtagttctagacagctgtaatttttgtctctcatattattaaattcggagtccatttgagcaaaaatgaacttagatgcaggcttaagcctaagtaactatatatgcctttagtttttggtttagaagttgtaggattgaagtttttgtccaatggaatttctgtattcaaataaatgcatttaaaaaattaaatatgatggataaatatagcgagtttttcttttctttttctttttccctgcctaagaaattttaatcaagaagaaaactactccagaaatatggacatatattatatccataaattttaaacttctttaagcaatatgattgtttgaagaataagtaagcataagcacagagataaaacttgatatttaagaaaatatgattgaacattcatgcagctttatggagttttctgatgtttcagctatatatcgtaatttatatgttctgtaaacttttcatgtgaaaccctgttgagagaattgggaattaaagagtttttaaaaagcagctataatcattttgaggattgcaagaagttattaatatccagtttatctttgaactactaatataagaaatgatttctacgtactaggattttgttatttcagttatgctgggtaatttagccttgtgacaaccatatgagaagatgacttatgtttcttttagcattgtcctctaattgcatttttcaaggaatagaaccaaatcctagagctttaaactaatcgatacaaatacaaccactcaggtctgaaaagatagcttaatgctcctagagatgctttggtgatatttgcattagttccctctttctgattctgtgtgtatactgtattcataaaacccagagtaatatattaatctgtaaaaggtaaaacccggagtaatgtattcattaacatttgtaataacagaagaggaatcctcattggaaaatcaaactgcagaattgtttgatatttgttcatcatcttgacttgaataacttttttgtcctgtatcagctattaggtgctctaagattcttgcgatatctcaaattcttctacctaattgcttcttatgctgaagaaacattaagattttgaaattgtgaacatcataagattttttttagtgttgtgttctttctgtacatatcatttattgttgaaactatctttttctatcgcaaaggatatgtctatttcgcacatcgtagtttctgttgaagtctctcatcattgattttttcctcaagtttattaggaaaaacttcatgcccagtttatttttccttgggccattctgaaatttgttcattgaatttctgattgacccgtgtgcagcatagaagttataatctaaatgggacctacctgaaattacatttacttgctgcacatactggttgggctgtctatgttcacagaaacagaataatcatgaattccgagcttttgcttgatttattttattataatcttgttatttcccacaagttctttaggttcgtggtatttgtcattttaattgattgttagtgtttcatcagcgtaagaagcaattgggtagaatttcattgaccaaaactccattagcatcctatagttgtttagtttgattgcatccaaatgcaggacatggcaagctactttaaatattacttcttactcctggattgatttcattctctttactagtagtattgctgacgaaccgattatctttattgaagctgaagaagaaactcattccaattagtgagaagcg

SEQ ID NO: 7604 - DNA, 850 bp, Cucumis sativus
  Intron number 1 from transcript Cucsa.366670.1 (locus Cucs a.366670) derived from phytozome v7.0 (chr-ID scaffold0362 5; pos 214214 to 215063 reverse strand)
ttgcaatttcggtacggttttatttctttttacacaatcattttgtttttaactttagtactcattcgatctttaatttcattaatcacaatatgatttaattttgaacaaggctactcaaacaatattcataaaatgcaaatgaatttgcaaaatataaaaatttagatccagctcttattcatagtctatcgatgatagaccgtaccactaataagagtatcaatttattgattttagggacattttaaaatagaaaaataaattaaaatatttataagctgtagcaaaattttggattctatcaatgatagtcaccggtagacttctatcgctgtctatcaatgccactgataaaagcatatcagtgtctatcaatgtctattattgatagaaactgaagtattttgctatatattgtaagtattctgtcaaatttgctatttcttttacaattttccttgatattattctatttgcaattctttaatattgttgttagacacttaattcgttttcaccctaaaagtgctatccattttaattactttattaaatttgtcttcacctacaaacttaagcttgagggtaagttaatgatttaaaactgatttggagtcttcattttaaatgttctaaaaaatcaattcaaactatgaaagctaagaagaaatagtttttaaaaactaagaatttgacacttttaagatgcaaatcacggtcagaaattgtgaagaaatagacttcattttcaaaaataaaaaactaataaacaaaatgattaccaaattaaattactgatattggtatctatgcaggaggcaagtatagttggcccgaagtagtgggt

SEQ ID NO: 7605 - DNA, 5321 bp, Cucumis sativus
  Intron number 1 from transcript Cucsa.248430.1 (locus Cucs a.248430) derived from phytozome v7.0 (chr-ID scaffold0220 7; pos 254995 to 260315)
tgatcttcacgacagagatctcggcggcggcactggtgagttacagtaaatctaggtcttttgctctgttaacatgtgggaaatattctaatattttattaatgaatattctgtattttagaagccaatcaattgttatgtaaatagataaattacacaaattaaataagaaatgtaatataattaacctaaactatagaatttatattaatagttagattatgagaaaattataaacacataatgatattgagttgatatgataattgtttaatataaaaaataatcatattaaactaaacaataataaacaaaattaatcaatacttgtatgtcctcttttccaatctcaccattatcttctttctctcgtttctctcgctttagagagccatattcgtagattgtcattgtttacccaaataacgttatccacgcaattttattcatatatctttacattttgtttgatttttcagcttcctttcaatctctttagtcttcaaatctataaccataaaaagatggagaaaactaaattttaaaatccaaatcatgatcataccaaagaaaaaaaatgcactaaaagatgactaccatttttcattttttgtatgtgaatttatattgtaattcaataaaataggaattaattatgatgagttattactcaattaaccatggcaaaaaagcacttaaatcaatggtctatgagtttttaaaaattaaaatggcaatggcttattattagttaagaatttttgaagttttttttacgtggatggttgtaacttaaaaatatttttaatggttgttttaaaaaaggaatcagctcaggtataaattttgtaatatataatatcttgaacgttggatgttattaattttcttttttcttcttctttttcttccttttaatatcatatctttatccttaaactacgatatacattgatagtaattggttaacatgaacacttcaaatataatagattaatctaagatcactcatcgtaaatttacaagttttcctctcttttgtcttttgttcaagtgctagtggagagagaggttttttggtaagtttagagtcgaacaacaaacatttcgaaatgcctcgacttttctaaccttatgtggtgactatatccagtatatggttatggacacgacgatgaagtataacgtaatatgaactcagcaattaggtgtgtttatataggaatatttaaccaattaaatgttaacacaagcgagattaacatttcaaggtgatacaaagcatttattaacttcaaggcaagtagccattaggtgctttggtcatacttgctcgtctttcggaatctaaatacttgaagttaagaagatttgtacacaatttgtctgtttgaatcataagtaatccatcctttattaaggcgggcatcctttcggtgctcgaccacacacattgtgcatttatgtaatgtatgaaaaggataaattcgacgacaagattgtattgtaatgatctcataaccactcagttagctaaaataaggtcatcacgcatcaagtgatgacaatcaatactttgtctgttctcttgaataagacaaggcattgatggccacatttaactaaacaagacttataatgcactcaactagattgtgagatccatttctaatttgagtaaggaagtaaattcggctaaagtattaagaagttggcatttgaataaatctgcagaaaggattaagcgataaaatcttttatggttaagtatacgttttttgcaattaagtgggtagttcacaaaagaagttcatgtgcgataagaagagtctttgcataagttaagaagtgaaagttttgacaaagtgttagactagatgttttgagaggacttcgcgagaagaaccaagtgtttcgcggagaagaagtatgcgagaaagcctttgagtttaagttcgcgataagagttctatgcgagtaaaagttggttagctcgcgtggtaggttttcttatagtaaaactataaccatgtgataaggttattcgcaagaaatgttaagtggttgaagttattcacggtatgggttaggcgagaagcaaggtttggagtataatactcgtatttctacgagttatcaattttactcacactgaatttgtgatatacacaatcttctactatattcgactcaaagccaaaagatgtaattacttcatgaaatttatgataccactaacgacaggcttgtctgagacaatagatggatttcttcaatttgcacaccataaattttaaattattagatattaagttttctagtagtactgtcacaccctatcccaaaagacatcctcaatatgcccaacatgtgacatgaagtcgatcgacatcattcttcttctaacgacatctgttgactctgattgacttgtaacccttatctagagttggctttagatttggctacctaaatttaattgatcaaatctaaacgattgtgtactaaaaatagtcaaatctaaacaatcttgtacacacaatcttaaaaaaatcttttagatttggctacccaaacttaactgatcaaataactatcgtgtaccaaaaatagcccaatctaaatgcttgtgtcacaaagaaccttgaaaaaatcatttagatttgactacccaaatttaaacgataaaatctaaatgttcgtgtagaaaagttaaaaaaaaaaatagtttagatttggctaaccaaatttaaatgatgaagtctaaacgatcgtgtacaaaagaagccaaatctaaacgataatgtaccaaagaatattgaaaaaacttgtttagatttggctacccaaagttaaactatcaaatctaaacgatcgtgtaccaattctttttaaaaaaaaacgttctgatttgtttgcccaaatttaaacgaataaatataaacaatcttgtacaaaaaatagtcaaatctaaacaatcgtatacaaagaatcttgaaaaaaaatcgtttagatttgggtagcaaatttaaataattgtttaccaactatgttatgcacgctggatgtcaattaatcacgagacatttttggtatttttcattaggggcctgtgggttttttccattttcaaaattgttttatacagtgtaaatattttgttgctttgtatatttgtaaaccctgaaccctattgaacttggattttctcaagagtttgaaaggattatttttaagtaaagtaaagatgggaaagtagacttaagaagtgacttggtaagcatgttttgataggtgaaaagtagacttgagaagtgacttggtaagcatgtcttgataggtggaaagtaggaaaattaagaaataatgatttaaaagataggaaaattaagaggtaatggtttaaaagataagaaaaagttaagtagaaaagaggaaaattttggttaactccatggcctaggcgtttggccttggtggacggtcaaatgaagagctaataacctctaaagaggttatttgggtgagaagaaagcttgctaggcgacaagattaatgtggtggtgtatggccaagagggttaagataaccactaaatgtgttggcgaattggctttgtcaggcgagaagacttgtttaaaggttaggtatgcaattggggtttgttgttggacagcaagacaacacaaagaaggctatgcgagaggcttagaggttaataggcgagaggcactaggcaaccaaggctatgcgatgagaggttagccaagtctatgcgatgaagactatagaagttagctaggcgttttggcatgtccttgaaaatttggcatttttgttaggcaagatgaggaaaatgtggactcagttaagtggattccaggtgtcatatacatgcatagattaaatttcggcggtaggaagtgtcaataaagatttatgcaagcttcagtataaataggtcgcttcagatgaatatttctcccaaaccacttgtgcgattttgctgatattagcttcaaatgatcacaggttgagtctattctttattttagggttgttggtttaatttgaaagaaggaagattgaatttaagttgaaagaagagagaaaaatcattctcaagagaatctcgagtagtgttcacttcaaaaagctatacaattcatcacaaagagcttttggctacaattttgaggtaagaaagctacgaccaaagaagcacacagtaaaccctgtccgcgaaggctgtgcgagatggcctgtgtgaggcatgcgcatgacaaaccttttgtgaggttagcacatggcagacctgcccaggccatgcacgtgtgtgcctgcgctgtcgcccaccccatacacaccagacatgtcaaatgggtgtttttgggctacttttggtatttttagaattgttaagtagagttaagatgttttcttgatgaaaggatattaattggaattatttcccatcatttcagaccaagaagaaatcacgcaaatctggcgtttgaattaatcaacaaaaaaaattaagagaaaatcttttatggttaaatatatgtttcacaattaagaaagtaactcgcgaggaagttttgagaaaagaaggatttgcgataggacttataagtctaaacgctcacgagagaaagagtattcgcgatcgaaaaatgagttattgcgttaagaccttcgaagtaaaatgatcatgggtttagaatcatgaattatgttgatttttcttagctttgttctcgttggaacgctgagatttcgtgattcttagactgtttgatgatggacgaataaccttccctggagttgcttgcttcttgagtgctgaatttgttggctttattgttcactcatccaacatggtcaataacgaagaaaatttgaaaagttcttccgctaattttgaagagccaaagtatgttcttgtttaatattttctaatgaatgtcctattttggaaggcattttcttgtttagttgatgtaatgatgttcataatcacataatttttctggatagccacttgaatccaattttatgattttgcttatatgcaatttgtgtctttaaaactttttttaacgccactgaattcatgttttaatattatgttctgtattcatttttgacaaggaaaccaaaatctctcttatttcaaacatgggtaaatcttctagagctatgatctactactatcactccattcatcctttgccaagtgatagaactgttgaactttttggttttaaattttgacatgcacagtcgaatcaacgaacctggaaagtgctgcttactct

SEQ ID NO: 7606 - DNA, 2167 bp, Cucumis sativus
  Intron number 1 from transcript Cucsa.252040.1 (locus Cucs a.252040) derived from phytozome v7.0 (chr-ID scaffold0222 9; pos 1054694 to 1056860 reverse strand)
accgcacagctcgccattctcgaattaggaagaaggtaattccaccctctaatttgggtcaattttaaatgttgtgctaattcctcctttctcttgttcaacattgttcttctctaccttgaatacttttagaggttggctggaaatggagggggtcttttgattattcttgcaatggatgtatcggggtttcattttatcaccctatgttatgtgctaaacaattgttagtgtacttccctttggatattgtttcgtttttgtttttttttttttttgatagcttatcaattcattgattttttttttcttctctttttagtttagaagttctggttagactacctaataggttacttctttcttagaacattgccactacttcgttacacaagttatgggtttctgaagattgagggaaaaagggaacagaataaagaaattgttatttgtcattgctgcgagtcaaaacttcaaaatagaattaatatattttcaaacgatagtcttcatagctgtaatcaaaacttgtttcgtgataggatctgctaagatttacatttctctcctttggaactcagatgacttgaaagtagatttatttgttggagaaaccaaaatccttaggaagaagtaacttgtacaaggaatagacaggcaacaggaggttggaccccagaacacaaaatacgaaagatatccccattttatatgtatgttagctaagaaataagcctcatatgtggaaccacaactaattacaacggaaatggtgagatggtgatcgcccagagctggaggcccaatatgttactagaacaccaacccttcaattatcaatgttgagcaaaaaaaacagggttactatatgttccagcgtgagtgttgaatctaatgctaccattgtacaaaggaatatgtcctttttcggatcttttagcactgtaattctccagtaatgggacagggtagcattatgcataggacttcagagacatgaaaagagcaacaaggtaatgctcagtggagaaaacattgttgaaagcatttccttgaaccctaccaagttacccaattatatgctcgaactatattctgtgttccactgttattcatgtggaaggtacgtgcagcatgcacagaacaggaggatcatggcacatgcacctgcatacaatatgaatcaagttcatgcatccagtggatgactagtttcaaatctaaattttccttatccatggaactaagcacagaaacttgcccaatattactaaggagatccaaatggaagataaacttcagtcagtcagccatcttcaaggaaatttgcactaggacttcctacggttgtggtgattgtgtgagctttagtaggtttaagttcaaatggaaggttttgttctaaagattcaagctactggatagagttaattgacactatttctatgaagcaaggatttagttgaacatttagagagctctgttgaccttgatgagagggaagagaataagagagccagagattggtgaatcagtcattatcattgagggagcatgtgagactgacacttttttttcattactattgatgcggacaatgttgggaagcatttttctgaatcttgtgggttggattttgatttcagctttcttgcatgttcactgtatccctagttatagaatcttggtattgatggttttggaaggctgactaagcgagggaggttgcttaggttgtactttactagggcaaatcggaacaaaacactacatgcttgacctgcatatgacacttgggacgatagcatttccattctgccataagatctgtgttcaactgaatttttttaaaatacatttagaatggtgaaataaagttaataggatttttaatgggaagtatatcctcccgctctaactcaaagatttatggataattctctttaattaaacatctgaacgtagtacatgatcagttgaatctttttaatcttccttttttcatacatctggatcccttcagaactgttctggtttacaattgttgtctttataatagcaaattgatccttgcgggtatagatggtagatactaaagtacagttcacctgtacaatcatcttttgtcttaggttgaaggaacaacggagaggccaaggttatctgt

SEQ ID NO: 7607 - DNA, 2108 bp, Cucumis sativus
  Intron number 7 from transcript Cucsa.012660.1 (locus Cucs a.012660) derived from phytozome v7.0 (chr-ID scaffold0016 4; pos 343877 to 345984)
ggtgcaggtatttttcttgtttggtcaatatttaaccttcaaatagtgattttgttaagggatacttgggcgctttttttgggccatcttcttttgttcttaaccatctttaggttgtacatcttccttttatctggtactttttatctttctcggctgtgttgctccctttcaattgggcatctactttatttttaatgtctcccattgtactctttgatatttaatttatcattacaacccccccccccgtccaagatgaagatggctagagatcctttgtttaaaccaaaccaaaggtccttcactatggcatgtttgtggcaggcgatgttgtagaatcgattgaagctagaagccaatggagcttggttcaagtaattgtcattccaagaagacattgtggctccctttcaattttactaaccttcgagtgtgcacccagttttttactttcatgttggatttccatggaccccattgggtgcgttgggagaaatttcctggctccttatttgacagtagtagttccgtttcgaattttgcatcaattacttttctgcataaagctattcctccttacggaacctccaagcccatttaggtagtaaagcatagttccttctcttcatgttgtgcaagccaaggacacctttagagaattgaatgaggactttctcccatttcaccaaatggaagccatatctgttttcttttcaaagaaagtttctaaaagaggttccaattatttagcaaccctgttttgcatataaagaggcaaatggtaggatgataggttgctcaacgttgctttaattaaagtaagcctgctactcttaggtatgagttgcttgaaggtcgaagttttggctctaccttttccacagttggggcacaaaatgcataggataggaccaaggctatccatttcggagaaaacaaaagtaagctttgggcggcaaagttcccaccttacaacgaaagttagatgcaattaattccaactgattaggttcaatttggagaaactgatatatttgtttgtttgtgctgtgacccaatgattcttcaacaagttagaatcattggaaatttgaggtggtttggctaatgctaattcttgcccaatataaaaattgttaaattaccaatgaacccaaaagcttagttgatggttcacacttcacggtgtaattatttcaaatacttcaatacttcccccaacttgtggacttggaaatttttagaaggccgaacaaaaaaaagtaaatattaattgggaaggaaatgacaataaagaggtttgaacagaggacctccaaccttctatgatagcgcgttaagtcaccaatcaacacaaactgatagatttagctaaatttaattatatcaatacttcaacaaaatcctgtgatcaagttattgtgcttcatatctacttctgacaatagccaaataagacaatcaataaccaaagcaaaaaattagacgagagtagattaacttgccttatttcctcgtagaagaattttttattttttggatctctcatcaataacgatggaatagtttggctttctgtaacttatttggttggtcttatttctcttgtagtttggttattttttgtgcgattttcctctatgcttgtatactctttcaattattttcaatgaacatcaactttgttcactaaaagaaaagacaagaaattaaggctatagtctcattcttagaaattgttatatatagctttctaaatctcccgttcagtgaaagctgcttcctttaggacataaatgtcactctttcaacaatcatcatatgtcatattattttaaatgttgtgagatcttttttcttttcttttttttgtaattttattgttattcttattatttgaaaaggaaacgtaacttctaattgcaaattcgggtgaatttcctctagagtctatttcttctttatctgagtatgaattgaattatgccactcatatttgttacgaaaagactattgttaatattaacacaattgtgatttgttctaattgtctcttgacttttattcaaggatcttgttaagaaggatccaatcaggcggcaggt

SEQ ID NO: 7608 - DNA, 2712 bp, Cucumis sativus
  Intron number 2 from transcript Cucsa.103340.1 (locus Cucs a.103340) derived from phytozome v7.0 (chr-ID scaffold0092 7; pos 2142593 to 2145304)
ctgagcttttatcaacatcccaagtaagttggcactcttattaaataccattattttttggtggcgttggcccttgcactattcccgtgtgtgacagtcaatggggtgaagtggtcctcatatttcattatctattctaagaattcaaaatgttggatgcttattagttattccgcagaaaagcaattatagttttagtacaagaaatgcgtaaattatttgtgtgtttatattcaaaactagttttcattgagaaaaatgaaaaacatgagtgggagaaacaataaagtgaaagcctaagacgagaggagtctgaaaacaaaaagcatcttaacctaacaataaagccttatttagggtaatagttatttacgtgatgggcaggggagaaaatattttgtgtctgaaatcagtaggaccctcttggtaatctggtgattgccttacaatttatagtatgtgaggtagaggagaaagactgcgtttcatagttccttttggggagactcaagcctagtgaatagcataggacgttcctcttctcttttatttaatgttcttctggatttgtaaacttgatccacatagggagtgttgatccttggctaggaaatgaagacattcccataacatccttggttattgatccacgaagggagatgttgatctttgtggctaggaagtattgcgtgttgttcattcttttttgaacatgttggtgcgagatgaatttcagtttaaaaggtagatagggatgatattggaaaatttgacttagagtatgtattttatatcattgatgcaatggcagtgaagtatatgtattcttctgtccggagatcaccagggaattataaaatggaaattgttttttgtgaatgcatataaccctaatgagatgaaatgcaaaacccaaaatctgtccaacctaccccaccccagagaaatttatttagcttggattgagagaacatgttctacctaatgcatgacggccagctataaggtgatgggccaacaatttaacagggcatgtggatgattcctctttcctgtaattgcacgattgattccctgttccaaatagttttctaagcatgcaacaacaaaatcctctcaaacaaggattattccaaaggtggtatgtggctggcccatgtttgcctgataagctggcaactagggtcattggatagtctgacagagaggtcaggaagaaggaactaggcaccaccttcgaaacagttagtgaactccattctgcaacatccaggacgccctccccttgcctccaatgatgtccccagaggactaaccagtgttgatgcaagcttaaaatggatttagtcaaccctctattttcaacttgaagcttgggttcctatcctaaagaaatctaaatctggttttactttcaaaatatattcccgaactgcattgatcttccttctgatttccaaatttctaagttttcaatcacgatcatcgttatataaatggcccaatctagtgggcttctcaatgttaattgaacaaggttaagttgtcagatctgcacatttggaatgaaaggaatcattgcactttcaacgttaaagaaatggactttgcccatttttttaccatcttttgtatatatctccgtcttggtgtaaacacacttcatttttgtgatcgtaatcttactactcttatagcttaatggaatgtaatctctcatggctctttttccctttttaatttcataatatcaatgaaatagtgattaaatctctcataaaaaaaaaggttaagctgtcagatcttatccttcaaagcttccttttgttgtccttccttttttgtcatctgaatagggatgatgtcaagcatgatttcatctccatactcccttagccaagaggcttagctggtccactagatatatgttacacttgccacttccatgtaaataattgaagagtccaaagctttttagcatcttgagcagacatggtatggtgctcttgatgaggggactatgctacctgaaacggagatgaaaccctgatgacaacgaccgatgctgtaccttaatcatgtccctcaactcgtccttgagttgaaagatggcagttttttagtaggagctttgcccatcttcctcataagttcacagcttctaattttagtaattttcttatgggactctttagtagcttttacctgtctcagggaaaacaagttgctttgaactttcttgagggtcttagatagcattgataatttggtctgttggatggtcaaatgcttgttattgcaagaatcgtttggtcatcatcagctactagcccaacgtggatatttttatattacatgtttttctcatcaagttgctagcctctaaattggctgaagttttctcagttgaaataagaaagcaacggccatgatgctgaaatgtttgctttatttgtagtttattttccttatttgtagaagtaaagttttactgaattggaaaatttgctttcttcccgagtgttctgttattgttggaagcaatctgtcaaatgttggtttgggcactatctaagtaactttttttccaaatatgcatcagaggattctggaatattcaaagttgcagttccctattccgaataattaatcagtaattctttgaacttgttcgactgtatttctaggtactagaagccagagcacaatttc

SEQ ID NO: 7609 - DNA, 1037 bp, Cucumis sativus
  Intron number 2 from transcript Cucsa.356170.1 (locus Cucs a.356170) derived from phytozome v7.0 (chr-ID scaffold0357 7; pos 918734 to 919770)
gcaaaacggaagttacaaaatagaacattagggaatctcatttgttgcttaagtggactgagacctgaacagtgggatttgtagcttgcataagcagagtttgctttcattaacatgaagaaccgaggtactggtttggggtaaccttccccttctaaaaaggaagggctcttccatttccccatttcctttcattttatcaaataactagtttttgtaggttccaagctccaaaagaaagtacgatagctacccgaataaaaaaatacacatcaaactatattccaatattaaagaagagattactagtttttcaaaaggctctctctcacccacgataaagtgactcaccaaaaatttgtcctcctttcccacaccctaactctctatttataatatagactccctagctaattaccaccaaaccccttgctaatatccggctaatgttaccaaatatatgcctcttagtactctcacggaagattacattcaaatggtcatcgaggatacaagaagtcatgaagtagcacagctttctttgctaagaaacaattccatctgccatacgactgaccttgttttttcttaaactcaacattgccttggtactggtgacactacctttttttggaaagatggctgacatgattgtggcatgctctctcttgtcctcctgatatttttgttgttgaagcttggctcactgattctgagactttggacttgtattttcaatgtaattttactgaacgtgaagacatgaaatgcaaatatgggtatctttgtctattattttgtcttctatcagatttcgtatggtgcatgattcttggagatggactattgactcctcatctacgtttactgggaaatctatgattaatgacttgacaagtgctctcgagccctctaaaacggatttttattctatcatttgaatgaatcacttcccgaagaaaattaaaatttttctttgagagcttagttataaagctataaacatggctgataacctctagcgtcgtaggccttat

SEQ ID NO: 7610 - DNA, 1696 bp, Cucumis sativus
  Intron number 1 from transcript Cucsa.385970.1 (locus Cucs a.385970) derived from phytozome v7.0 (chr-ID scaffold0390 4; pos 1155005 to 1156700 reverse strand)
aatcaaggagctgctctgcagaaggagcttattcggtatattttcttttgccccttaatcctttatattcttcttatttacatttttatctatccatttaagaatggaaattcaaataatatatatttacatatgtctatcataactttatataatgttatcatgttattgtcatagcctctaatacctcaattataatcatatattattgatagtgttaccaaatctttttaacatattttatcatttaaatcaattattcttttaattgattttcttcaatatttaacatgaattttccttctggcggttttttttctttatatatatatatatatataaagaacaagtatatatggtaaaggtgtaaggtgttgggttggggtagtgtgaatattattaataattaaattgttagctatttaacgttacagttatttatttattgctgagttcactcgtatttttggatggctagcgtcttaaataccttctactccatagaaaataaaataataataacaattatagtatttttttttctttttcttgaaaaatgtcagatacttctgttcttctctatgtaaagtaattatttaatgctactaaaattaagtttttttgttactatttttttatattgtgaggttggactttaaaaagaaactcttacaagtatagaaaacagttagatttgctctttacataagatttgagatacaattctttttttatttttaaggaaattttccggaaataatttaatatttttgtgtttaatagaaaatattacgtcataaataaacatgaagcatatacggtcacgtgggcgaaagagttgacggtgattaattatctgtcaatatcaatatatgatgaaaaataaaattaaaaaaattatcaattcttggtagtgtgaaagcaacgtaaacctactaatactaatgaaatagtcatcgtggtaattatatacttagtttccataaatcaaatttggtaattcttttctctctctctctctatatatatatatattattttttatttacatgtcacgttgatgattatcctgatgaaatgatacggcaccaattgatttatgaagtctacaatgttcttaaataagttaggattagcacataatgtccatatttaatttaataatggtccaaatttaattagcattaatacatttatttattgattttggtaaaagcaagcagtaactgattttgattggttaattaatgaatttaatagtttgtgtagaggtctagaaatatatgaattcagcgaaggtgattagtatagattttttgtttttcaatattaaattctaccaataatgctttagaaaaagactaaaaataggacagtaaatgcatgggtacttggtcaaataaacgcttattagaaacaagtagcgaaataaaccgtttctcggaaaataaaaacaaaaagtagtcaaatgtgaataaagaagaagacaaaaaaagacctagagggtaaggcaggtccatcgtctcatatttattttactaaaaataaaaatatcattttcgtcttttttttagtttggatttattcaaatttagtttaccttttctgcatatgttttgtttgaatgattgaagaataaatccttgaattgcaatgattttatgaatcagattcctgaacgctgggatatttggga

SEQ ID NO: 7611 - DNA, 7852 bp, Cucumis sativus
  Intron number 3 from transcript Cucsa.142470.1 (locus Cucs a.142470) derived from phytozome v7.0 (chr-ID scaffold0107 9; pos 732770 to 740621 reverse strand)
tgaaagccaggaagggtgctgatatccgccccgtggtattagttcattaccttttttttcttataattaaataataaataaagcactatttcgttgaaaggttctaccacaatgacaattattttgttaggcaataaaattttcctttgtagaatatcaacacaaaaagttccaatggacagtagttaacgaatcacaaaggggaacaaaaaaaaagtagtaatgcatgcaattctttttctagatttgaaagtaaagaattttcattaaaaacaagaatacaatagagaatgacagatatggtgcgatctttttggcaataaggcttaaggggtgttgagtgagctctttttggtgccgccttttttcaacttcttgtaaaatagttcctctacagtcttccgtcgatactgattggcaagctttttctatgctcccttagttatttttccctattattttgcacattcaactatctattaaaaagcagagcttattttcaataatttattcacaattgtagaaactttgaacaccgtagttattatggaaaagaaatgaattcctcttccatctcccacttaaagggtagaaatgtcctccattatcattttcaatggaggctttatctttaagtattgctttttgatgaaagatacaatagagaaaagttagtttacagagaaggaggaggaaccattctttctcctttttagtttctcttccatctcccagtgaaagggtggaaatatctttcagtgtaattttcagtagaggctttatctttaagtattgcttttgatggaagatacaatggaggaaaagttagtttacagaaaaggagaaggaactattccttctctgtttttttttttattgagtttgttgattgtttgaggagttttcagttaaaccaaaggggtaacaaattcattagacaattccagattgacggatatcatttatgggtgaagtcattttggtgaatctgtttctcttttagctattatttggaggaattttttttccctttttgaatttatagtctaactaccaccgcagttcaatgaagatgcttattgtaataattttccaaccggaacttcttttgtatcccattcatattatcaataaatggttattgtttcctataaaaaaaagaaaaagaaaaggaaaaaatgttatcaacgtaatttactccttcgatgaagctatatacaagcgtatgtatgccctcaaaatctgtaaattgaaaccccaactttttcgtgggcatcaacattgtactccttcaatgaagcccttttgtagttttctcataagaagagagaaggaaagcatttcaggaggtagtggttattaattatataaatgaaggaaggttcctcaatggggatctataacaaaatgaaggaaagaacatcagcctctgcacaacattgtaggagattggattgaatgcttgttgtatcaacctgccaggatttacacttgttcaacacgtaccaagtattgttgacaagatattttccttccagctgagttccagatttccacttgaatttcatctggaaggttaatggatctgattcatagatgttttggacccagttcaataattgattgaagtgtaatatttaatccacacaacctttagtttgatgatggattcaacctcatgagatttgggttagataacctctatggtatttgggttagattgcctctatggtatttgggttaggttgatttgaattagtttgacctctctttttaatttttttctttttgaagtttgataaacgaaatgtgcgagtaatacattgcacttttcatacaacttctcataaagatctgaaagacattgatgaagagtcattggcaagtgtaagcagtgaagaactggaaagagaagacggcgacgaggatataggaaatacagatgaaatgctggacgatatgaacaaggctttaggtatttattccgaactaaagaggttcaattacgttccattaaggagagcttcccctttactccactggaaaagaaaaacatacctcaaaaattgcattccatattggaggcctgtgaaatctccttagcctaatccaaaggaaaacaggtcattcagtggatatccttcagggttgaaaaatgaagattagcttttgaattacgcgaggacttggacaaaaattaaggtggctgatattaaaagattactaaagaaattaatcaggacattgtactaattctggaatctagaagagacagcttctaagcatctagagctcaaaagatgttggctggacttttgctgtaagctttaaagcgtttcaagggcattcttacaaggtgggatgaaggtattttgagagtctgacattcctaaagcagatttctctttgacaactagagtaatgtgttgaaggcagtgctggcaagattttgtggtctggtagacttcctcgagttcctctgggcactggattgaattggcaagacagttttgaagcagctggttgcatcttcttagatttatctgtcctttcatcttgaagatttgggtgtgtaaaattttagatttgagtgactaattctgagagagtttaaattttgcttggtatttagctttctattgatgtattgtctttgagtggctttgattagcttgttattttctgttcaggtttgtttttagatttccaccatatttatgttgcccgagtatagtctttgtttaagttttagcttgtatttttccttagttctttttgcccttagtataatgctgttgtactttgagttttattctcattatcattaataaagaggcttgtttccgtttaaaaaaaaaaagaaatgtgaaacaactacaaaattgtattcatatattttcatacattgaatgaaattagagttctatgtcaacttttacattatgaaggactaaacttcaagtatttgagccaataattttctaggaattattggagagttaaataatctcaatgagtggaatgcaatcagaaaaatatgtattagtaattttattatcataatacaaacaaactgtatttctttttgttagaatcaatgagcttggcctaaagaaagatttaccctaatttcctttcttttttttatcataagcttattgtctatttatttttcctttgtatcttgtgttaataagagaaattaataagtagatcgtggtttttctcttggtactcgggttttcttgtaactcagtgtttattttctttaccacttttaacatggtattagagcggggtaaagacgaaaccctagacacgatagatgaaacccaaatagagacagacaagattgctgctactgccgctatcgttgatgccacagtcactgccgtggaaaagctgctccaccagcttcagaagacgtcgaggatcacaatgggtccacccttgaagttagccgcgtagcctagtgaaggaaaccaattgcatgagccttagctgttcgctcatgtgcgtcgtccaattccttcgccgttcagccgacttactctcatctgttttcccaagtccaaccacatacctttttggtcagccgcacatccacacgccgccgccgccgccctaggtttacgaactgcctctcgtctgtatacactgaggaaacaagtccataattgcaagagaggaactatggatttaacctcctacgtgtatactctctctactctagcaagagatggtcatgtgcagagagacaacatcagaaactccgaatgatggcatacaatatgacttccttgccagtttcaattccaagtttgacattgtttgtggctgtatacttggccagagatcacttttctcaatagaagtgggttgtgaagtccattttgaagaaaaccatacgaatgtcgggagtattctgactactcttgctactaactctgctgccttcaatgctagatcctcaacccatgatagtgagaagaagagcgggaaaccgatctctatctgtgagcattgcaagaaatagtggcccactaaggattagtgttggaaacttcatggtcgtcctccaagaggtaagaaacgttcctcaaatgataaacataactcagggtgtgcttgtatgagtgagtctactggaacctctcaaccatctggccctattgtaaaccagaacggtcccagtccaccctccactttaggagcttttactcagttaagtatgccttagtcccttaatcttatcagtgtcgattggaagaatccctggatcctggactcgggtgttatagatcatttgacaggttcttctcagaattttgtttcttatattctatgtgttggtaatgaaaagatcaaaatagctgatggttctttagctccaattgctgggaaggggcaaaattttccctttaaagggttatccctccagaatgtgttacatgtgcctaagatttcctataatttgctatctataagcaataacactcgtaagctgaactgcaaagctactttcttatctgattttgtttcttttcaagacttgagctcgatgagggtgtttgcactgcccgacatagcaggagactctatctccttgacgatgataccttcgctagtagtagctctaggactagttagtctttatattttaatatttctgaacaagattgtatgttgtggcatttctagttgggtcacccaaactttaaatatatgaagtatttatttttccatctcttctctaaaattgatgtctcctctttatcttgtgatgtgtgtatgcggaccaaacaacattaggtttccttcctctcacagtcatataaaccaacccaatcgttcacccttatccatagtgacgtttggggtccctcaaaggtcattgcctcctctgggaaacagtggtttgtgacctttattgatgatcatacccgtcttacttgggtcttccttatcactgataaactcgaggtttcctccattttccagaacttctatcgcattgtagagacacaattcaatgcaaaaacgagtggaaaaactgtcaccttttggaattagcccgttccattatgctttctacttcccatccttcttatctgtgggaagatggtgttcttactgcaacttatctcattaataggatgccctcttgtgtcctccaccttcagacgcccttagattgtctcaaggagtcgtatccctccacccaccttacttctgaggtcttccttcttgtgtttgggtgtacaacctatattcatagagagtctttctccacattttagagccttcacagccagccttgactttgtcgtgatacttaaaaatgtgcacattgctttagagtgccctgagtggaaaactgctgttatggaagagatgagagcttttgaaaagaataagacttgggagatttgtactctttctaagtgacataaaactgtgagatgtaaatgagtgttcacactcaaatacaacgcagatggaactcttgacagacacaaggccaggttagttgcaaaagggtttattcagatctatggggtcaattattcagaaacttttttttccagttgcaaaactaaatatcattggagtcctgttatttgttgttgtgagtaaagattgacctttatattagcttgatgttaagaatcgttcttgaatggagacttggaagaggaagtctatatgagcccccacccctaatttgatcatcgggtttgtaaacttcaaaaatcattgtatgggctaaaacaagcaccgagagcatagtttgatagggttactacctttgtcaagtcccaagggtacattagatcacacattgtttacagaagtctccaaaactgggaagatcaccgtgttgattatttatgttgatgacatagttttaactggggatgacaccgctgaaatcatccaattgaaaaagtagatgggtgatgagtttgaaattaaagacttggggaatttgaagtatttcctttggatgtaggtacctagatcaaaagaaggtatctccgtatctcaaaggaagtatacctttgatttgttgattgagacagatatgctgggatgtcaatcagtatctactgagactcttattgaattcaactaagctgaaaaattaaggtgataaagttccagttgagaaagaaaaaatatcagcgcctcgtggaaatgttgatttacttgtcacatactagaccaaatatcttctatgctatgagtatcattagctagttcatgcatgctccttctgaggaacacatggaggcagttaacagaatcctgaggtacttaaataactcctggtaaagagttgatgtttaggaagaccgataggagagctattgaggcttatactgatactgattgggaagggtccgttgttgacatgaaatccacctccagctattgtacctttgtatggggcaatctcataacctagaggagtaagaggcaagggcttgtggccaaaaacattgctgaagttgagtacagggccatgagtttggggatatgtgagaaaatttggcttcagaaagttttatctgaccttcattaggactgtgaggtgctgatgaaattattctgcgatgataaggcaggtattagcattgccaacaatccagtttaacatgatagaactaaacatgtggagattgattgacacttcattgaagaatgactggacaatggtaccatatgcattccttacatcccctcgagccaacaagttgctgatgttctcaccaagtgactaagttttgactcacgtgttagcaaattgggtttcactgatattgacatcctaacttggaggggagtgttagaattagtaggcttggtccaaggaaggatttaccctaattttctttcctcttttatcataagcttgttgtctatttatttttccctttgtatcttttgttaatatgagaaattaagaagaaagtcagatcgtgggtttttccggtactcggtttccacgtaactcggtgttcattttctttaccgcttttaacacttttatctttaatttgggttagttcggttccgtccaacccaaatgattatttatagggataaagttaccaatgtagactgcaatgctattcttgataaataaataaataaatgttccgtttgtacatggatgctcttttgttcatctgattcaagttgaaaaatattttaaagcatttcttaaggagaaaaatattgaagtacttcaaccagattctacaccttcttttttgacctgtaatggttatcctgtgattggatctttaggaggcttatgaacggaggcagcaagactttaaatcacagtttggttcatgaagtcaatcatttatttgttcgtttatctgcctttttttcctctttgggctatggtatgttggtaaacgctgatctaggtcaatatgttattacttattaggccatatttttggattgattattgtttgaacatgaatttttgtgcctgttaaaatcttaatatagtgagaattatgttccatgaggactgaagcttagatgcaatttattcaatgtgggggatttgatgtatctaaactccccattatttttttattactacctcacgtgtcttatactattcagaggaatttagacagtagttttttactttcctactttttttcactttttgttaggcgaggccatactgatgcaaatatctttactagaaagtgattttttttttcatgtcttgtgggcatggcttatactagacttggttattagacttgtggctttatttactatttaaacgttaatagctgatgacactgtgttcccaggg

SEQ ID NO: 7612 - DNA, 4596 bp, Cucumis sativus
  Intron number 4 from transcript Cucsa.189450.2 (locus Cucs a.189450) derived from phytozome v7.0 (chr-ID scaffold0130 5; pos 213986 to 218581)
aattaaagagaagttgaaagaagccgaccaatgtatttgcatttcatttggtgaaaaatctagtttttcttaaatactaagacctatttattttctttccatattgagatgacatactttattggaaacaataagagttgtgtcaaaatgtcaatgatctccaatctttcatttccctattacaagtgatggattgtgttttcctttttcaattaggactagtggactacatgtaaaaacacagagaggttgatgcgtttgagttttggaattgtatatatctttttcacctttccatctaaggggatatagatctagttggtcaatgctagtaaacatgaacgttttgtttataggcttatagccatatgtccatatttgacatggaaagatgaagaaatgaaacatcccaacaataatcataacggtagagagagagagaaaatgagaagaccaagagagaagggagaagaagaaaaagagagcttacggaagaagaaagaacacccacaaagaaagagcttactaaccatttgggctgcaacaagggtgaggtggcagcgaattggcgaacaatagaagaagactaaagaagagcaaaatagaatttacaaaaggagaagtgataacttctacgaatttagagtggattacaagaaattcttccaaatagctatatgattacttcatagataaaaacccctgcgcattgaaatatgtcatatgcatccttatttgcacacctacacataagaatttgaggttgaggaacacatcaagaaaatgtcgaacattgatattatttggctgtgttagtaaatactgcgttgattactcagctctaaatgcagcaatgatcctagaaaagtccctgttttgatagaatttgatgaattgctttgagattgcctctctttcccatgcttagcttgaagttgggaaacctagagggagagagaaacatgtatggcagacaccattgtagatggtcatcagtgtttgtggcaccgaggcttagttcccataagaagattttgatctttttagggtaagagccttacaaaacggtgtgataaagctttttttttttattgggggtcatttgagctcgtgtaattaaccataagagattttattgtatagctgttagagggatctaaaggctaggtccatacatcttgacagggatggagactgacagtagatataagatttgatgacgaagcccattcaacaatcttcaacttgtgaaggttacgacggtcccacgattcagtttcaacaacccatacataaaaaattatgctatttgggtgaagggcaaggtgaaagagccaaggataactgaaggatagaatgttgcaaccgaaaatcacctcctaaccttgccacaacatctagctcttgccttattcatgtctaaagacaccattggagagatcgtagaccgaagtaagccaaaaggagaaaccatctgccaaagaaagatgaacagaaacagtaaaaaggccatgaatgacctccaagtttgtaaagtcatgctagctccacataatgagaattttgccagaagagtcaattgcatcaatagctgtccaaccaataaagaaggaactttagatagatttaatgtgaaagtagtcaacctgtggaagcttggttttttgaagaagaaaaataccagggcatgttgaaggatcaatcttttaactagagctctttttctctaggagcataatctgcggacattttaagagaaatttcatttattattctgttgttcctccataatggttaacatgacaggtttatcatagtggatggtagattgtaaattttgtagttctctctatagttcgggtttttcgctgttaatgtgaggggggctggatggtgtagccatgatgcaaaggccaataggtttgatgattgcaactaattcgcttaaggtaagagtttgaaaggattttgaggaggatgaggcttgggtctgagttggtgaaaatggtatcgctgggttggttaggaggtaagtagaaaaaggattttcggttgggtggctctagtatggtggatggaaatgggatgggttgtgtatggtaggtggaaggatggagagaggttgttgttggacaccatcaccttggttgtgggccggactagataaatagccttcagtgttggagcccataaaggttgtggattgggcatgttcagtagtggaatgatattctttcaaattgagggtggtaatggggcttgcattaagagtgatggcagaggatggatccaatgaggaaggggaaagggatggagaggggttgggacatgggttgtgtcggaggagaggtatggtgaaaatttgtttagttgtagaaggaggtgttccagtggtagggtaaatcggggtgtgtaaatgggaagatggcgagaagactgcgacagtgggtggaggggcataagtgggaagagggagggtgtggggtggtggggtaggagtttgaaaaagagtattggtagtggaatgtgaagaattggtggtatgtggaataatagaaatggaaggagagtgggtggaggatggtggggtaggagttggaaattttttattggtagtgagtgtgaaggtatattggaattacttggggattcagtggttgggctgaatggtaggtaaactaaaatgaattttttagtcaagggagaaaaggataggtgaattaatggaggaacaatatgcataccttgtaaactgggtaagttggtttctgctggaatttgttcagtgtccgtgttgttggccatagtagtatgttgggtgttttgacgtaatagtgggccccggtctgttgtagagcgctggcaaacaatttggatagtgagagggaatcaagctacctccggtgggataagtaaagaggctgaaatgaatcccacgagatttggtttgattttcattcaagcggccataagttttagacctctatcagtttggtttgccgttgtaaggaaacctccaaaataattgccaataaatctgcaattttatcattccaatgggtaggagggaggtcagcgatctcagtccatcctccataagaggtagtgactcggcgttgaaaggctgattggtcatttgtgggctgaaatattaatcagaaggagccatagagagcccagtcggttcgttgctcaaatttgtagctaaggttgcatcaaataggtgaagaagggctttgacgagttggatagatttaatgatacaattctgggagactgagcatggatattctttctgatttcggttcaagagtcatgtagatggtagtgtttgtcgatgaccatggatgcccaacatgttgtggagacaaagtcgatcgggtagggatgagggcttctgttgtgtttggctgtctgtgcgactgttctttagtaaccacagcatatgattttgacttctgcttttgttgggtaggttcaccatgaaaatcggacagtagtgagaagaagaagaaccagccttgtttcttttcctccgatggtatgaaaaatttggttgtgagtcctgattggtgaagatgagagatttttacaaaaaagccctttttatttccttttttatcccacccaaatggtagagttttcttcggccagcttttgaaaaaaggcgtggttgcttggatcattgtacagtgcattgaaaacattagatagccaattcagggccgcccaggagagataaatagaatagatacagttcttaccttgttcggagatctttgctacagatccctttgattcattgagtgtggtggagaagattttttgatcaatgtgtattgactgggtgatggtagagcttaaggttgttgggcaagggaggaggcctggtggtctgagctaattatgggaaggcggcggatgtgtggggtttttgagtattatgggctaattttgacaattcgtggaaagttatggagccctggcagcgccattaaaaaagtgacttaaaagacttttctacaaggtttctttgagcttcagtggtaatttaaagactcctattctgattatgttcactaggagggttaaaatgggaaattgggtgactgagctagtcagttgtgcatgttccttatatgagtaaaagagacacgtgatggtgggtaaggtattggttattttggaaaggacaagcatatgaagacgttcaagaccctctcgaaaaattatgggtgatctttcccaatttttcttaatcagtgtaaaaagcattctccaatgcctggcattatataggttaagacttacatttgaggatattgtgtgtttttgttacatacatcaatgcgtaatattgtgctgcatggacacatgcagaacttgtaaaatgactgctgaaatttctctcccccctttactctttttgggtgtttctttaggtatttgagattctaaagttgtttgtttattaatttaatttaatttaattaattgctttgaattttatgtccttatttatgcaagttctattaagaagttgaagcatcaaatattgcagatcttgagggcaaaacagaccttaaaattcgggtt

SEQ ID NO: 7613 - DNA, 1295 bp, Cucumis sativus
  Intron number 1 from transcript Cucsa.306540.1 (locus Cucs a.306540) derived from phytozome v7.0 (chr-ID scaffold0297 7; pos 55153 to 56447)
ctaacttgttgctcaagttcgtgatcgtcgacgtggtgagttatttttatttcttgccgcaattttaataaatacatctaattcgtttcgtttaccattatgctaaaaatgtaatttaattttaattattggttaactaactaaatcaacaggatgctttcaaaactaatatttacgagtataataaaactctacttattctatagtgtgacaaaagtgaaaatttccaatatttataaacattttcaaccattttattatttaatataattttttaaaacattttttcaaaggaaagaaatttaattaatttattttttatggagattttgagtatgacttcttcttggatttaaataatattatgctttggtttacgaactttgagtttgtttctgtttggctatagttttttatgtgtaatttttttctccttagatgtttacttgtagacatatgtattcatttaattaaaataattataactaaatataagtcaacatcaaaaacaaaggaagaacattaattacttacgaacataagtgtaaaatccagaaatataaatatcttatgaatttaaattgacaatttatcactaagaaatgtaacacgtcttgaagttaaatgaacaaatacaaattaaactaatggaaggaaaaatacaacatttcagaatgagagaaccatacgaaaactatcctctgtttagagaatgaaaaaatattaaaataaaaacaaatctcaaactatgttttttcgggacctctggtatataagaaaatggaccaagttatttataattttagggtttaggtagataatgtagtaaaattttctacgtgatccaccatcaagataagtattaagtatggatagaagttcatctatcgatattattttttcttgttttttaaataatttaattttttttctatgttgaaatttaaatacgaaaaacattcttactatttatctcataataaaattacttaatctcagtttcctaatctttttttttgttttaaaaataaaggattttcaaattgtgaatgtaattttgcatttagttaatttaattttctaaatttggtttaatttttttcataacatggatggatagaaagtagataaaaatcttcaaaaaaaaatttattatcgaaagaagtgtttgtagtcttcattttcacagaataaaaagcaaataagtagataataattagtgtttgaatctaaaatggttggagtgtataatattggcaggcaattacgggattcttgccaacagcaggggttgg

SEQ ID NO: 7614 - DNA, 1753 bp, Cucumis sativus
  Intron number 2 from transcript Cucsa.352430.3 (locus Cucs a.352430) derived from phytozome v7.0 (chr-ID scaffold0353 3; pos 269540 to 271292)
aaggtgttcttccttgcttgacaaattggagaaaggtttcaacttcttgtagagccgaattttcagatgataactatcattcgtacatttctactaattgggtttttctgttattcttattccatcattaaaatatctgctaaagaaccccctttttgacatcccaattttctctgaaggtagacgagaaaataccatcacaatctggagctttcttattctcagcgttaaggatagcttgcttgacttccatctctgaaaattcaattctgaagtttggaatgatacatcttttttattttaatggtgataataacaaacgcgaatgtctgaagctcaagagagggcaatttgtgaaatccccattcacttctcccaccaacgctcacgaggaaaaagaacgaagaacagtgggaatggaggacgcaagtgcttgaaagaagatagaacgtattcaaatgcttcatttagtggccttactaagaataaataaagtaaattgaaaagaaaaatatttcccattgacaagtgtagtggccaataacttcgctgttatttcgtacagcgctgacaagaattctagagctacggaccccagttatgttagagtagattttttgggaatcaaagtagtattagcttcactaggaattccattttgatgttgctctttatagaactcttagaataccaaagagtccccttttcttacatccgtcaagtctataagaagaaagaatccgtcactttccttagcgctcttttatgctcaatgttaaggatagcttgcttggtttccatccctgaaaatggccttctgatgttttttcattgatattttggtgcgttggatttattctattaatcaagctctcctgcgagatgggtagttccttttgtggctagttggggtgtgtgctattcggagactttgaggttagagaaacaatgaattttttcaaacgcttgagagatcaccgattgaggtttagtcctttgtttgatttaatatgtccttgtgtgctttattaacgaagccctttcataattatgtgttaactgtcaagtcttatttcttttgattggagtccccttttatggtttatctccctttttgggttctgtttttgtatacccatgtgctattttatttcttcacaacgaaagtttagttattcataaaaaaagtcaagttgtagttaaatttcaatcagcattctgcacaattgcaacataaatctgtcatcacgaactgattgcattgatctgtatatttgacatctgattcatgacatactgaaaaacaaagaaaaaaaacactacgatggggttatatttgtcaacattgttttgaaagtaacatttcaaagatgaactgtattatagaatttgaaatgttttaaacctttctgttcattgacctaaagatgtcttgcacctatgtttaccaattgtatactactcttttttttgtacaaatggaattgtatgttaactcattttataccattagttttctacccgtgttgattgaaaaatatattgacaaacatatggtattttgtaccttttagaagaaacgatagtacacatgaatgtagttgtagtagtcagctcagatggctaaatcaatggtcaaatcatggatggagcgtattaggctattagctaataccttaaagaacagaataaagaacaataaattttattaatagcttttggcaccttgtttgtcatgttcgaacaggttgta

SEQ ID NO: 7615 - DNA, 1357 bp, Cucumis sativus
  Intron number 7 from transcript Cucsa.128230.1 (locus Cucs a.128230) derived from phytozome v7.0 (chr-ID scaffold0102 4; pos 292964 to 294320 reverse strand)
ttcatacaattggaagatagcgttgtttataatccgtgagttcgttttcatcctctttttaattccaggtctctagttgatacaggtgtgtttatttggtttctcctgcttttgtttcaaaccacgtctgcagaaaaagaatttaaagaacaaaaaaatcgaagaatcacagacaactactaaagataggtagtttaagattagatttcaagtgttgaaagctctgaacatgaactatggatgcaggtaagttaagccatgttgctaagatgtgcaacggggtgcgtgagagtattaattagtaagggatatattgggaatattagcaggataacaataaggacttagtggtaattaggtggtgcatttgttataaataaggggagttgggcaccttaggagggaatcatagtttctagtgattggacgtcggagagacatagccctctcaaaaaaccgttgattttgaaatttattatcaatagtacattgtagacatcttaagtgatattttctgtgttttggtatcctaacagtggcctattgggccatttcttcctctaggctatgttttcacccttgagaaaactagatgatttatagagtgacaagacagaaggacaaatgaacttctgaggtggtctttattggaagaattgctattacgattcccagttagtgttgtagcctaaggaattgaaggagaccattcttcaaaaatcaaatcaaatatcaataaaaaaaaatattgaatacatgataccacaggcaagaaactacaaattaaaatacaaaaaagaaactaaaaagggaaactgtaatttaaacaggaaactaaaaggatcattcgaggatttaaccaagagaaatatgaattctgcattagttggctagctttcccagcggtttggtttgctcccttactatgtggtcggggattttggatgctctgtgatgtggccacgctgcccatctatacacaatgacatttttttttcttaaatatagaactagttgattgacgataaagtcaaatctgttaacgacgcctgtacttttgaaaaggttctagttttaaatcacttagagcagtttgacatggttatctctatcaattgaacatcgttgttttggactactactagtgatgttgaaaccataacatcacattggttttactttgatttctttttcaagataatttaacttgttctatgtcattaatgagcattggagacatacttctgttttcccgttgttttaagttttatggaattttgaaatatatttccttcccatttctcattctttacaccgtacagcaaggccaggataccaaaggccggaagagtgtagt

SEQ ID NO: 7616 - DNA, 1217 bp, Cucumis sativus
  Intron number 1 from transcript Cucsa.196740.3 (locus Cucs a.196740) derived from phytozome v7.0 (chr-ID scaffold0135 7; pos 317130 to 318346)
ttgagtggagaaagaaggtattgcgtaactctccatctgtattactgcaacttggagtgttgatatttaattaattgggacttgtgaaatttgagttttcatccattatttttagcttccaatcacattcatttagtaattagattttgtttggccaatcaactgcattaggcctagatgatacgttgaggtttctgaaatcacttgaattacctcccttttgctgcaattgcaacttgaatcaatgctttgaatgtgtttgtagtaatggcatcaaatgtagctcccgttcccacgattcttaaaatatttttctttgcaagtgtatgattattttttttaaaaataaacgagatagttgattagattgagagatttgattcaacccattcaggtcaattcaaacaaggagtgaagtttacaattccacttttcccaagtcctactccctcaactcttagttggtccccattttctgttagtaggggtgttttgacgggctggttttttttgtatgcccttgtattatttctcaatgaaagttgttcgattgtattaaaaagaaaaacccctaatgaatggtgtcaataacattccaccttgggcttggaatcattacctatcttttgcaagaaaggaaaaaatatttgaacaaggaactcttcaatgaaagggaaagagactaggaggaggctttctgtttgtcttagttcttctgaacttatgttcctttttgtgttacggtgtggaaaaaccatctttaaatccaaatctactttatatccgaagaggtctacattgtccatttaaagggaattcccctaaaatctcctcatgaaactctataccttttgtttattgggacgttagacaaacactgaaagaaaagcaaagtttactccaccaaaaaatgtgaaatagcaacgaagaagtaaaatgatagtgtctttgccagcttatttaggaagaatacttcactgaaccctgaaggcaaaagtaaagtggaagccttgtttttttattgtttttttttgtaggaaaatcattagtgttacagaatatatcctagaaatgaatatggaattgatattggatttataaacatatgtttgtctttaattgaaaagctattaatatctgctgtagctgaaagtgagtccttcaaacatcttattgtttccacaattggcaggtggacatcagccagacgaggtggg

SEQ ID NO: 7617 - DNA, 3870 bp, Cucumis sativus
  Intron number 9 from transcript Cucsa.053340.1 (locus Cucs a.053340) derived from phytozome v7.0 (chr-ID scaffold0058 1; pos 115474 to 119343)
tgattgtcaaaaagcttagagaaggtattcttgttttaatgttccagcttttcatctcgtatatcacataccatagctgtcccaaactcttctgggaatgacataaatacacaatataataagattttcattgtattaaatcatctagcattggaaatgtttggtccaaataagaactaatctatggacatgggcgttgttgtagttcatataagtggagatgttaatatattaagttatttgttgtaccttggtttctcatgatgtcaatcgtcattcatcattcatcattcacaccctatgtttcttactaccgaagttattcgttaactttaacgaacaagagaacattaatgtccttgaaatagtatttttattattttatattttatatatatatatacacacacacatatataatacttttgtttagaaaaaaaatgaaagaatacaagggcatgaaaaagggaaattgcacaaaccacccttgaactatgggtttgttaacccttagggtgtgtttggggtggggatttagggggattaggcaaaggattatggcccaaaccttgtttgggccaagggtttccacttttgaggattaggattaaacaaccctacaaactatcctacaaattttcctacttcatcttatcataatactacactcataactctccctccaaacacatggtataataacccttcccccaaacgcatattatcataatactacaacaataatctttcccccaaacacatgttatcgtaacactaccattcatattccttccccgaaacacatattaccataacactaccaataataacactaaccccaaacacatattatcataacactaggattattataatcctaggattatcataatccttttcccccataactcattccctcccccaaacgtatccttaaagttttaatttgatcaattagccccttataatttatcaagtgttgcaataagccacttgtgtttgttgaggttcaatgagaaaaaggccatcatgtcaattaccatgtctataaaataaaataaaaccaaaatagaatcaagtttatggagaagtgtcatcagagacccctcattggcaaacatcgtaaattaatgaaggacgagacagcagtggcagtggaacttgaagcaacttcaaattcctgatcgagttagccaaaactgaaagaaaactgcccattgacatctacagtgaaactaaaagtcttgctggagttgcaacattggaacagaacttgacaatattttctttttctggcaaataaaatcaatatagaaagccaatttcagctatcgtaagatttttctcaatattgtagggtgttcgatgatgagtttaactcttttgattctttttggactcttgttcagcatatggcctcttggtggtaaacaaactacacaaagttgttttgtaattacaaccttctcatgattataaacaactggaagacacttaatgtttagttttttgttgaagggttttcttgacccctcgccctttggctgttttctacctattgttatatatatatataaatttctctgcttcttataaaaaaaagaaaagaaaaatctcaatttcagctatcataagattttctcatttatactaaaacccaggagtttgtaattttttcccacaatttctatggctgccagtgtcaatttggtcaaagaaatttgatcaacacactaaaacccagaagttcaccggaattgagatatacaaagtggaactgggaagttagatgcacaaattgatgtgattgaagacttcagtgatttcttcgttctttcttccttctccttttgcacctttgaactctctctctcttctctcttcaaagcaatttcttcattctccttctccaccttttctggccaaacgcagctgaatttgctacaagagtgttgttgccactactgcaatggcccaggactgccgctggtcctacacctccaactctctttagcatgacttttatcctatttatagatatgtaaattcacaagcttgccctttgctaactgcacatcaactaacacaaggggtgtattgcaactcaagtatagaggactaattggtcaagtgaaaactttaagggtgtaattgtaacagacctcaattcatgagtggtttgtgcaatttttcctaaaaaaaacaagcctactagataaaccccccaccctaaataaaaagaaaaaaggatatccagctaaatagggtattatctattgaacaattagaaaaaaagcatcaaatccaaagcccaaagcgacacataaagctcactaaggaccaaacctctaaacaccctatcatttctcatcccccaaatgtcccacagcacatgacacaccctagcaaactacaacaacccacctttctcgaaactctcccatcatcacacaaatatccctttggtcagctgtttgaacgtcaaactcctgcatatgtagcaaatccacatggatcttgcaaactgacgatgccagagaagtgatccaggttaatgcccttgaaatccttagccattactcataactagggattaatatacatatattaatatatgccactgtcgaagaattaaaagtgcataaataccagtataactaacctaatgacttgagttataaaaaaccatgttgggtgtgctgactatttgtgtaactgtaagcaatgaagagctagaagaaggcgtgctttaggggttttaacaagaagaagccacttcactagtcatccttgagcgagactttctggaagttttgtcatcagaaaatgttggcctttcctttcaattaaggcttagatatattctcctcaagattggttctttagtcgtgtttaagaagtcatggtagcagtttgtcagctcgtgtacttaatgattctttaaaaagatcagatgttcttagttggtttcaagatagctcagctctctcctttgtcctcttgagatgcatctgcctcaagctcttcaaagattacttcattcatggttatggttctctgaagtacttttgtttcctttcctaacatttcatttgtattgactgttttttcagttactgttttgattgtttttctgccttgtttggagtttgttaaactcttggtcctcattttgttagtatgtatatggattccggatttttttttatagatttagctctttgtacagttctctgtacattgagcattggtctcatttcattatattaatgaaaagacttgtttcctttaaaaaaaacctaatgacttgtaaggtaagtagtatttatttgtcaaagcggaagttaatattttgaagcttgagacaaacaaaactaaggccaagttctaagggaggaaaaatgttttccttctgaatcaaatccaaagcatctgctatgagaagattcgtatgctacctttacctctctttttggttgttttgagatgagctcttactataccagacttgataaattgtgatgtgatgtggttctctatgttttgaatttacatcatagaatgtactcctttgtagttccacttcaactctatttgagatgaattttagaattggttatattgaactcattgttatactgttggttaattgggattttggtaattaccaagttgagctcattcttttgggttggtgttctttgtaaattgtaattagtgttgcggttacttctggtgggattgtatttttgtatatcctcatacattctttcacaattttcaataaaagtttggttttcttttatgtgtgtgtgaagacattattgaccagatatgttttttggttatgaatatgcagctcaaggcttg

SEQ ID NO: 7618 - DNA, 6216 bp, Cucumis sativus
  Intron number 1 from transcript Cucsa.363680.1 (locus Cucs a.363680) derived from phytozome v7.0 (chr-ID scaffold0361 1; pos 1277159 to 1283374)
taaagcaaaagcaaattggatcaggatttcattaattggctgacatgatctgaattaattctatcaggttggaagatttgcttttaattaagccactactttgaatcgactagctgctgctgtttatatatttctcgttatgctggtaataggttagagttctatttgagtatttttcattgcttacatctagcatgtaaagttagaaaggtgacaatacaaatgactgtttttcactgttttgcctttacttatgtggaatctatcttggttgaggaatttgaaaaatggttggatattttgtgtcaaattgatgccatttctctgaaccaattctacagttttggtcacgcattcaaattaatgaacaatctagcttacagatgagtatatttactgctggattattgagctcattcaatggagaaatgcataatgcatattatcaattctcaatcttgtggattttgtggtgctttctttcttaattttacattttgttatgtaatacaatatttgggtccagtgtttgtgggtctgttttctccaattctcagagaggcttcaagctccaagatccatttcttttttttttttatttctatttctatttatttttatttctttcattcccattttcaatttttttaataaaagcatttgaatttttagacaaattactttaaaagaaaaggttaatacagatttgaccactatagttagtccctattgtttgatgaaccttataaataatccttatggtctgataaaatcattagcaatagcccttactgttgagctaaggaacgttgtcgatagggtctcagttttagatagacctcatccccaaccttgaatttgagttctcttcttttagtgtctgccatcttcttcattcaattttgtgctatgttcaaattttctttcagtgcatttaaggccaagtccctttccttcagcatcagttctacctcattattagatgtcttgttgtttccgtaggacaaggaggagttgtttttgttgaagcatggaaggttgtgttgtaccacaattcagcccatggaatgaatttatcccacttctgaggctgctcattacagaagcacattaaatatgtttccacacatcgatttaccctttgtctgaccatctgtttgctggtggaaggttgtacttttcaaaattgtttacatggttgcaaatagttccttccaaaagttactaataaagatcttgtccccgtcggatataattgactttggtattccatgtttgctcaccacccttccaataaacacttcaggcacatgcttggcagtgaatggatgtttcatggttatgaaataggagtatttgcttagccggtctactactaccatgataacgttcattcctcccaccttgggtagtccttcaatgaaatccatcgactatttttccaaaatcttttctagaataggaattggttgcagaactcctgctggtttggttgcttcaaacttattcctctaacaaacttcacactgctcgatatactttttaacgtctgttttcatgcccttccagtacagttctcctctcatccttttatatgtccttaagaattctgagtggcctcccaaaacagaatcataaaacgtatgtagcagggtgggtattaaggaagaagttttagacaatactattcttttcttataaaataaattatcgttgcccaattgaaacttgactcatctggatttttcttcaactcctcgatgactcttttgagatcctcgtccaactcgacctccttctctaccacttccatatccactattcctatggttgtcatagtcttcaattccagtggctctattctggaaagagcatcagccgctttgttttgtagagtatttcaaaatcaaatcctaggagtttagtcaaccacttttggaactgaggatgcacctctctttgttctaaaaaaaatgctaaggccctctgatctgatatgattgtaaacttcttacctaaaaggtaatgtctccatttctgtatagagtgtactactgccataagtttcctttcatgtatggattttgtttgggccctgagtgacaattttttactaaagaaagctatgggatgaccattttgggatagtacaacccttaaaccaattccagacgtcggtttcaatgatgaagggcaaattccaaattggtaatgctagcatagggattgtagtcatggctaacttcaacttatcaaaggctattgtagcttattcattccaatggaaggaattcttctgcaataacttggttaaaggggccgcaatctcaccatattccttcacaaacctcctatggtaccctgtcaatcctaaaaaacctctcaacccaccctgtcacatcttttggctgaggacaattaactatgtccctgatcatctcttcatctacctctactcctttattggatctcaagtgccccaaatattgaatttgtgagtgtgctgtcacatactttttcttgttagcgaatagctggatatccctcatcaccgcaaaaaccatcccaagatgcttctcatgcttggtaagatccgcgctatacaccagtatatcataaaaaaagccaatacacaccgtcttagaaaatgtttaaatacttgattcattaatgactggaaggtagtcggtgcgttcgtgaggccaaaagacatgactgtgaactcgtagtggccctcgtgcgttctgaaagtcgttttctcaacgtcttcctctctcatccttatttggtgataccctgacttcaagtccagctttgagaaaacggttgctccgttcaatgcatctaacagctcctcaatcacgggtatgagaaacttatcggatatggtgacttggtttagtttcctatagtcaatagagaatcttcatcccccatccttctttttcactaacaaaactaggctggagtaggggctgtagctaggcctaatcacacctgtttgtagcatctctgccaccattttctcaatttcttctttttggacatgcccatatttgtatggtctcacattgataggtttctgttatgacaatataagaatgcggtgatccacttctctcttaggaggtagctctctagggtcctcaaataagtatgcatactgttgtagaagaagtttgatcattgggtgcctcttcttcatcacccttcacttcatgttcttcatcgaattcatcactcaaatctatatcataattctgcagctccaagaggaagccctgatcctcctcctcctaggttttctctgtagttctcaaagaacattcagctctaatgagagagggatcactcttgaggacaatttgttttgctcctacccaaaaggtcatagttagggaaggccaatgtatcttcattgtttcagtggtgtccagccattgcatccccaagattatatccgcatttccaagttcagttgccaaaaagtcagccacaaccgtgatttctttaagcctcagttctattctcctacacatcccccttcctttgcatcttgtgccctctccaatcatgacaccaaattgagtctccctttccaagggtaattccttttcctctacaatcttagtgtgtatgaagttgtgggtccacttccaattagcacatcgacttccttcttttttaattctccctttaacttcatggttcctttagatgtcaattcatggatcgccgttagttcaatttctgttccattcgctaggttgatctgttttaattccaatacttcctcaatattttcctctgttctgcctttgtcctcagtactctcctcttcatttaggatgaacaacatcaactcctttttttccttcattttgcacctatttcttggcgaatatctttcattatatttaaagcacatacccttgtcaagtcgagcctggaactccgcatcttatagtcgtttcaaagggggttcactcttttggtaattgcctctaattggaatagttacctgtttcattggaaattttgttttcctctgaactcccttctgtcctccttgattcttaccggagttcccttctctttttttctgttccatcaatccccactctatctttgccaatttcaatgccaaattcctatcattgaccaactgggcttctttcatacaatcttccgaagtttgcggatgtctgcaaataacttcggcctgaaggtctggttttaatcctgttacaaactcatcccttggcacactctctgccatgtgaggtaggggagctgaataattaacgaacttcttcacgtagtcgttgtatgagccatcttgttgaattctgatcaaccttgcgactaagcttttcttgcctgtgtccttaaaaaatttgaacatccttcctttaaggtcctcccatgattcaactttcttcctattatgagaccatctataccagtctacttcatcctgtccaaaacttactacaacaaccttgaccttttctgcttctggtaggttattgatttcaaagaagtgttctgccctgtagacccatgacacggggttttctcccataaaaatctgcattttcaattttttgtattttctttggtctactgtgatcatgtttgcctcgtttatagtccacatcctctatttttccttttagcttcatgatagatccattcgaagtcccagactcttctctttttttttgtagctatggcttttccttaattcatcagccattctctccattgatttcttcatttcgattagtatttctttcatgcccattatttctttctctgttccttccactctttcctctatttgtctttgcgccacgagtcttataactacccccagttttctggccctgataccaaatgttaggctaccaacactaataacacacaaaattccctaacaatggctaaacagatgcggtactttgattctctttatttatatataagccaaaaagagattacacagtcacaatatgaagataaacaaggaaaaaacagaaaagaaatattccagcctcctttaacaaatagagactccttgtggctacagcagcagccttacaccataaagaagacaaaaaataacctaacctagctaccaaatacttactaatagctatttataggcctcatatctttcatcccagtgggccctaccctgcacgattcattctctaatcattttccattattaatagctggtgtacttacccttctacccttcctcatatatgtgtgaataattgggggccttacactctgataccatgtgaaagttagagcaaaatatgagagaactccttacttcattctatgctatagagtttaatatatatgcatacatggaacctctaactaaagactggtaaattacaataaaggacaaaagactaatatcttcaagatatatactataacaagggcaatttatgagagttgtgtcaaaccatagagattaaattctaatgagaccaaatttgcaatttagccagaaaaactatttatctttcaaaccttagtttctgtttttcaaaacatggtagaaagtgaataactaaacaaaaagagttataggtgagagtggtgggtacaagttcagttactttttcctaaaaaaaaacctcaaaaccgtaatgaaatggggcttatagaaaaatggaattgagagagtgggtatcaatttatgttgatctcgtgacaacatacaaccaattcctggaccaagcccacaaattagagaggcattggcttcaaactttctccaataatctgtgatcactttttagtgacagttttgtgcttttagtggaaataatggtaaacatctacggaattctttttattattattttggatagaagaattagaatgtgttggaatcagtgaggtttctgatgttcttgttatcaaaaacttctctttaactcaatctaagattttataatcgatcaggtggtggttcaactaatatagaagggtattggtgtttacttggtttgtgcaatgaatttcattaagtagatagagagcatctttaaatttagagaagttgcaacatctctgactcggaggttgtttttccctcttgtgtatactgatccttcaagcacatttcttcatcatcccatgttatttccagcatatctgtgcaaatctcgacgatctgtaattctg

SEQ ID NO: 7619 - DNA, 1613 bp, Cucumis sativus
  Intron number 2 from transcript Cucsa.259730.1 (locus Cucs a.259730) derived from phytozome v7.0 (chr-ID scaffold0222 9; pos 6101250 to 6102862 reverse strand)
gcaagcatttgacgctgtttggcagctttcagtaggtaatagttcgtcctaaactatttcgaattcaattttaggtgtttacaattgtccccaacactaggaagctcttgtttatagatttggagtggcttcggacaaatataaacagtttctagtaaagttttgaacccatttcgtgagtttcggtggctaaagaaaccttttcgtttttgtaagttgaactctctcttgtagtttaaaaccgatttggtgtatttgaaactgaggtttaaggtttttttgggtgagagtattcattctaaacattatttggattttgaataaaggtttcaaactgagttctaactttggaaccttgttttaattgttttagatcagttatttttgttgggtttactggttttgtgtatctgtttttccttctatcgttgaatttggtgtcgtgaatttcttgttatacttctttaaattcagattagaaatttagtggagtgttattttcgttttgaactaagctgtccttagcaatttaatttagttgaatctatcctttaagttaagtttggatcatatcgattatttcaggtagtttgtgtaatgttttgaagttttgaaatttctgaccttgtttaggttctgtgagcaaagattagaatggtagtttttgtaattgtcttgatgttgaacgtagggttaattaggggctaaatttggtatgagagtttagttcagcgtaaaatttggaggtggtacagttgctatcaaagcagagttgtgcttgtagtttgacctagaatctaggttgttaagttagttagtgttaatggtctcagcttctctctatcactcggtatgtgaacttcaaatttcatataatatttgattggattggattggttgcctcgtatgattatgcttgacttgcttgtttgctagtaggcataggatttgcatacggtggttgttgttggttagcagggagacagtgctaccatagttgactagatagcatgtgttttgtcttgtgcttgttgcgtgttagtagaatttggatgtgatataaaatccataggatttgaaaattaggaactcaattggtgaacccctaatatcaaattctaatacgtccaaatcaatttgacaacaacataagggaatggattagatttggattaccctttgatcgaaaaccaagagattaggagaactagttcttcacttcaagttcgaatactccacaagcagcgtgatcaaactcgactgaatattcttggcatgcaaccctaaatcaagaattgcaaaaggaggtgatgaggctatgtcatctactagagaatttctattgatacaaaatatcataaacttgctttaaacaacccaaaggcaagacttaatagcatcccaaaaaaaccctaatgcattgtgaaatactaaattaaccctatttaaatgtttaaaaaggataaaactggaaaatattaaaattacatcacaattggtaaataaaatgtaattaataatttgatacttggtcggttcatatcagaatgtccttgaacatgtgccctcttctttcagcttcctgttgacaggcctgtttgtttaggtttaac

SEQ ID NO: 7620 - DNA, 1453 bp, Cucumis sativus
  Intron number 2 from transcript Cucsa.264100.1 (locus Cucs a.264100) derived from phytozome v7.0 (chr-ID scaffold0233 0; pos 225143 to 226595 reverse strand)
gcttgtctcatttgctaatacaagaacttgtcactgtaagaacttttgactttctttacttgtttgcgcgaatctctatgaatttttaagttacatttttaataattcctattcattgtttttgttcaatatatatgatgatttattgtttttggggattgagggggtttctttggtttcctggatataaatatatccctgaatgtgaaaactacaaacagctaatataaaaaacgtgttaaaacaggctctcttggtgtgaatttctgatatttctgtgtgaaatttgaagttgattgattttatttacatttgaagagaaggatcggctgagccatcatgggttggccacttgggctagtggtaaaaaggtcaataactaataaagaggtaatgcgttcgatccatgtggccaccggccacctacctaggaataatgttgtacggtcagattatagtcgacgtgtacgtaagttgtcccgacaatcatatagatatatatatagaaaaaaaaggccacatagatgaaattagtacatattcattaacaatggcttccaagactttgtacaaatgtcccaattcaaaatcaggggtaggttatagagctgtttgaaggattccttattttttagtctagatatggcatatcttaaagatatataactgttccaaagaaaattttaatccacattcttataaagccaacctccatcactcgcaatgaacttaggatgggaatgtgctttgtaagaccaattttcaacctcaaatgcagggattcaatttcttgccattgttcatcaaatatcagcaaaactatcatcaaattttaagaatgcctaatcagccatgataacattgactagaactttaggtagaaaataatcttccaaaccaagatggatatccttccaagaatagtaggcaaacaatcgataaacaacaaatagattgttgaagttcattggcaacagttatatttatgtcttaagaatttccatcttgagactgctttaaatgtagatattatgttgatttctggtttacaaattcaagctcaaagatcaataaatttttggctggtgaatgtggaagtatttatgcatttattttgtgcatacagagtatgagtggttgtgaagtcgataaattctgattcctagtcgagacataagtattgcattatttttttaatttttttattttaattagaatgttttctcggatctgagcttactatatttctcaatcaagtacataatggtataaaactcaaactatggttcaacttttaaacaatgtaggcatgttgctttcttgttccctcctttttacagatttagggcctttatttctcttctaattttttgcttcagatggaccaacttatgcaactctttttttttaaatgttgtcggttgatctgtgcaggtaatcacaagaattaact

SEQ ID NO: 7621 - DNA, 2908 bp, Cucumis sativus
  Intron number 1 from transcript Cucsa.311980.1 (locus Cucs a.311980) derived from phytozome v7.0 (chr-ID scaffold0299 5; pos 1445296 to 1448203 reverse strand)
ctgatcttggattttcccctcttgctttcattcaggtatgttcatgttgtttgagttttcttatcgtaattgttctaactcaaaatgaaaaaatatttgtatgtataacgtaatagttattttttctttggctgggtttatgatgtgttttgaatatctttcttgaaggaattttgaaaaacatgattttttagatatggaatttgaaagcttagttaatttcttcctaatttgtaatttgtaggagaaagtttggattacttaaaaaaaatactcttgaaaaacgttgttaaacaaaagtactttttgtttaattttttaaaagtcaagagaatgaaattttgaattttttaaaaagtcatttcaaaagagttgttctgtattttcaaaagagtttgattaattgcttttaaagttgaatgactacaatgaatatcaataaatgacaaaaaaaaagaaaaaaaattaagagattcaatcatctaggctataaattaatttattacgagctttattgacacctaaatattgtaaggtcaaaaagtgaaaaagtgagttgttttgtgagcttagttgaagttcgcatgaaatgacccgaacacttgcaaacatgaaaaaagaaatcgaaatatttataaaagcaattgacattaaacttatagtctttgtgctatgatgttggacacagacaacttctatctaaactcacttgtttttttttttaatatcattttaatttagtattttttgtgtagttaggatagacgagattgatcatggccgtaaagtgtctattgacctaaatatgataattgataattcatcttcaataaaatataacttgtagagtagaattaaaatggaaatctaaaagtaaaaatataaagtttaattttgagtggaattaataataacttttgaaaatgtggaggatggttatttaatatctttgaattttaaggttgaagatcgtgaaaggaataaaaaattactaattaagttaacaatattaatactaactaaattaaagatgttaataatatttagagtaacgattgagtataacttaaaagctcatactgaatctatcaatagagttgttgatcgtcttaatttgcattaacacgattgaatattatatatatatatatgctaattgtgaatgtgacaacttgaactattatgagctatccaacatgcaaaaagttgttgaaatgtcacgtaactaattgtttgttttatttttagtttaatgtgttataatctcacaataaagaaaatcatgtcctacgattgccctacacttgaaaacgagatccatttaagaattaagtttagtgtatattcaactttgttattcactttacaaaatattctatttatttaaatattagttgatagagatattttcataaatagcaaatgcttgaaatgacgtttttaaaaaatgaaaaaatttgataaactatataccctatataagacaaaaagacaaatttcttacacttcatttttctacgaaggataaatatcatataaaatgtggatgaacgtgtaatataatatttacgatagagtaaagattgtttagattgatttaaaaaaataatactttaaaataaattaattttattaaattcttttggtaaaagtaaaaaagaaatatttaaaatatacttccaaagatgtgttgtcaaacaactccattttcttaaaaaataaaaacttatttttcttattaagtgtattataaaaaaactttgataataaattaattggaacagtaggtttttagtccccaaatattaaaaagtatgtgtttggtatattaattttaaataattatataacatttaaaattagaataataacttctaaaaattaaaaattatattctccatgaaactaattatttccaaatttaaatatcaaataattatttaaaaaacattcaaacataaatactttcaataccttttaaacctatgtttaaaaagtatatattgaaaacataagtctatttgtatgaacctaaaagaatatgaaagtacatttttaaaatttaagattcaccgaaaataaaaagtaatttagtataattgcaactaaaaactacgagtggatcgatagttaaaaattgaaattggaattctaaattctaattaaattgaaattagatttttggtctaagactagtaattatgaatagacagcatgagctataagaaccatgcaatgtgtgatattgttggtttgtttgtttatttatgtaatggcaaagttcttgaacctattggttcattttaatgtcaagtcagtgttggagcagttctccacctatcattaaaagttgttgaaatctcacgtgacaaaaattggactttattgttattattttaatattatatagtgtatttataatcaacaataatgctcattccaagttctacattattgtaaagaccaagtacgaacaaatttgtttttatttattcattagtttgatgaatttatctaagagaatttgattgaaactaaaattttcaaattgatcaatgagaattttttgaattttattatattttataaataatttcaatcattttctagttttaatgttctaatatttgaataatactaatagacaaccaaattaaaaaataaaaaaactaggaaggttattaaaattacaaaaactaaaattgaaaatttgaaagcaaaaaacatttaacaaattatttcatgaatggctatattttaattaatttgttatatttgaaaataattatatatacatattgtaaaagaataaaaaaggtgacagctcactgcatgaatgaatgctaaagaaaatgacttttgcctgcacgcagctaactcggttcaagtgcggcggactttccgtggg

SEQ ID NO: 7622 - DNA, 4817 bp, Cucumis sativus
  Intron number 8 from transcript Cucsa.361180.1 (locus Cucs a.361180) derived from phytozome v7.0 (chr-ID scaffold0358 8; pos 1590305 to 1595121)
aacaggattatcattgatactgacaaaaaggggaagtgagtagctcttttaagtactttgtttcaatgttctagtttgttgccttattcgtattatcattattctcttggtaatgaacagtgaaagttaaacatctgtcaccttttctcttctatattatcgtgtctaccaagttacatattttttgtaggattagaaattgcttctaatgggcattgattgggtttacctaaacctactaactacaacctgaagtaataaacattcaaataaaaatcataaaacaagtagtaatttttctacaacattatatttattgctgtttattttgaaaaatgaacgggatatttcaaggtaaggaaaaaaagatgtcagattaaaccaagttttgaaggacgaaggttttgaggaagtttcaaatggctccaagtttgacttgctccttccttagaactccatcccaagcacgcaaaggaacccttataagttatctgaaagactgttcaaacatcatcatcagaggccttcatcaactcactggaattgcaaagcaacgtcggttctaggaatttttctcttcaacctccggctaatggcagttccgttacagatggtagaagacaaacgaaagtcagagatagccaaaagttgttcaaaattagaacccccaatcacgagagggttagttgtcccgccaatggagacttcttttaattttattccatttgaaaagtcacttgaaggagtccaggagtcacatacttgcagcattaaagatagtattaatgctgtctccttgaaaacaagtgccaacaagacattaattaccatgaaggccaataatattgtttagactggagttgcatttactccaccagaaagcgaagatatgttattaaagaagagagaaaagggtgcggaagacagctgtgatattaatttagtgggtcctaggcaccttccaatgtctcctattttttaaaatatggtatgcggaaagacaaaaaaaggagagcaaaggtcacccaacttaaaaaacaaaaacagttgtatttttcctattgataacatcggggccaggtcaacatttttaaatccaatgtctaacggtctctctcctcattgttcatccaatagttgacacccttgcttcttctcctactacttttttaccaagcaagtcaaccaacaaagaagaaagattttctccttccttgtcatctcggtttaacaaagctaagaagaattcttgccctccaaagttcttcttgaagcattttagaaggaaaaagacttccttcaacaatgttttgattgctcttttcaattttgagtcttttggagcttgtttgttcaaggctcaagacaagctctcccaaggacaacaatcattcaatattcgttcactgatgtgtagccgcctcaaatgtgtcctttatgcgaggtacattgaactctcagcaggagtgcgagcaaattataagcaaggtgcaatatgggattgctaatcaagaggaagctggcattctcgatgctcaagaaactcaagacttagatgttgaatcagtctcaagtgtaagtagtgaggaattagaagagattaaggcagaggaagaggttgaagattttgagatcttggagaacataatcagcaatgtttgcaagttgttcgtggaggaaggtatagaagaagaacaaccttctctccagaaattcagagaagatgtcccacaacacttgcatcacatcatcgaagcttgtggtgtatctttcctttgagttctataaactttatatccaacattgaaagtagtcttggatgtggtaatgcattgaaagtccttatgggaatacaagggagctaggagttaataaaaaagattggtagttaggaagcaaataaagaagatatccccgattttggttttgctacaagtaacaaaaagtaaagttttgatgataattgtgctattaaaaaaaaggtaagttctctcccctctgtcctctgtcctcctctaccctcctctccggttagtcagcctctttgacgagcttcaattcttcttagcatagagaaagttagctgcaaagttattcaatcacactactgcacttggaaagagaacaaatgctgaatgaagatttccaagtttcaagctatttcgggttggatccttatttgtgatatttggccttattcaggagttcacttcacccttagagtttgcttcggagttaacaagcaaggctgatcatccttctgcaaaatgctggaaaagttcgttgatatagttgattattttgatatagttgattattccaaagggttttcagacaactcttccaaagtccccctccaaccacctgtggaaaagccaagttatgttgagatggttaagtctaaaaacttcaataaaacagtaccaaggcctagaaaaaaggaacccaacaagacttccaattatcaaggtaagcttcatggttccgaccgtcatcctttcccaattcaaaagcaatggttaattaagaaccatgaagtggccaagatcaattttgaaaacctatggatcatatcaaaactttttgctttcgacgactagagaatgatttgtaaggttttggaaaagatcttacaaaccaatgttgttataaatcccctttatgatgacaatgctcttatcggtcttgattaagcctcccttagtgacctcatcgatgtggaaggaaaatggcaagcatgaggaattttccatcttaaatttgaaaaatgggataagttgaaacacggtagaccactcgtgttgaaaggttatggaggatggcttaaatttaagaattttccgtttgatttctgacgtagaagtatttttgagacaattggagatcattttggtggttttatagatatagccatagaaaccttgaatcttattaattgtagtgaagctcaaattcttgtcaagaagaaccttcgtggtttgtcccttcagtgattgaaatttcagacaaaaagaggggaaacatctttttacactttgatgattttgaatttttaaactccccagtttccagaaaagcccctagattgtaggatgtttacataaattccattgaacgactaagaattagagaagtcttgtatgatgaaggctttgatctctcctccttcccaccaattctaaatgtcccaaaatctttatttgcaaacctactgaggaatagatgtccatttgaatctttgaagcatttttcggccactgcactggtgccagagaagatgacgagatccgagaaacaggtggcagccgacatcattaggtgggaacctgaacagtcacctatttttgttaatgacatccctaatcacaactggcctggccatttggggaagtaacaacgatcaaaagtccctcccaacatgtcattcatatttgacgctcccattgatctttccattcattttctgcatagaaaggaagaaagcctttgtgagaaatttcactttcaaagagaaatggagaaggggcaactgctgtttcaacatggaagccctcgagaagctggaggacggaaaaggaacttatggtaaggtttatagggcaagggagaaggccgctagcaagattgtggcgcttaagaagacgtgcctacatgaagatgaggaaggtgttcgtcctaccactcagagaggttttgattctaagaatgctttcttgggatcctcaacatattgttagattgatggatgtcaaacaaggccagaacaaggaaggaaaaaccgtcctttacttgatttttgaagacatggataccgatctaaagaaatttatcaagagttttcgtcatatgggagaaaacatttctgtgaacactgtcaagtgtttgatgtataaactctgcaaggtgttagatacctagatttagataggactaagggtagttagatggttataaataggaagttggggagggaatacaagcatgaggattttggtgaagacaatgggctgcgacattccttgaaagaaaggaagggtagagggttagggtttcttttgagtgttcttgagttttcttttacttgttggttctttatttgattgtaattttttttggttttgttttgcttttggacattactcctttgttttggtttttagcttggttggatatgatgagagtactatggggtgtcaatctagtttagatgtccaagtgcacctctttgatgcatagtttacagagtccttgtataattctcttgtactatgagcttttgtctcattattaatacatgaacatagagatatgggcatgatagcttcgagggtgccagttgcatcttcttgctagtctctagattcgagtgttttccttatgagagagatatttcgttatgctttgtattcaaatctctttgtttttgttctgtttagcttaaatttttctgtttggatttcgctttattatcttgttctttgtgattgttttcttggtcgttttccctttagtattgcccgagttcatctttgttttagtttgtttgaatgattttgtcctttccttattttgcttttagtataatacttttgtacttcgagcattagtcacatttattattattaataaagaggcttgtctccgttacaaaaaaaaataatacattaataaagaggcaataacctttccaaaaaaaaaacttttgttttgaaatactcatttcttgttttttctttttccttctctcttatttgttggttaaaagttcatatatctgtaactttggctcaatttgtcctttttgcattccagtataa

SEQ ID NO: 7623 - DNA, 793 bp, Cucumis sativus
  Intron number 5 from transcript Cucsa.129200.1 (locus Cucs a.129200) derived from phytozome v7.0 (chr-ID scaffold0102 8; pos 238502 to 239294)
ctgaggtacttcaaagaaatcttcctttagccaaatcccttttgagttttcattaatgtcccctaatctatcttttgtatcttatgggtcaaaaacttacaaattccacctacctagagtctctgactcatcattatgtttgtgaactactatgcatattttatgatttttttcttttaatttttatgttgtctatttttcatctataaaaaaaatattctctgtatttgatatacaaaagtatgcatcgttataatatctcttggtctttttttcttctttttgaaaaaaaatacgaaagttttcattaagggaatgaaaagagactagtgctctgagctacaaaaagatacttcaaaacttagtgtaaacaaaaaaaaaggaaaaagaaaaagaccaaaaaggacttaagacataaaccgaaggacagagtcatgaatttaaagcaagacaaactaagagaatcaacaatctgtcgcaatgtatttggtacttttagatttttctggattgtgacatgaaactatgaaagccaaagtgctcttataaaatgacaaacttttaagttgaaagaaaaagccaacaacttgtgtagatggggatgaatcacccaatcttaagaaattaggaattataaaatggtcccagctgattgatgtatttactgtttgattttatgcttcattctctttttatgagtcatatgacaaaaagttattgccttctaatttgcaatgtatatattgttttcatgttatcatttcgtatattcatgatttttgtacatcagtga

SEQ ID NO: 7624 - DNA, 502 bp, Cucumis sativus
  Intron number 5 from transcript Cucsa.163100.2 (locus Cucs a.163100) derived from phytozome v7.0 (chr-ID scaffold0114 4; pos 2533259 to 2533760)
cttcctcgcttcacagcccaggttttcttaaaatctttttgtatgcaatttgctagtattccaaagtttgcttgatcttaaatttaagaatatttatatgtgcattgtttatgatctttattaactataaaaactacaagagaaaatctacaatatatatggtctttatttctgaattctattctttattattcatgttcctagcgcatataatccgaagagatgacaacattttgattgatgtccaaacccaaaatttaatgtttataaggaggcatcatccatcattgttcacttgtatatcaaatgcaaaaatgtttccaaaacagaggagtttgcttttatattactgttggtaaaaccatgttaagatagcttagttcaacaattactgacatgtacggtttagatctccatacttcatctttattatactagaaaaagttatacaaatctttgattggtatgatcctgtcgtgcagcttgtgaaggactatcaagc

SEQ ID NO: 7625 - DNA, 2348 bp, Cucumis sativus
  Intron number 13 from transcript Cucsa.355910.2 (locus Cuc sa.355910) derived from phytozome v7.0 (chr-ID scaffold035 77; pos 530220 to 532567 reverse strand)
agattttgtaagtcattataaaatggttacatatatatttcagtccctaatgttataattttttgtaaggacccaaaacctaccactcagtataatcccaacaaagcaatcgagaaacagagacaatactctactctgtatctatatattgatatagttatacttataacagaagacaaggttcatatactatcttctaacaaagaaaatactacactagacaatatcaactagaagaaaataacaaagacaaaggataactctctagctaattcgagaatgctggccttctcctccaaaagctgctgctattcttttctcaatgataataccttcaacaatcccaaaaccgttcccttatatactcccaaaccttctcgtaggtcccacatcagaatgttccttccataaacctaataggttaagctacccttggttattaccttttccgcccctaataggttaagcggcgagtataattatacttgacaggtaaaaaacgtcaagtatatgagattacttgacacttattaagcatcaagtaatttagtgtcaagaataaagtggctttttgtttgacagtttttacgcgtcaggaatttatttattcttgacatgtcttgcatgtcaagacttttttttcaataaaaaattgatttgaaatattcatataactatatttcacctgttttgaagctcattcacacacataagtagagcctttgagattatacaaagttgctaaactacgtatattaattaaacaattgaatcaacccaaactttccatcaaataactaataacttcaacaaattgcatatatcaatgaaccatatatatagttggccattacataattacaatagttcaaacttctaacaacatcccaaactttccatctatgtctaaatataaataaaatatatgtgcagcccaaaggtgtaccatatcaacaaaatatacatgtctaagctaccatatgaacctttattgttgcaaaatctttgcttccttctgaacctctcctttagctcttttattctatgcctcaaataatatacttccatatcataactcccaattttttacttgacaatctgtagaagaaacatttattttataagattgatattttttttcgtcattgagatagaaagtaatataaaaaaatatatagaacctagccacaaattcgaaacgggtggaggaggtccaaattaaacatcaaaagaaaaacaagctaaagaaacatccaaagcaacaatgaataattcgaaacggattgagcaaatgtattagcaagcaattaagttcttttccattttgttgatggctaaattcaggaagaatgaagcaattcagtacaagtgcttatgatgagagaaatcatagttgtcctagttagatagtaatgtaagataaatttatacataaaacaaaagaagttagagaaagtggaaaagtgattgagaaccaaatgattttttctaaaaaccttatgtatcaaaacaacaaactgtaaactgacttctcatttgaatgctctccacgcatgtcatacttattcccacatgggagagcaactcaccgttccagcaatagatttcgatgatatgaaagtgtttgctttgaatctggacaacccaaaatcacaaacctaacacaagcatatgaaattagcacagaaagccaacggtgctctcactcatgaaaatctgaagatatatagcacatgtttataataccttcgctgtccaatttttgtcaaccaacaagttgggagacttaagatcccagtgtactataggaggattgagacaatgtaggtagctgattccctttgcctgcaagaaaactaaatcaatcgatataatgaagttatgtaaggttcaattacttggaaatatccttgactatgatggacgtttactctacctcaaaagggaagttagaactacaagaagcaacagtgaactatcgaacaactaaaaaaatattttaaatcaaatccatttagcatgtgaaataaatattatttaaacctcattatattcattattctaaatataaaaatagtttaacattttgtggcatgcacatcaatttaaaacataataatattgaaataattgttgtgaaattgaggatcatggagcaatgcaaaatccagtatgaatatagataaaagacatttaggagtattttttaaaataacagaataaattaaaatatttacaggctagagtaaaattatggattctattaatgtatagtgtttttagtcttttgtcactttagcatatgcatatcaattaaaaatgttgttgacgtaagtaggtaaagttga

SEQ ID NO: 7626 - DNA, 500 bp, Cucumis sativus
  Intron number 1 from transcript Cucsa.341120.2 (locus Cucs a.341120) derived from phytozome v7.0 (chr-ID scaffold0335 6; pos 3497816 to 3498315)
ctttcaacgcattgcccaatctcgccttcaatccggtgagctacatttctcgctgtttgctttgatggtattcatttctgctgtaaaatctcctggcccttttctatttcgattcgattcattctctatgtttattttactcttcaactgttctgtatttcgtgagtaatcagaatgcctgctgttgcggatttgcatttctcactatactcgctatactcgcaatacttttatacttttcacattgttctagctatatcttacacggcaatatcgtttataagttttcaagaggaaaattgtacgagattttcttgattactttgttatgttgtattttcaatcaactgcaggaactgaaattaggcagaatgtagagggttggtcgttcatctctaactaccaaaacgtgaacatttcgtgggtttggatgtgtgtgtggtaattcttactttgtatctacagtttctggtggtgagattggagggacgatatctgcc

SEQ ID NO: 7627 - DNA, 3327 bp, Cucumis sativus
  Intron number 1 from transcript Cucsa.047860.3 (locus Cucs a.047860) derived from phytozome v7.0 (chr-ID scaffold0054 2; pos 2744878 to 2748204 reverse strand)
gtacagcatattcctctcggcctatcttcttcctggtaagcttcaaaacttaaaaacgctgttaatttttcgtacaattatttttaatctgtgttttcaaatgttttgatcactctcaccagtttctagcattggccgtttgctttcttcgtagacttaaaaaaaagttgggtattgggctaaagtttgattatggtctcaaaaaaaaaaacaacccaataatttttcgattgccgtgaagtgggtacggttgactgctacctaggttgcttctttcctctttttgcgtccccttctcactggctacgggctaggctttctcttcgccgtgccatgtgtaactcagttagaggaaataccgcaattttacaaaaatggagctgatttttgcctttatactttaagaaccaaatgccctctaatcggcaaaaggatagtctcgggcgcagcgaatgctagcgtctcttttctaatggttagaatgggtcttgtctttggaaatgaatgctcttttcttatgttttcttctgatgtgtagtttgggaattacgacaatctgacttaaatactctggaagctccatgaaaatggccgctttctacaaaacaacagaatctaacaaaaactgataaacttctcttactctatattaattgattaatatgcgatcttgctttgaaagtctgattatcacatcttttcatggtcgtctgacatcattatgcataatttgatagttatcatattgactggataatttcttctgatatggtgctggtttagtattaaaattaaagttcaccgttccttatgtttctgcgtgtgcgtttcttttcattctctctttgctacttttaaatgtaagtgtaagctgataaatcttaaatgcattcacttctttagagtagatttacctgttatatctccttctaatggtttgattttggcaaataatatttattctcatttcttatttgcgtgttgcgatgttttagtaaggtggaaatttctataccccaaacccctaggagattattgatgtctttgattaattgaactatcttattcgccgacaagcttcctttctagttcaatcatcttctttttcttctttaaactagataagttcccccgtttgaatattagctaaattgaggactccaattaattaaataagcaataatcataatatcactcaattctttaatttgatagcgttgttatttctgcacactaattagtttggtttttcttttagtggattgagatcgtagagccttttctttccctcacattaaaacaagactccatgctgctaggttaggttattgtcaaattttggactacatatgagagtaggaaataacagattttgacctatttacctagatatgccatgtttatcttgttttgaattttaaaattttgattttgactttgtagttgttaatcttaacgtaatttttataaaatctttaccactaatattctattgaccattttataataaattttgatttcttaaaattcaccatttgagctgtgattctaaatatgatttaaccatgaatatctactcatctatacgatgaatcaaaagatctatcacattgagatttttctaattgatctatcagttttaaaatgtcactttgacggcccaagatattacaaaaatgatctatcagttttaaaatgtcactttgacggcccaagatattacaattttatttcaaaacaaattttaaattatgtccaactggagtggccagtacatttaacccgccgtttttgtgagctagaaaaaaaagtttaggttcttactaatatatccttggattcaaaatacttttcataactttttttctagttatattttatttttttagaaaagaattaataaatcgatcaaattattattttcttgtacttttagtgaacactccttggatgcttgagtaggctcaggtacgccgacgtaggaaaggccgtttggttggtcctttagaattcaagttgtagaactacttaggttaattgcactatttcttaacataggctaaacgagttcaaactagtgttgatcactaatcatgggtttcccaagataaaattattgaagttttaattaattatgaaggattctgttcattaaaaaggaaatttttttgaaggataatggggaaaagaaaaccataatcatgggagggagaaaaatatttgtaacactttttttttagaaaagcgcacgaggaattgcatcaaaatatttgtaatactcgaattattaaataggttaaaaaatgtgatattgtccatgactttatagttgaaaccacaatggttcaactatatgattagagaggaagctatacgtgagtaggtaatgtgacagcccaagtccatgattctgcaggtaggatggtggtcgtctttacagcggaaaccacattagaaatttctctcccctcatcatcaatggttcataagtataggcaattttctttattagttcgaaattttttaggtagtttcaaaagcttagttatggagctcaaagtagatgatttcggattattatgaagataacaatgttgcatagatggagggtggctaactaagcttaggatgtaagagcaccaatgtttcttgagggttgattgtggagtaggcttggagagctggtttgtgtgctttctagatgccatccacgtggagtataggatgccatttgaatagcttaaatgctttttaaaacaaattcccttaaaagttgattgtagaagattcttttgctttcttctgtgttcttatataatatatacaagggtttgcaagttagccttgctatgggatctgaatagagttatggggtatcaataaaggtgacccatattgaatacgtgttcttcactttgtatctttgcattttgatctttgtatcctagaaaaccttgttccgcttcaaaatatacgtgctgaatgcttactaggagccttgttctgttttgatttttatattcttaattgcttttagaaatctttgatcatctattatccaaacacatctacttttccaatgaatggttacttacagagtgataattattgatcatctaatagagttacgtttccttgaaatggttacttacacatgtggtggaatctactaattagaaacttgcattttagagactacttgagctgctagatctatctcttggattgcatgttacaagctttcgtatttccaatgagtctaaccatagcacaaataatgtttgaatcataggaatataaaagggaaagaagggaagactagaagct

SEQ ID NO: 7628 - DNA, 1505 bp, Cucumis sativus
  Intron number 1 from transcript Cucsa.097070.1 (locus Cucs a.097070) derived from phytozome v7.0 (chr-ID scaffold0091 9; pos 2448362 to 2449866 reverse strand)
gaagctgttacattagtttacatactcttccggaggtagcttcgtttttttttcttttttaatttcacttttgtagttagatcgtgttattgaacgcttcggtgattgttgttcttgttgttttctcatttttaagtcgttgcacttcatttctatcctattgaatgatcatactttgattggtattcgtgctgagtttctgcagtttttatttatttatttgtttgtttgttattttaatattcagtaacatgcttgattcttttatatatgtcagttttggatttttcgtcctcttcacatcttatttagttgtcgaagataattgactcagttttgaattttgatgggcttgattaaaatttttgttgtttgagatggcgagagaagaactcgctgctggttggttccaatgttaagtactggagttctgtgcataagaacgcacgtggatgaattttgaattttctgtacaaaacggatcattaggacttggaaaaaaaaaaggaaaggtgaagagcacattctacgattgttcttcatacagcctcttgtaattatggtcttttcatgatttttttgtgggggggggatctgttcaacccttgcctctaggttgtttctgtttccttttgattgaatatacatttttgtttctcataaaaaaataaaagtacatgagcacgttgttaatgaaaggcaatgaagtttgtatcctagggagagacgacagcctcttgaaaatttgtttggctcatctctctacatatatactattgggatactatgaatgcttttatcaattggtatcgcagcaccttttagagcatgtgaaggggtaagaagatggacaaccttaagaaatcagtagattaatggttggggagtagaagtttagaatatactagtgattgaaatgattttacaatgttagtggagggagttaggctgctattgcagagacaagaggctgtgcttacatgagtgagatcgtgtaaatgagtgaaatggttttgagggggcgaagatgagcaaagctgtcaccagaaggttgaattaccagcatttgatgagagagattcgggaggatggcaacctagcacacctttgattttagggttcgatttctggtggttgtttagcactaattctttttagtttaagcttgagatctttctccaagtcaacaaataaaatttgaaagattgtgaatacattgtttaagtcagaatgggtttgaaaggagtattaaatgatggtcactgtacttgaaaaattctttatatcatagtacttcatgtcatatttgatgtcttgcaagaaaacttatgtctgttgatcaatctctttgcttgcagattttgttctcatggtacaatttattgtcattttactttaaagggtggtgctttttttttcctttgttttcttttatcagattcattgatgttttgctagaaaaattaacccccctgtattggacttgtgtttggcagttgattaaa

SEQ ID NO: 7629 - DNA, 4615 bp, Cucumis sativus
  Intron number 24 from transcript Cucsa.178290.1 (locus Cuc sa.178290) derived from phytozome v7.0 (chr-ID scaffold012 27; pos 455408 to 460022)
gaaactttacttgggaaacaccatccaaggtagattctttgaacttatgtgtcatatctggatataaagctactacgtatttggaacatatgctcctcttgtttgtacgaacctaatagagaagattttaatcataaaatttgataaaggtgggaggaattgtccttgaggctagaaaactaaaaatagactcgttagtgtaccattaaattcaatcaatgtcaaaaaacagagacgtatcttacttgtagtaagctttaagatatgagagaatcaaaaaaaataatttcattcgccaaagagatatataaaagtatatgatagcataaatgggagaatgtaaaaagattataaaggacaaccagcatgggtttgacctagtggtaaaaaaagaagatatagtctcactaagaggttatgggttcaacccaattcatgttggtcacccacttacgaattattttcctaagagtttacttgacatccagctcccaaatgttgcagggtcaagcgggttgtctcatgagattagtcgagatatgtgtaaactggcccaaacactcacatatattaaaaaaaaaagtacaaaagacaacataacaagggtatttactacaatataacaattctagatgaacttcatgcatataccatgtatatgaagtttgactttgaccttaaatttggttactggcggtatgaatggaagtgacattgtaaagatttccgtactcacagggatcactgtgaatttatggtgatgcctttaggttaacaaatgtcctgaccccattccaatcatgtatagatcagatttttcacccccttaagtagatttgtattagtactccttgattatgatgtgcaaataagatattagggtcaaatccttaatttattttcaaatctttaatttattaggattagaattaggattagtttctttggtttattaggattatgattagtttctttcatgaattatgattaggattagtttctgtcattagaattaggattagtttctttggtttattagggttatgattagtttctttcatgaattatgattaggattagcttctgtcatgaattaggattaggattagtttctttcatgaattaggattaggattagtttctttcatgaattaaaaatagagtactagtcttcttgtattcacaacttttaaacattaataaaattctcatatttggtattagagaagccgtttggaccaacgttgattgcaccggtggaagatcgggaaactcttcgtgatgctgatcacaagagggaactttgtgaattgtgtttgttgtcaaacaacacacatctaaccgggggaactcttgaaatttcaaaaaaaaaaaaaaaagaaaccaaaaaatcatcaaagttttggaacaacggattgttattgatcaaggaaggtgacgaggaagaatatagtagttcgtatagtcaagaaagtcaaatttcctccgaaaagcaatattggaattttgattcaagcgatttagaagaagaatttcaacatgataatttcacacgtgcccaattttctcaaagaacctatcatcatccacacttgaaatttgattacagtgattctagcgattccaatgaagaatgcagttcggaatggaataacaacacgacattatcaacaaagaacctgacgatccaatcaaaccgatttctctagaaatcaatgtaagaattgggagttagatgattcagaaaatggttcagagtgaagaaaattattatcaccaacatcaaagaacacctatgaagcattccaacacaatttggaggttgaaacatttttaaggaaacaaaaataatcaaataaaaacatctatgaagagaactttcgaaagagaatgaaatttggattcttttggacaaaaataaaacaaggcataattataattttcaagatttttcaagaaaccgtcaaaaatcacatttagtcactttaaaagatcaagaactcgtctaaacgggctatggattttcggaaaaatgaagtaaaagaaaagaaaaaatcaattgaagatgaattgaataagataggtagaaagatcgaactggagtttgcggtagaagaagaaaatacccacgaacaaaattatttgaagaaaagtgaaaacctaattcaagttgactatcgaacgacaggagagattccatatgtcaaaccgaacatttttgtttaattcatcgactgagcaaaagagaccgaatagaaaactttgaccaaggaagatgaagaagattctttggctgacgaaggaaataattggaaggtcgttgacatcccattcacaatcattcacaagataaaagaagatgaagtagcagtgcgagatgaacgatttcgggacagttcccaaattttcctttcttaacccaaaaggcacattcccagacccagtcccataattattttcacaattcatccatgcattttcgttttcttaatctaacccagatgacccaatgtattccaaacaaaattttggtcttctcaacccatgacccacacattttgattcaaaatcatctccaaacctagctcggttttgaagtccatccaacattaatacaatctgtcatctgggccatattgaaacctacggaagaaatgaagtccaaccacaattggactttcatcacacttacaaaatggacttaaattcattttatgagaaaaatgcacactttttgacaacagagttttttattaccacattagttctaggatcgattggcaggaattacagagttaggatattattgatgttggatattccaagatgcctccattcgactgacgtaccttttatttttacattcgtttttgttttaaaactcgaggacaagttttttttccggagggatagaatgatgtcgtaggaataggatatcatggtcaaattcatagtttgttaggattaggattagtttttttggtttattaggattaggattagttttttttattaattaggattaggattagtttctttcattaattaggattaggattagtttgcttttcaattataaatagattatttgtcttcttgtattcacagcttttaaacagtaataaaattctcatgtttggtatacatcagattacatccttgtctatagtccggattttttagacccattttaagcaccttgaagtcgttctcaatgtgtttgacaatcctttatttgccaaaggaaagaagtgtgtttttgtatctttctgtgaatggagttgatgcagatagaggaaagatatgtgctatgctccgagggccgataccaaataaactaaactagatcttgaaccaaaaccaacctgaaattgaactgaaccacaaggtctacttgtgtacaatttaatatgttctagagatccacagatgcgaacagctgaatgcttgcaccttatatcgtgattcgcaacagtggtagaggacgcaagcgatggcgcaaaggatgtgaacatcagtgacaaacaacatgaatgaatgctatattgcaagaaaaaataaaaaatgactgtagaggcttgcactttgcttttggaggctcgcaggaggtagagtggcgttcaaaccgcaattaggttccaattgttaatggtggcaactaggatttagattctgtctggggttttgaaaccactaagaattattgtttcgatatgccaacttggattgggaagaaatattaatttatttcttcttataaatcaaatacaaggggttcatagcgcatatgtagaagaaagaccaactaccaatgaggaaacaaaatcttataaatataaatgaggaatacacacactgtgtatctaatattaaaaaataagaattcaatataatgatatttacaataatataacaatactaatattagcctataacatttatgtatttaatatttgttagccatgagtattttagccaacttaccacaaattttgtgagatacttgcctggcgttacaatattttcatgttcaaggtaggtggcaacaaatcgttaattcattttttcaaatttcattttacctttataagtttctcctaataataaccagatgactcgctgatttataatctcaaaattactttacttctatttaaatcaactttctaatgcaacgcagcaggtaagatattaaagcccaagaatacttgattggaagtcgttaataaaaaacacttttgagaatgttagcacccttggcctttactacataaatattactatgaaactaaccaacagttactacgaaaacctattatttattaacatctatgaacaaattctaaaatcgcaagattactctcattctaagaggaagatggcttcttttggctggctaaaagattatattcttcggactttttctttcttccaaaatcacccaattttctcaatctttcttagttcaatggcaatgaaagtgttgcatggttatgtggttttcatgttagattttcttagtatggaaattctttcaccaaattccatgtgatatagtattgatccctcttttcattcaggtgggttgccaattaccacgagcacgaaacgctac

SEQ ID NO: 7630 - DNA, 1904 bp, Cucumis sativus
  Intron number 1 from transcript Cucsa.219390.1 (locus Cucs a.219390) derived from phytozome v7.0 (chr-ID scaffold0165 8; pos 1177787 to 1179690 reverse strand)
tcgattcctccattttaccaaccacgctcttttaggttttccactctgttcccttttcttattcgatttcgagaattgatcagaatttgttcataatttcttttcaatccactccagaactatctatgcttttacgctgctttgaattttatcgttcgatgtgatccatgctttcttcgttgaattgaatgagatggggctagaacttttgcattggtgggttgggaaattagtgccaacaaataaagaatgcaatgctcctttttatatggttttgtgtttctaggttttctcttttgttatttttgatttgagcttctaacattttcggatcattggtatatcattgagaagtttcgatttctttgaaagatttattaatgcgcaataatttggtgcatgctacgatgaaccgaagtttttttttttttctctttagtaattgctttctttatttatttttggtagttaaaaaaggtgtcgttgtaatgtccatgagtttgtttaatttaatgttttcttactttcttgtgctttgggaatctttttatcaattcgataattgttttgggtttttttataattaatttattggggttgctatcatgaagaaaatgggttttgaaagttcacttgttccgttttatgtttagccaattgagtgaaaaaaggaataaggagattttcagtgtagtgttggggttttgaaaatgttttggattgaatttcattctttgcttactgctggtagaaaatgaaaaacccttttcctttgagattttagttttatcccatgatatcgattgctttttattattgtacacggattttgttaatgtaatgttgaatccgcgttgtataaatgttgaattcttaatgtgtccaattgtttgattctttatgattaatgccgtgaataagttattgttggcattcttcttggagtattacccagaagacagcttcaaacttgaagactcttaattctgttgtagcaaaaattgtaaaaagtcttggtcttagttcacaccatccctggattaggattcttctgttttttcgccccaaactcattgcatttacactttttcaagcatcattttcatcctatatctttcgctataatgattggtgatgcttctaatatgtcgtatcggacggtgtgagaggaggggaaatgaacgataatccaatgaaattctcagaaatcggttattcatgtagttgcttgtgttagcatcttggtggcaagggctactttctaccagggtcctattttaaagatcctaaggttaaataattctataattttaaactcttgttgtcttttagaattggtcttgcggtaggcaaagccttgctcgggattagcaaaatatcagttttgaggaagataagaaaaggcaaaagtttgtagttttttgttggtgtaacagtaatgattatttcaggtttagcttaacttagcatttcatgtccttgtatggttttatagcttaactatctttttctttgtaattgtctctcatttattttaaactttgacaatatttcaaggtcaagttatctatctttcttgacctcctgattctggttaggaattaggatagtgtttgaaaattgactgataccgtgtagtgcaactttgttgaatagccgagattgtcgacgttatcaaaagagtgcaatcaagctctaagtggtgactccttgattgatgtctaacactagacaatactagtagctggaaaatacatcggttttggagaattgtctgttatcactgtcaaccatttcattacttgtatgatacagggctgtagaaattcttataggaacttttaaccttcttctcgttcgtatggtttgattggttgattgatttcaggatccatagttaaaca

SEQ ID NO: 7631 - DNA, 5208 bp, Cucumis sativus
  Intron number 1 from transcript Cucsa.088060.1 (locus Cucs a.088060) derived from phytozome v7.0 (chr-ID scaffold0088 8; pos 484148 to 489355 reverse strand)
agccaaagacagcgctgccctccggtatgtacacaaactttgtcctcaactgtccttgttttccctttaaaagttatgcaatataacttctgttctgataggtttccttctgggtagtactcattgattagttagctcgcaccatgtttgtaatagttagtgtctcttaccattataacctataatttaactatagtcttactcttttcaaatccctccttgttaagcagcacagtgttttactatttcatattcatccttgtttttcctctttgttacggtgtttctattttctattcaaactaaaatattcgacacctcaaacacaaattattaaaactatgtaacacacaaattattaaaactacttaacacacaaattattaaaactacgtaacacacaaattacaataatcaacagtgtccaaaagctgtctatagttttgaaaatggttccaacaagcccctagattctcctagaaaagaatgggttttttttctaatatctaaatccttagacagtcagacgtgatggttattctgtctagcttttcacagaggatcccacgttcttagcaacaatttctcttggtaatgatcacactcaagaacgatgaaaatctcaacagcatatgtatttacaagaaatcgactacatacctcaaagtacgcctggagacatcatatttgttggaagttaacatatacagacactgattaagcttcattataagaataaatggccatgtctgctcagttatgatgatggttcctcctagctttccattggtactttttcctagtcactttttcagccgaaaacatgaaaatcacaaaaagctgtcaacgattataatatataagaaacaaaaacttatcccgagttttaaaaataacattttaatcataaacattaaattaagttttattcagaagatgaagccatcacaatcagagtatcagtcactgaacttgatcaacagaagttcttttaggttaatggccggtcctcatctatctatagtaggcatatatgtagaaaaaaaaaactgtatagtggaacctcagaatattcactttaaacctcgttattgacaaataaaatgattataaagtcttaggaagtcaataaccgtatttacccctcaaatggtgattacaaaaactgaaagttaatattcaaagtcttagtgtgtctgggtggtatagaatgtagatgtgtgtacacattcttttcaaatactgaaggatctgtttgagtcttcgatcaccatccaaatgtttaggagctagtagtcaaatatcagtttatgttttcatagttgatccacaattcaaaaatatttgtagggatggcgaaaaagtcaaatatagtcaacagctattgacatgtacctcatccctcgacgtggaaagttcaaaatttcatatcccagttattgtacttgagaaaaaaacaaagaaatttgccccaatatttaagtaatataaagaaacaaacaatattgtaatcaactgcattcgtatagtagtgtacacgtgtgtgtatatatatttattcaataattttgtcacctaatgtctttgatggctggcctgcatcttctactccctgtcgaaattattcagtagaaaatctcctagaatgtcttattttctctgccacggcggactccaacttctatcctacaatactaaaaaatcaatagttcagttgccacatggttggtatccattaaccctattctgtagcaataattgcaccacagtctacatacaaatacagggtttaagtaagtgatcgatgaggttgggccaccatttgaagcgttcacttggatgggttgaagagttcaaagtgaaatggaatttctaggtgttgcatggggaaattttttacattttaacttgtatctataatctttccacttcagaagtctgagagattaaagtaaaacggactttacaatttcatcaacttgtttagataatttttttgatctaggacgactattaggcaggcagacttttttcttcgtttgagcccccctgcctaggtagagaaagagatagatgtgctgtgacaaataggatgtggattatttggacccagttagttgagctaaacgttgattgactggcattggaagagtatcacttacggaagcttctctttgacgaaacttcacatcccagttcgttaaagtccttcaatgaaatcatcattcctgatgagagactaaaccatttcatccattcttctccatttgatagctctaaatttacatacccctgtaaaaaaaagatgcctaccagtccctccaaaaccttgcttctagttttgacattcatagcaacagttctaatccaaccactgattatttcatgtgatgatgatgatgatgatgaggataaatatttgaactgctactcatcattgaactgcttcagatattcaaatctcggttatcctttttggggtccgaatcggcctgattactgcggccatccaagttttaagttgacctgcgaagatgaagctgtaaaaatcgaaatcgagtccaccacctatcgagttctcgagattgacaccaacacacaggctttgacggtagctagaatagagaacaatacttgtccacggtacttgaaaaacagcacgtttgactcgaacatcttctactacagctcaaacactcaacccctaaagctactgtatgactgttcatccttgccgcctaagcttcctggaaggtttagttgcaatataaacagtacatattatgttaacctcatcgtaacacaggataccgatagtgataccttaaacaacgtgagatgcaaccatggtgttgatgttgcaatctctcaatcagagatgcaaactctaaagagcaagccaagtgcggataatctaataaaagctctcgaaactggatttgagttgcaatggaggatagacaatagcttgtgttaccagtgtcaaaactcgggtggccagtgtggttcgaaaccaagtttgggtgaattcgcttgctattgtttggatggagcctttaaaaccacttgtggatcaacaccttcaggtatgtaccatcgaattcccactctaacccacaatccttttcagtgtttttctttggaaaacatagattcttcttcatatagaattggttcattcagaagctaagttgattcaatcaaggctcaagttttctctttaccctactagatgttcaattcatttctcccaaaagagcttccggggtttccgcctcccagtaattctcctatgatctttgattattattttcccttgaacaaaatcctgatttttgtcatgaataaagaacaaaactgtcggaacgccggtttgagataaccattttaagctccatttggttttagtttttaaggtttagaaacactttcttcattttgttatttccaagagttgttttgaaaatttaagccaacattttctataatttggctattatttcaaatgcttcattgaaaagataaatactaaagtgacgtgaaaacaagtatagtttcaaaaaccaaatgattatcaaataggtattaccttttttttgtatatttgaaaagtaagcgtatatacaccacaacccatctataaaaaaaacccatctatccttatttggttatccagttttgagaaaaccaaaaaaataaaaataaaatttataaaaaaacttgtttttgtttttagaattttaataaaaaattacagcaaacaagcataaacgaaaaaaataaattatcaaacaaaccttgaattcttctttattttcaatattttgaagggccatttttcccaccaaacctaaagacgaagtcagtcgtagatagcctagagccaaccctgaagctccagtagaaggaagtaggtgcggactttgaattccaccaaaccactgaactcaaatcagcaaatgccatgttgttctttccagtctctacaatataatattcttcaaacttaatattcgtaaaagaaagtaaattgaaattacatcacttatgtttcgagtgttttaccttgtctcatcatcctgatttgctaaacgacgtcgcgtctgacttaaaaccgaaacttggacactgagatctttcccattttcgcttgagtcgctcaccccatgtttctctttgtgttactcgtcggcttcagttcgagtctgaacagatttagatttttcatttcttatgcttttcttttcttttgtaggagagaattaggttttatatgttaggtacaggttgaattacctgtttaaggactaaattttcaactttgtgtgtgggcctttctggctattgactacaaaagttctaagatcctttttcttttcttagaaaaatctaaggtttaaaagtattctttatattagaatattagattcatccatttttaattttaattctttgagttgtgtttccatgaaaatttgagatttacgcgtttattttttttttatttattaaattatcacttctgtttgtatattagttaattttaaataattaaaataatcataactatttaagtttcataattaataagattaatagaatttatttcataattatttttaattaataaatagatgtattgtaaagggttaaaagtgagaatttggtaaaaaaattaagctgaaaaaatgttaaactcaaaattttggaaacttattcaaacaaaactaaaatctcaaagagacattttgaaatctattgattaaattgaaaagaaattcaatatttgttgactaaaaacgtaatttttaaaaatctaggactaaattaaaaaaaaaaaaaatagcttaacaattcttcccatcacaaacccttcttttatgagaaaaaaaaacaacttaccaaaaattcacttatggatgcattatgcataagcttgaatatattgaatattaattactttgataacagtaaataggttattattggctttctgaacacatcaagaataaatgtataatgtctcaacgtcatactatgcttaattaattagaagagagataaattcctgttttcgtttcccaactctctaacgtattatctttcttatgtgttaattctttctagatttgagttcgaactgatgtgtccttgatcttgtaaaaatttgcagacgactcaaagaagtccaagaaggaaaaagtgaaa

SEQ ID NO: 7632 - DNA, 1958 bp, Cucumis sativus
  Intron number 1 from transcript Cucsa.318720.1 (locus Cucs a.318720) derived from phytozome v7.0 (chr-ID scaffold0307 6; pos 247789 to 249746 reverse strand)
tattctggacaatccaattggattattttctcaaggtaaataacttagtttctgcattgcttgagtgagtacatatttttgctccacttagaacttttggatgatatctataaccatacttgaacaagatctattctatagattgtacactttccttcttcatagaattgttggatgacattttgcttttgctttggtagttttatcatttattttctatttggtttcattccactttgtataagtgaaaatgagaggggagatttgggggaaaaacctgccgtcatattggcctggccttattcgttttgtctttgaaacttacctataaacaatcttattttcacttaaaataatacaacccaaccactcaaccgaagaaataatgtttgaggtaggatcactatattttgaaaaattgtatttagtaagtatagtaaggatcttagatttgagtttgatagaattaatgataattttaagttgttttaatagtcaaaatgtcacacttagggttgtaatttgtagttggttatgagtttaaaaatcactttaggcacttattggatactttttaggttggtttgagagtaaaatgtatcactcacacgttttaaagttatcttgagatttgatccatccttttatgttggttgagttttgaagtagtacttcaattattttcaaattgttttgagagttaagtgtcacttagacaattttaagagattttgtagttggttttgaggttggtagtcacacttaatcattcataagttgttatgagagttaagacaccttttaggtgatttttagtaggtttttagtttgaaagtcacacccaaggcactttttaacttgttttgagagttaaaacgtcacttcgacactttgtagaaattttgtgtttggttttgagttcggaaggcgcacataatcattttgaagattgttttgggctcaacacaatttgtaggtgatttagttggtttttagattgaaagtcatatttagggagttttgacttgtaatgggatttaaagtgttacatagacacttttaacttgttttgagagttgtattgatattttcacacttttaaggaacttttcagattgacattgatattacatgcggatatctttcagctacaacagccaatcatgcatatattccatacttattgtatgcttgagttgtaatatgttgtgtctattctgcaactacggtagccattcatgcatatatttcatacttattgtatgctttagttgtaatatgttgtggctagtctacagctacggtagccaatcatgcatagatttcatatttattgtacgctttattgtaatattgtaatatgttgtggctatcctacatacattttgtaggcttgagttttattcctacttaggtagttttaacttgttctgaaagttacagtgttacttggaatttttttagaaattttgtagttggtttttagtttgaaagttacacttgagtagtttttacttgttttgagaattaaagtgtcacttagaccatttttagagattttggggttggttttgagttaggaaggtacacttggacatttgtaggtttttgagatttaagacttgaagtacttaaccacttgttaacttgttttttgagttaaaagtgccatttagactcattttagagattttgtgtttgggtatcttttaggttgttttgagagttaaagtgagacattgacactttttggatgtcttttaggtcggtttgacattgatactgtttctatagacttgaaagaaacacgaaacagtccttcctcaacttcctcacttcttctatatttcaaacttgaccttagtcctccatttcaattgcctattttcgtacctcttcaatttctatgttctcatttttcaccattttatttccaggatctgattaagaagtagatt

SEQ ID NO: 7633 - DNA, 1443 bp, Cucumis sativus
  Intron number 6 from transcript Cucsa.281850.1 (locus Cucs a.281850) derived from phytozome v7.0 (chr-ID scaffold0264 1; pos 35667 to 37109)
gtcttgacagttcaggactcagctcttctgcagctgtaagtatatatatacatgaatatatttttctcatgctttgcgtttgtgtctccttttgctttctgacagctgtaaagtcggctgattgttaataggattaaattacttcataaaattgatttaccaagacttgagagaatcattctttcctggcaaattagattgacacatgatttagccaaagcgaaagcaagcccttatttttttttggtcatttttgtggtctcctctctatatttgaatttttattctatacaattaacgctgtggtatgtgtataagttttgctccctagtcaatgtgttccaaactcacagctttgtttacttttgcatggaactttttttccctttttgcaaagagtcacttttgtcctttcctaagcgcagagttcacaagagatatcatcacgtcatttgtctccaatcaactatcattgccgtccctacagagctcaaatttggttgttctagattttctggaaggaaggagaaaagatcttgagcgattagatcagagttaaagtaggggtgatgacaatgatagttggttggagtgaagcattatgatagtagcgatgagattgccagagaatgggagaaaggaagaaagaggatgctcatctcataagaaagaaatattaaattattaattttggcaaatcagcaggttataatgaaaatttattgtcacgtttgtcaagtaatggttaaaggagcttttgaccatttagaatccttctcaaaacctaaagtacccgaatgttgcttgcctcgtggaccaaataaacaccaactctaaacttcatgacaataagtctatttttccctatattatactatactagttaaactttatactttggggcgagagtttttaaaaaaaaaaaataaaggtcttatttcatataatataaattgatatacatttggctaatcattctcactttgaacaaggaaataatttttttaattaaatatgtatgaaacatattttgcggaacaagagacttttcagttgattgtaatttgcaatgatgtacgtagttatctaaaacccctaagtggagttcacaaaagactactatgtgatttaaaattttagagtgatgggcccgagtcaaaggaatttggtaatatgcaaagacgcaccacctgaagtctgttgtaagtcttcaatggaaaaattgaatatcacgttttttattgcaggctgtaatgtagctatacattaaactgaattgtaaagataaagtacaaagtgggatgttttcccccgtttgttcttggaatgttacattgctaattttgaagctcatagtgagaggtttcagttttaataacgaagttctaatatttttagcttatggttgacaggttggattggcttacttgttagcgctggaaa

SEQ ID NO: 7634 - DNA, 4393 bp, Cucumis sativus
  Intron number 1 from transcript Cucsa.078790.2 (locus Cucs a.078790) derived from phytozome v7.0 (chr-ID scaffold0079 3; pos 1220355 to 1224747 reverse strand)
atttagcaagtaccatcgctgaatttaacaaggtactttgagtttcaatagttagcgtttgtacagaattcgaagttcatattatcgtaattatgatctttgttatagctgatcaacccttatacggtgcgctaccatagggaaagggaaaaaaaaaaaggaaatttcatgaggcatttcttgtattgtttactagataaccaaaatactccgtgtctggccattttgtggggtggtactattacgtttaggagaaaggcatagatggttatttccagacatcggttttcactatatgttttaacggaatcatcctactgcttaaaattattgtcaagtgattatgttcacgttttacataacctagtaatggcagtgatggttaaatactattatggctcccattgtctaaattaagtgtttaatgtcagtgctacgacttaggagctcctcttcaatccaccttgtaggaagaacggttgctttttatggtttgctgggtgggtgcgatcttattggtgttgtgggctgagagatatagaagagtgtttaggaaagtggataaagatcctttaaatttttggtctcccgttcgctttcatgtttctttctgggctttgattttgttgtaactattttatagccattttgttgcttagttggagccccttattgcagagggaaactccttttttgtgggctttgtttttgtatccctggggttttgtcaatgaaagttgttttcattaaaaaaaacacaaagtgtttaacaagggttagtaatttaggtcttctttgataaccttttcgcttttaaaaattaagcttatgaacacttctctacgatttctttgttttgttatctaggattttttaaaatttagctttgaattcaaatgtacttagaaaaaatgaaaagagtggtaaagaagttgtaagaaagcaaaatttaaaagactataaaccaaaaaccaaatagttatcaaatggggtcttgcttttatgattatgatattgttgttaattgtttgcttttttttgtttgtaactcattgtggaagggctattcttcaatccatttgtcttagggtcagttttgcttatgttaaggaccaataactcaaacagcgttgtagaaagaagggctaaacttgatagacgggataactaaacatttttgtcttttgaaccacattcctgcttttttttaagctatctcggggcttaagatcaatagaaatgttatagttctaatctcagggatattttattgttgtaaatatctttgttatattattcttttatggccttttctacactttccttctttggttacttttgttcgcttgtatatatatttcttcagtgaatagaataaaacattctgattttctcaagcttaagtattttacatgagtgttagatcccgagtctgagttgtgattttgttagggtgggagagtgggccaatatggtgggttgtttgtgaggtagctgtctttctgatattgtatcttgggctccctttgggaaataacctgcgacttttgtctctttaaaggtcggtggagggtaaagtaggaagagattagctttcttgaagagaagttattttccaaaaggaggaagactcatatgaatttagttgttttgagtgggatgcccatcttcttctcgcttttcagagccctgtgttcgatgtgttagagcctagaaaagcttatgaggaatcctttgtaggaagatgttggggaaggcaaaaacccacttggtgaattgggagaccattggtgaacctgtttgcctgagagggttgcagctagggaacccaagggcttgtattagggtgtcactgaaaaaatggttatggtgttttccctttgagtcctcttccttctagacttggatgatcacaagcaaacacgatcctaatctttctctcatttgattcaatatgtggtgggagatgggttggtgaattatttatgggaggatagatgggggactgactcctttgtagtagatggtcctcatttttatcacctttctactaagattttttttcactgctaatgttttgttgcttttggggagctcatcatgtttcttgttcaattttcgcttcctttggttaatagggaaaaaatggaggttatttgatagtacgaggctccatctcaaaaccaattgacaacgagagtagtacctcatctatcttaaagagtatgagtcgcctttgtttttccaatgtagaattcttagcaagcttcctcttgatggtgcctctttggggtcacagatctcaatttcattttcttggaccaaatatccatttgggctttatgggttctaataccatatttgataatatgtggttccatctataaccaattgggaataagaggagtaactcatctatcatgtaaagagtaggagtcaccttggtgtttccagtgtgcgattctcaacagaagtggttgggcaagggagaaaggatcctctttgttggtgtttcaacccttctgaggggtttgcttctaaatcttgtgttcttttcttattggaccctttttcctttagagagttgttttttttctttgaaaggtgaaaattccgaaaaacacaaattctttatttgacaggttattcatggtatagttaataccttggatagactttttaaggaagatgttgtctgtggttgggtctttctgttgtattctttatcaagagacagaggaagacttggatcacttgttttggaattgcatttatgccggattggtttgaaacattttcatcggggtgtttgactattggttacggtcacagagatttcagtgttatgattgaggagtttctcttccattcgccgcttggaggggaggggtattttcacttaaggttggggttttttcactgaaggttgggatgtgctttgttacgagggcatttggggtgaaagagtaggatcgtttttggaattgagaggaaatcttttgatgcttggtccttgacaaactttagtgtttctctctagacatttgtgataagttctttttgtagttatttgttacactttattttgtgttagattggcgacaatctagtgcattcccttttgtggtctttgtttatttattttattttttattttttataaatctcaataaaagttggtctttcattaaaaaaacagaaaaaactaaacaaaaaaaggtttgaattgagagcagacaaactgctttggggaagttcagaaacccttggaaacacttcaaaaatgattttgaagcaagcacctaattaaaatattcatctcaaacgctaacccttttctcttcgtccttttctaaaagtgttggtgagaaaaatacctcagttatgaacaaattctaaaccaagcttaaccataaaatagtatttgctgttttaatcataatatagtatttgctggataacagtattcttttcatggctttggtttgctccactttgtttctgtgtggtttgctgaactagaacagaaaaaggaggcgtctatttgtggtttcttaatagtcttacattatgctgccgctgcttcttctcaattagaaaatataaataatgtcacttaaaaatactttttttgttgacgactaaaagaaattttattttcagaagctgtacaaaagtttcccttgttatagtacttgctggctaacagtattctatacattcttttgaaaacatggtgttggtttgctcgtctttgtgtggtagtgatagacattctattattctacaatataatagaatgagtaagaaagagggttagggttccttttaattgttcttgaatcttgactcgtttgtcctttatttgattgttctgagttctgacttttactttgagatgtaattgtaagcaacatttttgttctacaaaaagtagttcatattgctttttaattctcagttcgatatcaataaatacgaacacattttggtgttctatcaggtagatgagctggacaagagtagaaaaaggaaacttcttccagtggtctcttacaaaatttagcatcatgttgtagtctctggttgcttaggaactctttttgaaatagtatctttgatatttttatagagcaatgattcggtgcaacaatctcatccatcactttcttttacacaaaaaagtaaaaataaaataaaaataaaaacaattcattattaaaaatctgcttcacggaaatattttattgctggccaggcacacccaatttggactgtatactatgaattgctcttgctacacttattatagacgtgtagtttgcttctggagctgtactctgcatgtctcttggatcccttctcattcaacttcgtactttttgatcaggaa

SEQ ID NO: 7635 - DNA, 756 bp, Cucumis sativus
  Intron number 7 from transcript Cucsa.029800.1 (locus Cucs a.029800) derived from phytozome v7.0 (chr-ID scaffold0039 9; pos 5150 to 5905 reverse strand)
atccaaagaattttgtggacaactacttaagagtaatttttttgctttgagttcagctgtgatttattttcttctactttccacttgtaatttttggtgcacagtttccttctaagatcatgaacttttaacattccacaaatgtctattttagatacctagattaatataagggtaattggctaagataggaagttagtagtagttattgtgtaaatgtggctactaaggtggttacaacttgttataaataaagggtgggtaagtgagaggaggggagatttagttattttgtgagtggtttctgcaagtttccttgacagagaggaaaaggagagaaggtagtttttacttttggttcataactcagaattgtaattcatcaattattctgtgtaatcgttgaagtattttcaatcaaattagaatacgcctacttggtattctatcagtctatttcagatttgagatattagcatttgatttcacgatctattgcttgacattcacagtaagtttagtcatgcaatcggtttgcttctgcatatttgtgaacttggggttcaatgttatctagatagtgatgggtttcactatggttagttaggtaggtggatgtatgaattgtaaaatgttcatgttgccttaggttggagtaattagggctagcaactccattaaagtaacagtatttgatgttaagtatgtacctacaaacacttcctgaatgtattatatttacaactaggttgttgc

SEQ ID NO: 7636 - DNA, 1853 bp, Cucumis sativus
  Intron number 9 from transcript Cucsa.143250.1 (locus Cucs a.143250) derived from phytozome v7.0 (chr-ID scaffold0107 9; pos 1567230 to 1569082 reverse strand)
ttatctgatatagcatttttttcggataattcaaggttggtcaaacaactccttatatttaattttttatgttggtcaataggtgtgcgactattatataattcataatcttggacagagtgaattgataaaaagctttatctatttgggatttggcttgattgtaataattgaatctttggagagactgagaggttttgtggggacatttggagatttaatacctctgtatgagcatcatcacatcgttaccgtaggcctctttgcaattatgattttggtttgactttgcctgattgaagttcctttttgtagtttgtttttggactccattttggctggacttctctttctttcttttttgtgtgcttgttattctttcatttttctccatgaaagcatagtttcttataaaaaaatatttgtttctattcttatggggttgtcttttcccttcacattttaggattgagtatcaactttaaagttaccttgaatgttacttcttttttgtaatatacttacgtatacataaatatatgtatagaaacaaacatatgtatgtatatgcatgtgtgtatggatattaaaaacgatgctttcagtaagaaatatgaatactacaatacaaatggatagacaagaaaaacttcattattgttatatcctatacaaagaaactaagtttgagattgcaagaaagagcttcaattgttgagaataagaacccaaagatagttacaaaactccttagaagcaagcattcaaaagagatgttaaatcgagtcatatatcacacttcatataaagactctcagctcctgcaaaaaaaaaaaaaaaaactccagaaagagatatgatggctaatttcaactttaccaagtgatgcagcgatgagtatagctaatttgaatgatatagatggagcagaggaagagaaacaatgcaaatagtcaagtttgataccatgttgaataacaatgaagtcttcatttttctctatttgatttaataagatcaatctcatacaaatagtcactgatctacaaaaggtataaaaggaatacaaaggaaacagggtaacaaaaaaagaagttttgcctactacagaaaacaagcgtgctaaagactaaaaaatgtgccaaaaaatcatgtgtatggattgacctttacgtaaagttgcctgaaacttgtgttaggttcctccttcccctgcactcagtgaaacctaacacaaaatgtgatagaacagagctgactgctctgatagccttgatattgataataaagagcaccaaagtcactattacaagccttaagaaggaaacaagagccacaatacagaacaattcagcaagctaaaagaaaagacaagagattagagaatggaaagaaagtagcaaaaccagcacattcgagagagctggaactaaaagcctctaccagcctttaccaaaaacagcctgcctacactggttcccacactttccgtttataacagcttttctgtggttcctcaatgattcttcttctccccagcgtttatgccgctcttgtcttctgtgcaattccgttcctgccccttcgtttatatgtatataaaatttggggtttaacaacttgatactcttctttcagtacatttatgatggatcgatcaagtttaagttgtgttcagacaaagtctttaatatggtgactgataatgctaactattgatttcttctgaacacccgaactttcaatgttttaacaccttagataagtcatgtctatctttattcttagaaaaaagttgaagatatatatattgtcctccatgaacaattttgtagattacttgcatctgatac

SEQ ID NO: 7637 - DNA, 2195 bp, Cucumis sativus
  Intron number 4 from transcript Cucsa.340850.1 (locus Cucs a.340850) derived from phytozome v7.0 (chr-ID scaffold0335 6; pos 3228580 to 3230774 reverse strand)
tgtcaaaatcagtgtatgcatcattaatcttcttcttcttttagtcttttgtattttgatgtagtttgcttattattttttcatacgtacaaaatatcacctattcttcttgtccaacaaaaaagtataaaacttatttccagcaactgcaattttttatattaaattaaatagtatcataaatcatggaaagagaggaatgaaggtactttcagtgggtttaggattggatggaaacatttgtgtaactatagcctttcttgatcatcttggatgaaggaatttactgtgcaggcccaggttttgtatcttgtgaagggggaatgtttttgcaatattgttttaaacttccattgcaataaacttgattttccttgatatagaaaggcaaatgtttgcttctttcgaggacatttctgtttcctattggatcagtactatttttgtggtatatattataggctaaactataaaaatgcctttgttgcagtttgtgtaaaaaaatattcttaaaatttcaaaagttataaaaatacccacaaacttttaaaaagggttaaaaaatactcttcctgatagttttgaatgggaaactgttgaagttttattgaaaagtttcaaaaatacccttgaacttagaaaaagtttaaaaccactctgacaattagtatatgaactaaaattgttaatatctcgttgaaaaataactctggtttaaaaatgtctctatcattggtatagtgataagtttatatgaagttgttaggttttatgagattgacaatatttgttttattgcttcaaagaactgtcactacatcattgttgtaaagacacttagtcctctgattagggttggttgttcagtttgtcttaagagtaacgtttgtattatcttgctgtagctgttttgacttgtgttagaagaagggaacattacatatattggagacatactccattttccttgtcactgtgtgttgtgattcactattcaatggaaagatacaacactgggagagagtctcacaaaatggggagctcaagtttttcagagagggagtctctgtcttagggggagcctaagactgttttcataaaaaagtagataacaaaggtagaaatttggatgtggaagtagggtctataggcttaatttaaaaaagaaaatcgaacactaaatcgttaccaaacgagatcattataatttgttttaaaattgattctttctgaactcaagaaaatttcaaataaatttaccactatactaagatacttttaatttgaagttattttttcaatgagatatttgcacttttagttcatatactaatgtgagtggttttttttaactttctttaagttcaagggtatttttgtaactatttaatagttcatgggcatttttgaaacaaaactttaacaatttccttccagaactgacggtaagagtatttttgaaccctttttgaaagtttgaggctatttttaaaatttttgaaagggattttgacaccaaatacaaagttgattggtttttttataatttagcctatatatatatattttccccttcttctaaagcttaaattcataagtaacagtctatagatgaaatgagtcgtaaatgcaggggattactgcactgtggactgtgaacaagaatatatggtatttgagttagatttggacggtgaatatgtatcctatagagtctttgtctgaactattactgttgttttgtattatgatgtagccattctgtgattttgtgaggtgttggttcatgagtcttccttgatggatcttagacgttaaacatgtttatggctttatcttgatgtgcttagcatcgacatgaaattttaaataagatgttaaacatgtttgtttaacattgttattttgctaggtaattggtatttatacaagtgcagctgcctaaacagaaaactgtaccacaaactctgaaatatattatttgcagcagaccactgctgatgtatacttctttctagcatttgacttggaacctattttggccttgcctacttcaatatattctttggatttttctgcctaaatttggtagcttgaattcccctgcttctaccagaaatcaatctgttcattgatcaatatctccataactgattttacttatttattcatcagtatcaccccaagaggagcac

SEQ ID NO: 7638 - DNA, 5193 bp, Cucumis sativus
  Intron number 1 from transcript Cucsa.237080.1 (locus Cucs a.237080) derived from phytozome v7.0 (chr-ID scaffold0202 3; pos 124634 to 129826 reverse strand)
aaccaattaaataaatttgtttctgcattgcttgagttagtacgtatttttgctccacttataacttttggatgacatttatgaccaaaagtataaacttgattattttttctccttctcacttataacttatcctcgagctcttagaattgttcgatgacactttgcctttgcttttagttttatcatttattatctagttggtttcatttcaccttgtttaagtgaaaatgagaagggagattgggggaaaactttcagtcatattgcccttattagtttgcctttgaaacttatctataaacactcttattttgacttaaattttaagggttgggttggtttatgaatacaatttggttattccggttgccaaaccaaccaaccaacccgaaatgtctaaaaaagaaaaaaaattagaattacaagagcttatagtgtttgagaagtaacagaaatacagaatcagcagaattatacaaaaacaaaactaatgggttgggctttagagtgtcggctacaatatgctatcttgacatctcctcaagccaatgaatgtagttgggatatcattgagcttttttttggtatccatgagtttcagcccaacttattcgcacgttgactaatctcataggacaacctgcgccctacaatatttgagtgtcaagaaaactagtaacaaattaatttctaggtaaaaatatcgttgagcttggaacaaattcttagaaaatctagaaatttcttttatagaaatatcaactatatgtgctaaagctggaagatgccatatgccaatactttttgctaggacaaaatcacaaacaaagtagatatcaatgtctttgtgttttgttcttgagtgagatggagaacaccaagtgataaccgcccactatgtttgttagatgcaaagctagaggttcttctaggatccttttcaaaacttacaaagaaagctaacttagatcaaacctagaatatatgatggtcactcttagatcctaagacaactcactccagggttagcttgatgaaaactaatccaatgaaatgatttttaacatcaaatctaaagcaagatttgaaaagataacaccaaaagggttaaataagcacaagctttttaatattggtattctccctccaaaatgttgaaactacatccctatttttactaattaaaaatgttgcggggcctatgaacctggctgctcaccttgtcaaatgggagtgtacttctcgctcgattttctatggtggtcttgggattgactctttgaggcataagaacaatgcacttttcactaaatggctctagagatttagcaagcaagacaatgcattgtggaggtgcttaattgtggctatttacggcttagagtagaatgggtggtctactaaagcttcgaacaggggaagttcttatagattatgggctggcattctaaaacataaggaagctttccttaatttcttggctttttttgttggctgagggaacaaaaatcagattttggaaggacagttggtgtggcatgcaacctttagcagaaactttccctggtttgttctctttgtcgatgaacaaggatgattttgtggctgattgttggtgtaatgttagtcattcttgaaatttgggtcttagaagaaatttgattgataaggagcttgacaacgtggccaccattctgaaaatcttcattcttaggcaccttcagatgattgtgagtcttaaatcgactcttaatgctaatgacagctttactactaagtctacctttcttaaattaaccaagagatccccctccattgctgctccttgattcgcgatatttgaaagactaaaatcccgaaaaaggtgaaattcttcttatggttgcttgcctatagaagcctcaacattcatgagaaaattcaaaagaaatttcagcacaccatgctcaacccctcgatgtgctgcctctgtttcaaagacgaggagaccctagaccacttatttttgcattgcactttcactaggaaagtttggtacactctgtttaaaatatttgacgtggaggtttgtcttcctagtaagattaacagttggatgttggaagtgctcaaaattagaggttatagtctgaaaggtcatatcttgtggagttgtgctacccgttcacttttgtggtgtatttggaaagaaaggaatagtagaatttttgaagataactataattctatcgattctttttggactacattgcaacacaacttcttggtggagtatgaattacaccgaacacttttgtaattatagcctttctacgatttttaacaattggtgggcccttattctttagtttctcttggggagggccgtcttgtcccttgtcctttggctgtttatcttttgttcattggatatgtctgtttcttgtaaaaaaaaatatactaattaaaaatgttaaatgaaaggatacaacatttaattttatgccctttcaactactataattagtgaaaaacataacattaataagtacataattcattaaaggtgtgaatgaatatgaatttctagattcattatgacttttgggggtccaaataacttttgaagttctaagcattgcaactcttcaagtttattgggaagcttagcttgaaagttactcattctatgcttcagctaatcaatgccaattatttgcttattgctaaggttatcatacctgattattggagcttgattcacaaaagtttcaaacaaagatttcaaccataatatctttgcagctccaagagttaaggctctatattcagcttgtgtgcttaattttgagataatggattgatgcctaatcaacatttgtagaatcaacgatgttgggactagttggtctctacaaagtatagtctagagtcaagtgttcctttagatatcttagtatcctcttaacatattgccaatggagagttgttggagcatgcataaactaacatgctttattcacacagaaagaaatttcaggtcttgtcaaagtaatgaaggatcaacatttgaagaagaaaatcctaaagagaaaagaaatgagctaagctttacaaaccaagcccatggtgtttgtttaaaaccatacaatgctttatttagcttacaaacatttgacagtttctctttgggcttcggtataaaagttcttttttttgtaattattcccttggtaatgtcttactgagttggaagccttccttgtagaaggcttgttgtttgtttttggtgggattgtttttttgtatgccccttgtattatttcattctttctcaatgaatgttgtctatttcacaaaaaaaaattgggtgctccatatacactatttttggtaataaaccatgaaggaatgtgttattgatgtctgcttgcctcaacttccatccgttgtataaaggacatgtaaaaagtactcttatggttacaaatttcacaatagggcttaaggtttcagtataatccatatcaactgtttgatgaaagcctttggctactaaacgagccttgtacctcagaagtagaaccatctgtattttgtataccatttacaggctaccaccgtactatctgtaggtcaaggtataagattcaaaagttccattttcttccttcatagcagctctccagtgatcatgtttcaatgcttctttagcatttggcggttcaacttctttgtagtctaaccaaaatactttaggcttgaaaattccattctttgctcttttccatctttggtattgcttgggtactcgacgcctccctcagctcctcggtgcttcagctattggagggtccgcctcttcctaagaagcctcagctgatttggttaaatctattaaaagctcttttagcggaattgtggtttgaatgttatcagcggatctttcaagacaagaaaagatcaagctcagatcagaaattttcaatttagtgcaatgtaatgcagcaacttggtgctctttaaagaaaaattttgcaaattacttcactcaagagtcaagacctttgtctcaattgagcagtttttctatcttagttagtttcctaggactacttctgatgtggtgttccctgtctggacttccatggagcttatttctatgctttctttttattttctcagtagtatcttggttgtactaaaaaggcttatatgtttctagccttttttcttttctagttttcaatgattttttatatttgctgtattggctggattccgctctcattgtaataggctggattttgttctcattgttgtaataagctagttttagctgggatatgatgttttggtgctaagggggtgtcaacctagttgagatgtctgggtgcaccttctgatctctattcttcttccgcttgtttggacttctttatttagctctttgtataattctcttgtacattgaaagtttgtctctgtttcaaaaaaaaaaaaaatgaagagaagacgtgttagttgtagtctcaacactcacttcattattggattggtatttacttcaactgatgggtaaacaactgatgtatttacttcaatggtcttagatatagcttcattcataggacaattctcaaatggcattcttgtaggagtagctatattatcaatggtcaatattatcactgttcctattactttgacatttttgtcaatggacttaggctagttcagacttgtttgaacactttttgaatccattcaagcagcttccagcaaggttcaagtctttttttgggtgagtttcaagtattaaacttatggttaggccttttcaaacatagttgatcaacgttatttgggcgaggtaacaattatgtgagagttgtttcgttttggaagttttcttgtggtggttacttctgttagatttttttggaagaatacttgagttcgagagttgtatttggtagtaagtgtttggtgaaagtattagttttatgcaatgttttatgctgaccttgaggtttctgtaaatttaggttcctttcttttttcaggtctctgtttgcttgcttttcacttttcacactgtatatctttccaacttcatttcttgttgaacgatatttcaatctatttttgatggaattgatattgccctttacagcttgtaaggcgagaaatcggttttataagtttgaa

SEQ ID NO: 7639 - DNA, 3144 bp, Cucumis sativus
  Intron number 1 from transcript Cucsa.139620.2 (locus Cucs a.139620) derived from phytozome v7.0 (chr-ID scaffold0106 6; pos 830874 to 834017 reverse strand)
tacaggtaattcatttcttattttcctttcatacacacacacacacacacatatatgtacactttttcttttcctttttttggctccttaggatccattcataaacacttttaatatgattaatcaactgtctatacaaatgtatggaatctattctcctgcttacctcaaagcatactactacattctataatgcattgctttgggcagtcccaacgccatgaccatcttcatcatatttccatctttctcacactaagaaattcaaacgaacaaaacttatgagaaaaatgtgaaaccacaaccaaataaatttagtatccgtttcgaatgacttaaaaaaaaatgttttctaaaaaatgcatttttatttaaacatatttttctaaaaactccttgaaagaaaaatgcatgtgtgtttgacaacttttttttcaaaagtgtttttaggtaaaaatttgtttgaaccgtggtcagtggaagtcaaacgacgacaattatcacaaaaaaaaatagttgttggcagttagccaataacagtcctagaaaactgattgacaaaagttgatcgctaaccgttaccatagaacaatcgacaaaaataagtcaatggtaaaaaaaatgaccgatgaaagttgatagccaacgaaaaacggtgaaagaaaatttggctaacgacatacagagatggttggtgaagatagttgaagatgttggtcagattgtttcatacaaattagggagattaacgattaagcacacaaaatctattttactaaaagttggttttaggtgtttaccctaaaccaggttattttataaatttattttttcaaaatttattttaggtggttgccaaacacatagtcttttctccaaaacaattttttttttaatttaataacttgaaaatgcaatcgagacacacctttattgtgcacagtagagatggtcatcgcattagggcttcgatacacatggtcaatgtgatagagcattcttgcataagcataaatttaaatttcatacatttgtaaaaggtcggtcatttaatcataaaggcacctttgaatgagttatccgtttaaaaaattctatatatggcttttgaaaattattatgatttttcttacaattttttttatgatcgtttcatcttgttttgtttaagaaatacttacatgtagtttgataattatttggtttttcgtttttagtttttgaaccttgtacttgtttcacatcaaatcgttaaaaatgatttccatcattctctatcatacctatctcgtgtgttttccatctctctactacaaaataaaaaaatggaaaatctattttttttaattacttaaataaaatttgtgagatgaagaggtgcaaaagcattgagacataaaatgcacccaagttattttagatcttattggatattggatcaacatatttaatcaagttttagaaacaaaaacttttacgaaaatttctttagcttttttaaatgaagcggttttgttcggttttagaatcggtttaaaacattaaactgaatcgaaccgtataagaaacgatttcaacataacacaaattgcatacaattgatgtcggttcagtttggtttgtcaaattggttcgattttaaaatattttatgaacacccttacttgttataagcttagcttttttatcaaaaactgaaaacaaaaattcaactagataaagaaagggagttgaaaaacttgttcctgaaagtttagttgtttcatccaatttctaattacataaagatcatattttcttaagaaacacattccttcataatcaaatttcaagaatcaaagtaaattttcaaaaccataagtacagttacgttttttaaaacagtgctagaaattgattacatgataaagaatatattaatgtatatagacttcttaaatatatttgaaataagttctacttttttcaagtacaaaatacaactctttctctgatctctaaagccaacttccaaacaatttattaaaatatattaacaccaaagaaaagtatatttttgtacaaaattttgactcatgtacaactcttaattttaacaatccaaaaaatatgggttttgtaggtaataaaaatctaaattctaaaccctaaactttaacattatactcttttagcaaccatttctttgctttttctttctaaattaaacttctttcttttcttcctacactaatttgtttctatcaattgttcgaggtagataacaaaaagaagaaagttaaggggacaagagtgtttatagacttaaattttcaaaaacaaaaaccaaaaacaaaatagttaccgaaggaagttttaagattttgccattcccaaaccggttttaagattttgcatcatggcaatatttcatttttagttcttttaaatctgtgtttgcatcttttcaattttaaatatgatttttaccattgttaaacatttgaacttttaatccaatttgaggaaggagggagggagggagggagctgggaggggagttcttaaaattattctttcttggttggtaaaattatatactattagtttttattagattcatgtgtgaaaaacttagtgttttctgcaaaaaatagaagtgatgaacaaatgatgtatgggcagatgagtgcctttgtataatatctgttttcttcttccttggggctcttctccaacccttgatgttttgccctttttttatatttattgacagaccatttcttgtataatttattgatatatttaactcgaatgaagttgggatataatgagggtgttgccaggtatctaacgtagttgggattcttttgccatatattgtatttttttttttatgctctatggaatgatattgtcactcctgttgttagtgtactaaatctaatactttcttttttgtaattatgatgtttatactattcctctctgctggaaggttcttctctagtttctgataagattttaaactcaagagaaaatgaaatacgaaatcttgggggcgatgatattcgatatttatatgttatgttgtaatgttaatgttatgacctcaaatgaaacattccagttttaccaacaagaagccaccaagttgaagagaca

SEQ ID NO: 7640 - DNA, 8506 bp, Cucumis sativus
  Intron number 4 from transcript Cucsa.212850.1 (locus Cucs a.212850) derived from phytozome v7.0 (chr-ID scaffold0154 3; pos 646827 to 655332)
ttaggcccagacattggattggttagttcaatcaccacttattgatcaaagttattgtaataatatggttaggcccagttttcttgtatagaagtttcttaaattaccaatcaaattcaagagggaagctgatgagtgaagttaaatttaatattataacaacattctaatccccactttacttgtgaatttgaaatttgtgaagatctaagacgtataaattaacattaaatgaagcataaagggcataatgagtttttgactttgaacaattactgcttttatcttaaatcacaactcaacccaaaaattactgatgactaaaactaaatttaatattatatcaccaatctaacaaagatattgcaaatgtatcctggatgataattggcaagtaaaatgaaagtatgtaccaactaacttaactgaggctttgctttgagagagaagtaaatacgtatcttaggaagttgactcattaattcttaatcatttgccacttcaatttttttctactgataaactaaaaaaatgtattatttttctttatctttcacttcacttcaaccaagctttgacagatgtcattccttaccatcatatcatacaagtatatgtgaatttttagccataaaccaaagttgtctgaaaaccaaacgaccatataatatgctgactgaagtagcgctaggagaaatgggaataaaaaattaagaatactattttaagtacttcacaataggtagatatagtattattaagaaatcacattctgtttgtggtttgctcttttttccaaactctattctgctcgaacttgtttcaactttcaagtacctccaaatcattttccttaccttgaaatatcagattgttggggatgttactaagaggagcactttggcacctgagaacttaaagggagtgagaaaggtaattaatgctgtctccgtcattgttggaccaaaggaaggagacactccagaaagagcaaagtatagccaagtatgtctattgatgtctactattattatttttacccttcaatctatgtcagtataggtattactattttaactttctgaccatttgtcaattccaggaacttattgtttatattcaattccatatttctgcagcagctttctgattcaatctttgatatggtgcagggaatcaagttctttgaacctgaggtgactagctaaatgtcggagtcagatttgaatgaatgtgatttgggagttgaaactaaaagttttagttgacttggacatgtatggtagacaacgtaagaagtaatgcttcctggcgagattgattttatggttaattgatgcagatcaaaggcgattcaccagatttggtggaatttattggaatgcaaaacttgatcaatgctgtgaagagtggtgttggactccgaaatgggaagctactttttggatttgaaggtacacttcgatcaagttataggtgatttttccttttgcttttgtgagccacttggtcctatttgaaacaactacctgctgttagaaaacaactacccgctgattagaaaacaactaccagctgtagcatattgtatttcattttctacctacaaaattttattccaatgttgaaagatgtattgcaattatggcagctgatacataaatgatgagcaccattttcctatattccagttctataacttatggatgattctttaatggatgattctttccatctatgctttgaatctgttagttgacgctctgtatgaccaaacagagggtctagtggcacctctagattgcgttatttgatatttatctctaataataaattgatctcttcttctcgacgtatcttcttctacccatggaagataatcacgtaaattatgtgtcgatgatgcaatcatgttctaagagtaatctagtttattacttcattatttgcaggaaacagtatcaaagaaattccttggggtgttttagacgatgtggtaatgggtggagtaagtgaaagttcatttcaaatcgacatgaacggtggtgaaaatggtgaaccaacaggactttttaaaggtttcttcctttaaccctttagacagtgtaccagtcgaagattacgtcactgttaatagaagtaacacattgtcatcaagaatctaagtttggatgcctctgtttcaggtgttctttcaactgcaaacaatggtggctttactagtattcggacaagggtaatgtgcatatcttgaatatttcctctgcacatgccttacattgtcagatatctataactaattgtaatcgcctttttgtaaagaatgcttgatggtcgtttttaggttatgaaaaacaacttcattaagtaaggaatttgtgacgaatattccttttataaattgagaattattttttcatcatcatcaagaaaacctagattatcattttgagtagcatttgagtaatattttgtttccaaatttggattgcatcaaattctttttctattgcttaggctgaatgaccaaccctcatcatttttttattggttctttttccttcatgtctttgcttatgacgaatgggaattactgattgcttcatttgttcttcagacagatcattttcttttcctttagtttcttctattagttttcttcaataaagagattgctctattacatcccctaatctaatgttcttccatgctttgtatatacagaatgtttctgtgccagaagatctttctgcttatgatggattggagttgcgtctcaaaggtgatggacgtcggtataaactgattatccgcaccgacacagtctgggatactgttggttatacagccagctttgacactgcaaaaggggaatggcagtcagtgagtatcactatcagacctttattgggtgtttgaaaaagtgtctttaaactcttttttaatcaaactattaatgactggttatatttcttttacctcaaatattcagattcgtgtgccatttacctctctgaggccaatctttcgagctcgtactgttacagatgccccaccttttgaccctacgaatattgtgtcactgcaggcaagattgcttttcgtttagtttcttctcattttctcccttgcatggtgtttttcacatgcacttcataatcatgtgcagctcctgtttagcaagtttgagtatgatgggaacctcaacccaacttttgttgaaggtccatttcaacttccattatcaagtataagggcttatataaaatatcctctaactcccaggttcaccgaaaatactatcttttagaactcagctgattttgatctctttccaattttcttaatcagctcctctctctgtttatccactcacaggtttgtccatgtgagttcagctggagttacaagacctgagaggcctgggcttgatctcagcaaacaacctcctgctgtccgattgaataaagaattggattttattcttacatccaaattgaaggtttaagactaattctattaatacattcttctagaattggccagatgatccaactctcatatatgacttcatatgttccatttcatttaatattgatcatttcctctacagggagaggacttaattcgggaaagtggaattccttatgcaataataagaccttgcgcgttaacggaggagcctgctggtgcagatctcatttttgatcaaggagataatataacggtacaccacaacaactgatgtatgaggtttagattttaaacatacctatcattgaaacatgcaattcaccaactgttcctgcatataacagaagattatatgatgaatcagacacctgttaactttacttctggttttcaaatttttaaatataatttcttgtgatggcattctttccttttttaaatgcagggtaaggtatcaagcgaagaaattgctcgtatttgcattgctgctttggaaagtccatatgcatgtgacaaaacgtttgaggcaatgccctccctccgtctctatttactttattttcttgtgtgataaaatgatttagttgccttttccctccattcatgatctatctagtatctcattgattgttaacttcgatggctgtttgaactttatgtcagagttctacgggcagtaaactaaatgtgacttctgaaaaatgaaagacagaaaatagaagttctctgcacacaaatgttctccaactttttaaccttaccacttgtaaaagattataggtcatggaggatcctgtatcgaaaaaaagtgctattcctctcaccgttaattgattgttaattgattttgagatgaaatatcacattatctaatatagttgtagtatagaattgaaatgccggtgcatatacttgtttgtccttcataggtagagaaaattcatgatgctacttatcacattgaccacaatcaactagaaaaacattttcacccaatattttaaagttgtcacacgtttaaagattgtttattccaaagccccaaggaaataacaaaaatcgaaaagattaagagccccccctccccccagcccctacacacataaaaaaaaggaataaaagaagatatagtgcaatggaagggaatgcaggtaagaatctttagctttactgattggactgaagctgaatgaccacaaaagaggcagaatactgaacgtgggatttgattacatatatagatgatctattttagttacaatcattaaagttctcacttctcagtgatatcatcttgcaggttaaaagtgtgattccatttggtgaaccattcactgtggaccctgagaatccacctccagaaaaagactacaatatttatttcaaaaccctgaaggatggcattaccgggaaagaactccttgtgcaaacccctgctccagtttgattgcgttccacggaaaaatctcctttcagttcgaaatatgtatttgttaaaacccccaaatttgcatacttataaaagaaggggcaagagaggaattttttgcgtgtcccccttgactgttggtataaataaggaatgttttgggattgttaccctaggtctattttaggtaaaagctgctgaaggcttttagggagaggattccagcgttctcaaaggagctgggcactgtttgcttgttgtctttattttccttttaactcttctttgctggatttctcatgtaatgttgtgaactggataatattgctctttcagtatatgaaacagagtgttttctctgttttattctcttgttattgttgtctgggagtttttctgagtttcaggacaaggtaccttagcagtattatagtgtgaggaattgagatttcatttttggtacaccaaatttggcaggagctttagaacaaaaggctaaatataaaatcttgtctgtgacttgtctttaacatctttgcaggttacttttctttgtgcattcacagaaacaatccacagtgttcatcactcatttttagtggcatataatttatcttatgctagtcaattgcctttaaatgatttgtaaaaaagcacttatattcgagagaaattcaaatgattcataaaaaaacacttacatgggatagaaattcaaaggaaatggggagaaattaattttttttagtttttataattttcttaattttattatttatttattaattttatatattatattatattatcttaatattatattttttcgaatttggtatcttgatgcgactatttttacaacactttcatatttcttttttgtttaacctattttatgtaaaattgatgagattttgagaaattattttggggtaagaattgaaaaatcaaatttaaaaatgttgatggatttttaaggtatttaaccattttaaaaagtacatgatttcattgatgagttatttatacgaatgacttctatttagagatccagatgaaaaatgactcaaatttgaaaagtgaacgaaaagtgatatccaatctatattaacactttacaaatttactaatatgcctaaaaaccacccacatgcttgcaactaagaatgtcactagatgtacgatgcttgatacttaatgctctatgttttatgttatatactagatactagaaatgaaaaaatagaaaaaagatccaaacaaaaaagagtaagaaaactaaaaaaatagagggtaaaaagaagcaaaatagaaaagaagaagtggaaagaaaagctgaaaagatgggttgaatgcatttaagattaaaatggtaatttttttgaactaggagagaaagaaaagaccaattctgattgatttaaaaaaaaatactcactatcgtttgaagttattgaagaaaatttcattaattcacgtattattgaatttgatgtgtaatgaagttgcaaatatattttgataagatgattagatctcaaacattggaaaaaagaaataaaattgattataaatggtaaaaatgttgtattgttttatgatttgaccctcatttgaattgtcagctaaatttaaaaaacaaaaagaaacgtttttgttaattctcccgtcgttaaagcggagggaagggttagtcggtctgattgttggcgcttttttgtggtctctatttgtttctaattctcagttatcaaatatcaacaacagaccttgaactctcttctttcatttttgcttcaatcaataatggaaatctcttcccttgccctccaactttcatctctaccgtcctcctcctcccttcttcttaaggtaatcaatcactcttcaacaactcccatttcatctttaatcttataaacccatctcctgttttcttcaattcaacttcattttgccgttgcagactccttcgtcatcacccactaccactactagaaggagtttcttcctatcatctcaacttcctaacccatttctccaaattctcgccggaaaccactcttttctccacttgagcatcccacaatcctgctccctcagactcccaacaaaacccgtttctgcagaagcttgggattttggtaggtttttgagaaccttgtactttttcaatggccccccatctccatccaaggttggattaacttcttggccttatggcttttattgggtttttttttcactgatcaattgactgaaatttgacttggtttatggtgaagttttttgagtctctgattgctcaactgtcgggtccatcgccgaccaaacctgttgaagaaatggaaacttctggcttcattctagttgctggagcaacgggtggggttgggagaagggtggttgatatcctgaggaaaaaaggcttgccagttcgagctttagtatatcagtcttcccattttcagcttattggttttctatttgttgtgctttcatcaaattcaaaccgcatgctatttgtacaacttttgagaagagacagaataagtattgataatgatgtcttttttctttttctcaacggttagttttattttattttatctttcaggtcagaaatgaagagaaagcgaggaagatgttaggcccagacattggattggttagttcaatcaccacttattgatcaaagttattgtaaatactttttttacttcttggcgatgcttttgctctttgctttatagtaaattcagttttcttgtattgaagtttcttaaatcatcaatcagactcaaaatcttaaactgatgggtgaagttaaattaatattgtatcaacattctaacactcccctaacttttgagtttcaaatttgtggagatccaagaagtataaattaacagtaaatggagcataaatggcatagtaagggttttagacttcgaacaagaagatctcctgcttttatcgtaaatcaccactcaacccaaaagttaaagctgatgggtaaagctaaatttcatattatatcaacactctaacaaaggtattacaaaagtattatggatggtaattggtgagcaaaatgagaagtcgggttctatcagtgagcaaaatgaaagtatgtatcaactaacttgaccgagcctgctttgagagaaacttaaatacgtatcttaggaagttgactcgttaattcttaatcatttgccacttcctcaatttttcctactgatattactaaagaaatgtattattattatttttttttcacttcacttcaaccaagctccgcagatttcatccttaccatcatgtcatataagtatatgtgaatttttagccattaaaccaaagttgtctgaaaaccaaacgaccatataatatgctgactgaagtggagttaggagaagtgggtataaaaaattaagtatactattttgagcacttcacaataggtagatagtattattaagaaatcacattctgtttgtggtttgctcatttttcgaagctctgttctgcatgaacttgtttcaactttcacgtaccgccaaatcattttccttaccttgaaatatcagattgttgggg

SEQ ID NO: 7641 - DNA, 798 bp, Cucumis sativus
  Intron number 3 from transcript Cucsa.167010.1 (locus Cucs a.167010) derived from phytozome v7.0 (chr-ID scaffold0115 4; pos 388019 to 388816 reverse strand)
cggtaggtcatgattaagctagttatttggtaattattctttgggcttcaattttgaagattttttgtaattattgtttaggaacgattctgcactgtagagtctacttcttgtaattggtgtctccttttttaggcttggttttttataggcccatgtattctttcgtttttttctcgatgaaagtggttttttcattaatatacataaaagctagttagttgatatatgcattattgagttagctttttagttaagatcttataaaaatgagaagtatatcatggctaaaacttttactatctctgtggaactttatttaaggcctgggagtaatagttaaatcccatcaaattgtaacttaacttcctaatggttggaggatctataaaagcttttgatatccgtagctagaagttatgtgtacagcttctggacatacttttatgagggggcgggggtaacaggtatcattaggtctatgtactttcagttttgtgctcaattggtcacgtactataaaaagtatttttttaagtccttaaacttggactgtgtttaataggacccaaaaattgacgcaatagacataatttaaagtttgacgtaaattttatgagtgtaactgtctacttgaaattcaatggatccaccatttttcttttattcttcttgcaaagctgaatgaattttaccataaaggaaatctccttaccacttttttttttatttcttataaataattattgatctagtaatgttacgcattttaattgtgctggtgtttttcatttgtag

SEQ ID NO: 7642 - DNA, 4258 bp, Cucumis sativus
  Intron number 1 from transcript Cucsa.349350.1 (locus Cucs a.349350) derived from phytozome v7.0 (chr-ID scaffold0348 7; pos 625108 to 629365)
ccaacgccaaaaaaaggcttcatcgcgtttggcaggtttttttttcttcatcccaatttcagtctcactatcatttttctgtttatgcacgccattaatttgtgttagaagagtctctggaggttcgtttggaaatagcgagtacttgattatcccatcgtcagtgtggaagcaaattaagtagattaggagactctttagcttgttttgatatatgcattggaatgacgttttctgtaagctgtgtagaaaatattggaaaccatgttaatattacgtactaagtgagaccgagggtcctcatttcgttatttcccattgtttaattgggatttttgtggagtacaacacattagtggctgagaaactttaaaacacctgtggaggataccctaacatgcaatgggagaatggtgaatgtgagatggttctgatcttctaaggatttttttacaaagaatataccaacttggagtcaaagaacatctggggttccttcgtctgcaatctgtttgggattgtaacccttccaatgataggttccatagaattaatttacttcttagtaactatgtctttccagatagattgtataagaatattgtcgagaggattctagtattaggatgctggtttgtagaaagaaaggtcaatgaggttatgcaaaagatatatggatttttgtctccaaatgtgagagaggctcttataaacgatgaatatcaggcctcacgattttcaaatcacctgtctttgagaatcgaaaagttttggaaaataaacttcagctggatggcttaaaatccaactaccttttgaaaaaggaattaatcttctttacctatcttcgaagaatattgattctccatgaccttctaacttccagatggagtttttttagttaaggattcttgtaactattgtttttttttattcatgctatgcggaccattttgtcacctccttggctagagcgagttggagaaagagttatctttcactggagtcttccttttatgtgcatgtttatgttttggcgacacatcttatcttaaaaaaaggttttttttaatatgaaacattagctttccaattcatattgacgattgctttcactcaagttgtagaacatttcaagttagatgaaccttgaataaatcttcatggacaaaatcaaaattgggtatacacatagaaagcaaatcaaccaaggtcaaggaatatgtaaaataacttttatgttaagagggatttaggggcgtggaccattgaacaaatgttcttcaaaaatctaaatcgtacttctgaagctgcatagagtgacaatgagccatgaactagtgctacttaaccattcaaactctgcattcataaaaggaaccaatgactcagatactcatggttataagaaaagagagaaaaaaaagaaaagtaaaagaaagagaccacttgaaaataaggcttgagggtacaaggagatcaaagaggatgaagccattaaatttgttttttgactttgatctaacttgggaaagcaacatttaaggttatgcaacacacctatgttggctaaatagctttgacacatttccattgtgcttgattttctatggcataggattattgttagtaagtattaatgtttaaggtgtagccgggtgcttgcttgaggcgaggcgaggtcttgacggcttgcaagtacccaaggcaagcacctttagtaaggcacttgccttttgtgcctttcagttgccttgaatatagttcagagtgaccaggcactcaccttgttcaattactcaactttttttagaaaagaaaacattcttatccaataggattaaaaggaagtatcaaagtttttaaaggtagaattaaagaaaaattgaagaaaggaaggagaattgtagaagaaaaagagtcacagtagaaacaatatcatttttatttctgtatcttcttttaaacattcttttcctcaagattatttgagtttatttctttctaaccttatatattatttatttattattgttattattttgttaattgcaccttgcttcaatcaagagactccttttgggccttagggtgcgccttgcgctttgaaaacactgttaagtatgacctccatctctttgaagggttgttcagaggggctatataggtagaaattggaatctttagaaagatatttctttcgagttcttttcctcctcgcttcttcttcgttgtgttgtgggtgaaggtaagcagttgtatttttaagaaccagtgggtgggggatagacccctttgctttgcgtttcctcacttataccatttcttcctttaaaaatcgtttggtttatgatttctttgtttggctagggatcttaatatctttctcccttgcttaacgttgtttgttgtctgatagggaaatgacggaggtagccactccactagtttgtctttgcttggtgagttcaatttagactttgggagaacttggagtacagatgttcgtgtttggaatcctgattctattgagggtttttcttgttccttctgactgttgttggaaccctttttctgctagtgagtcagtctttgatgtgctctagaggattatattccttaaaaagttgagttctttacccgaaaagtcttacttggttgtgtgaacactttgataggcttctaagaaagatgcctacttcaatgggcccttccttgttgtattctttcttagaaggtagaaaaagacttggatcactttctttagagttgtcagtttgtgagatttgtgtgaaattacttattttagtggtttgatcttgagttaacttgttagagagatgttacctgataattgcggagttcttcctccatccatctttcttcaagaaaagcctcttcttattgtctgctgcctgctggggtttggaacaacaattctcagaggtgtggggagggaccttcgtgatgcttggttcttgatgaggttctatgtttctcaaggctgcgttttcaaagaatttattttttcttttggtaattatgcccttgtattctttcatctttttcctcaataaaagccgtttctatttaaatgtgaaaaatttctttggaacaactagattattagggcttccttttggaccatttggggtgagcaaaatacatgtgtttccaagacaaagaaagatgatcttaatttatttacttatttttatttgtcttgatgactatgacttgctgtaataagtacccttagttccaaaattatgctctcctttctcccctaccattagaaatgttaaagtaattcttaggagtgggagaatttaccttctgtacatactttcaccctgtctacgaaattatagtcgtttctctcaaaagaaaaaagagctagaaactcatttcttcttttggaagtaccgaggctcttgttgttagttgcaagatgttttcttccataacgcttctctcatgttggcaacaacaagaaaattagattttgggagtgcctgtccttataaattttctgacctcccgagacattatcctttctctaataacaacaattggattattagcatggttagagatggaccatcaatcttagaagaaatctggatgttgcagatgcagagtggatctctctcaccaacatcgttagagacatatcttaatgacatgttttcttcaatggtccctatgcttcaaattcctgtgttcatcacttcaaagtgggccactcttctaaaggatccccaaacaacctttctcttatctgtggaggtttttccctttaaaacggaatgacagaattctctgagcaagaaaaatctttaaatctttaactattttttttttgaaaaaaaattatctttgtagttgcaacttggggtagcttccctagaatgatctctctccagtctcccctctctgtgcgtgtaaattgcatttaatcattggaactgtctcttataaaagaaaaggaaagaaaagaaattaaagaattgctgtcctgcttttgatgcatggatttcaaagttttcaagttgttttcgtaacccttttttttaaagtggaatgtttattcagtgaaattaaattttcgagggccagcatagatatttactgtttagctgtttgagttgcatgatttacatattgcttttttaatatcatgttacattactagtgcaagaaccacttttaaactattgatgtgtgttctaaattcatattattacttctttccaga

SEQ ID NO: 7643 - DNA, 9955 bp, Cucumis sativus
  Intron number 3 from transcript Cucsa.184760.1 (locus Cucs a.184760) derived from phytozome v7.0 (chr-ID scaffold0127 4; pos 443878 to 453832 reverse strand)
gtcttcaggtaatttatgatctactgcacgtcattcaattaactatttgtaaaattgcaatagaaagttatgcatttaaacctcttgttatagtcctgattactataccaatataacatgacgatgttattcttcctcctttttctaacttcctagcgtcctggtgttggatttggatgacatactattatttcaatttcatttgactgcccaccgaattttctaatgtgaaagaatgcaaacagttcaatggtgatttctataatttttttttctataaatatcgtatttgttctcctttgttgtagtttcttttttaggtggttttgatcgtcaaagatttagctttttcttagaaggaaacaagacttttcgttgatgaaatgcaaatagattattgttcaaaatcaatgaaaccaagtaagaaaataaataaataaataaataaaagccatgacttggacttatccaaaaagtaaagcaaaagtaatcaaataggacccagcagaacaagatgactcttaaatgaaggccacttagtcagagactatgagaacaaagaaccatgagatgagggcaatcactaggaggcaagtcgttagaaagagccaattccaaattcctcagtgccgataagaaatctaacaacccatgaaaaccatatttgaaggccaactcgactagtctactgaaatataggaggtcataagactcataactccccctaggtagacttggttaactactcttttggtctttcttcgcctcgtttcaatagattgtaaaacccctctcctttcctgaacccctttcgactattcccctcatcaacttcaatttcttcctttatttttttaccttccaaaacttcgttatccttctaatcacaaccatttcctttgatccttctgattatattctataatgaaagtcaaaagctgcaataaagtctcctcttggtccgataaatacgagtttgcacgtttgaatgcctcttcgtggtgctcccaaagtaaacaatttaaagacttctctatgcatgatatcttgctaaactatagtttcattgattcaatccatgtcttggaaattcctcagttcaataaatggatctcttggggtaagttctctcaaaccttcaggtaagttctctctccccttctctcttccctctctcctactttctttctccttctcctttctttatttctactcctcctcctccttcccttcaactttattgccggccgattaccctatccggtagacactactagtctcatcttgttctttgacattaccctagctaccattcttaccttctcaaaaatggaagtaaaaagctgcaaaatcgacaacctatttttctgtatctggcatgaagataaaacttttcacattgaagatgttgaagctaatatttctatgactttatcaatcctaatccttcaacttagatggatttgaataagaaatctgaagaagattatttctataagaaataaaaagttgagtgtggaagggttgaagcttctaaattcagatccaaaagtgggttggttctgagatgcactgcatgactgcgtacggaagggagatcatttattcatatcctcattggtgaagataaacaagggtggaaaagtttcgaaaaaatgttagggagacttcaaggacatccatgactacaaattctggttcttcacccaatccatgttcaacacctttatgaaacaaccgaacagaagtacgaaaggaagctatgtggagatagcaaaatcaaatcaaatgagacacccaagatctctttcttctataccataaaacaaagtacaagcaaatattgggtgattaagaatccggtagtcttcaaagcagattttgataatctttgggttgtttcaaaactttttgaatttgatagttgggtaaaaattaacgaggcattagaactctttttcgactcaaaagttatcatcaatccattatttgcagacaatgctctgattgaattggatatgatggaaatggtagacatgcgcagtggaataaagatcggattttactctaattgcaactaaacaaaatttagtgatcaacatgcacaataaccctaatataaacaaagatagggttaaaagaaaaagtcacatttgattgttttctattgtcgtaatctcgtcacgttctcgaagttgggactactactagcgtttactcattattctctagacttagaaccaagttgagggactcaaacggtggagaaaacagagagagatggatttaggaggatgaacttgtggagagaaaaagagttttggtttcaatttcgcaattccaaatcacaaaataaaaaattaccaaaaatcctcttttacattgcaatgcactccttttataagcaaactacatgcaaaaattgcctatagtgagcttccattctcctcacttggcatatcaccaagtagatgtctcacatgcatgacgccatttgttaattacatgcaatatgcttccaagggtaatatggtaatttgatatttaaaaagttaaaagtcaacattttgacttttttccactttatccgtttggactacattcaatctctcgaatatgaatctgcattcatttttccaaaattcaaatcatatttgaatataatgtcggttaaagtttcatttttcaaagtaaaaaatcaacattttgactttttacaactttgatcttttccatccattccgagtcctaatatgaatccatgttcatatttttactatttaaatcacatttaaacatgaaactctatcttaaacttataactgatgactatatcaaatatatttgtcggtttttctctttttacctaattcaaacaattcgaattattccatcagaatgttctaagttgattccttgtgagctagtgagggaacataatggacctacagatcatggactccaacgatctgagattaactggctaaactctttagtccgagttaatcaactttcaagacttagattcagtccttaagggaacaacctatctactaactctagagcgggtaagagtgaatttcatcttgaactcctatgtccttagctatccacccgatttacccctgaaatgggagacttattgggccggtgccattgagctgccttcacctatgcatatctaaggataattccgagtgaacagaagttcatagttagttcaggattaagattaagttacattagatatctataaacgaaatagtcagtcttacaaagttaacggtgttataacttaaatgtgactatttcatggttccagtcttatgtaaactctttacataggatgctgtctttacataaacgatttaggatcacatcgtttgtattaactacaaagcgggctgcatccatagtgtcccttgaatagggtgcccaaccgtattcgtatactatagactatttaggctatatactcgaacttgatcaacatttatgtctctacataaagatcaagtttacacaataatggccttgagaccttagtttattggctttaagattatagtatcaataacgactttattgaatagaatatgattacaaaccacgagttttaggacataatttccaataggatcgtggtcctttgaaggagttcgttgaaaatacaggcaaatggtaatcttttggtatctttcatttaaagtttgaaaagtggaacaatctcatccatggaagacggttatatttgaaaggctatggagggtggattacaataaaaaaatctaccactaaaaaaatctaccaattgattgttggtgtaataaaacttttgaagtgattggagctcattttggatgtttagaaaatattgcagctgaaactatcaacttcattaatgtcttagaagccaaggttcaagtgaaggagaatctgtgtggtttcattccggcaaccatttagatttctgatgaaagaagaggaaacatttttttgaattttggggatatctctgtatccaatccacccaccaaagtacaagttgatttatttactcacaatttctctaatcctttagatattgtcagattaagccaagttatgaaggatgaaggctttgaggaaggttcatttagctccaagtttgactatctccttccttcgaacaccatcccaagtacgcaaaggaacccttatgagttgtctgaaagcctgttcaaacatcttcatcagaggccaataccatctctttggaactgcaatgcatcgtcggattctgggaattcttccctttaacatctggctaagtctgagaattgcaagagccgttcaaaatcagaaccatcaatcaggcgaaactcagttttcccgtcaaaggagacttcttttaatttgattccatttgaaaaatcacttgtaggagactagtagtaacttatctgcagtaataaagataataataatgttatttctatgaataagagtgccaacaagactttaatctccatgaaggccaatgataaaaataataaagttcagaccggagctacatttactcagccagaaaatgaaaagttgttattaaagaagaaagagaatggtgtagaagatagctgtgttatcaatttagtgggtcctaggctccttccaacgtcttctaattttgaaaatatggcatgtgaaaagtcaaaaatgaagagcaaaggtcacccaactctaaaagtaaaattaaaaaagaaaagtagctgtatttttcctattgataacaacaacgccagcaagtcagtcgacaaagaagtaagttcttctcctcccttgtcagctcagtttaacaaagctacaaagatttcttcccctccaaagtccttcttgaagcattttataaggaaaaagacttacttcaacaatgtttggactgctctttttaatttcgagacttttggagcttgttcattcaaggctcaagagaagcattaccagggtcatcattctttcaagtctttattcactaaagaaaattcggatcttttggaagtttccagctctttagtccaagctactagttgcaataccaggcgaggtacatttaactctctagaaaagtgtgagcaaaatacaagtaaggtgcaatatgggattgctaatccagaggaaggtggcagtcttgaaaatcaagactcagatgttgaatcagtcccaagtgtcatagtgaggaattagatgagattaaagcaggggaagagattgaagattatgagattttggagaacataatcagcgatgtccgcgaattgtttgtggaggaaggtgtagaagaagaacaaccttctctccagaaattcagagaagaaatcctaaatttaaactttatcttctttgagttctttaaactttatctttagcattgaaagtagtcttggatttgatagtgcttcgaaattacttttggaataaaagggagctaggagtttcattaattaattctttttttttttgaaaaattggtagttaggaagcaaatcaagctgacatccctggttatggttttgctacaagtaccaaaaaagttcagttttgattcagattcttcacatccttgtagagttctcttgtaattttgataattatgaaccatctgtataaagatttctggataactaatgattatggtctgtattatcatagagtgattgtgtatttggctggaacttatttctttagcagagtttattttggagacttgatcttttggaggtaattttgtgtggcaagccgatttcccgcagacgttatgccatgtgaaagaagaagttgattagatgtatagcagaaagtagtctgctgggtttttcagtttcaagaaaacttgaaggttgaagaagtgagtgggcttcagattcttaaggggctttaatcaccctggaaagaaagggttatgatcaaccgaagttagtggtcgtcggctcctgttgaaaatcgtttgagttcattcattcctctttattaaagctggaaaattttatgggattacagaagtctacgtcgaatcgttaatctaatttggaaaatggattttgatcacggtttggctccttcaatatacacttttgctctgccgctggtgtctcttgaaagaacctggttttgattgcttatccccaaattgtttgcatctttgtcagaattgtgtttgggaagatcctaaagttttttttctttttttttttatcgagcaagcttctcagcataagacctcgatagagtcatcaccttttagcctcctcgtggtgttccttctccaaggatctcgagtttgtctcagtgtgagttgatggatgtctgaatagtcttttagtctttttatttgtatttttatttctttgtacttcttttgtttttgttttgcctttggacactactcctttgttttggtttttagcttgtatatgacgagggtgctatgggggtgtcaacctagttgagatgttcaggtgcacctcctgatccatggttacatatgctcaatgtataattcttttgtactatgagcttttgtctcattattattatattaataaagaggttgtctcatgttaaaaaaagatatctcgctaaactcctttatctttcctccttgatgcttccgattttgcgcacagcctttggtggttctaatagtttcagatctttctttgtctggctatatttttaatttctagtctttttagaagttgcttcttatgttctttttgagttgtattggttgttgttagccccttagccctgcaattggacgttattagttgatttgtctttttattatgtatggatatgatgagggtgctaagggtgttaagggggtgtcaatagttaacctagttgagatgtctgagtgcatgtcctaatccttggtttgattgctcattgtataatcctctcgtagtatgagcttttggggtaacattcttacaagtgctggcaagattttgtagaccagtagactgctttgagttcctctgggcattggattgcattagcaagacatttttggccagcctttatagcctctccactttgaagtcctcgaacattgtcttccgaattagccctctgcttcaaccaatattctgcttaatcgaggattattcttcaattgttctcggcttgctgctttgttttatgttttgtatggacagatttttattattattattatgtttggccttgtacttttagctttttgttgatcttgtattgaaaataagagcctagtataagggtttttattttcgcttcttggatttgacgagggtgctatggaggtatcaacctagttgagatgttcgggtgtgcctgctgatcctccctcccccattgctctttgtgtaactctgagtacattgagcttttgtctctctatttttcaatattaataatagtgagactcgtttcatgttaaaagaaaaagaaataaatgaggatgtttcctttttttaaaaaaaagaaaaaaatggaagataaaagctgcaaagttaaaaacctttttatatatttatttatttttctttcatgtttggaaggagggaaatggattttttttgtagaagacatgaacaaggatgttaaagctttcctatcaccagcaatgatagggtggtttgtagcagaaatggatcgtttgttgttcttatctgatgtagggctacttcgggaattcagagtggctgtgttttatttgtttcttttaatcattttccaatgtaatattttagtttaggtgtgacaaaacccttcttcgttgggtcggaggttaggtttagttagctagttaggggtgaaaccaccctttcccgtttgggtctatttatagggagctttgttagcatttctttcattattcaatatcaataaaattcctgctcgaagattgctccaacaaacttttaattctcttagaaaaattgcatcaattggtagcacagcactctcggtatagagcctgatggtgatcaagaacctgaacaccctactgtagatggaaaagcatcctcaatactctcctcaatctttcaactggcgcttaaatcatgtggaacaacccttgaagagtaaaatacacaggcttttggatgtgcagtccaaaatggttgggatcttggcttcagtggctgaaattcagcgagctatagaactcctcactcaagataagggtaagtccactgctgctcctgtccaagcaccaaattccaatcccctgcctctgaatccatttgggcaaattttcttttgggtttggaaggacaatgagactttggatttaaatctttaataatttgtttttagtaaaggcacattattagtgggtgaaaattaaagtttctcttgaagactattttaagacaatgatttcttggacaggatatgtttaattggcatacggctggaaaggatggtaagagcttgagaagtccaggggttagtattttccacccttggttgaaagtgggagctttggctaaattcaaacttgggaatggtagttggatctcattttggttagacacatgggagggacacttcttttaacaactggttttcaaaactcttcagaattgcatcacttccaaaaggacctattgctgaacattgggacctaaagttgaactctcggtctattaattttcattgactactaaagaaagaagagattgctgaatttcaggagatgattggtttaatttcagccagaagggtatttgagatatttgataaaagaatttggtctctagagagaaacggattattcttggttaaatctgtaactactcatatttctccctcttctcctttagataatgtgctgtacacggctctatgggagattaaattaaaagcccaagaagggtgagtattctggttttggtgttggttggtcaatttaatgtgtctacagttttgtagagaaaatttccaaatagctgtctttctccctctatctgtctgtttcatttccagcatgaagaaaaaccatctcatctctttttttctttgctcatatgcggccaactgttgggaaaaattgttctccatctttaacatgtcttgggatggtataatcctcttgtactatgagcttttgttgcattattaatctattaaggatggtataatcctcttgtactatgagcttttgtcgcattattaatctattaataaaagagacggctcctttccaagaaaaagaaaaaaaaaaccaaaattatggcaggaatgatctcttggccctttgtcttgacacatggattattggagacgactttaatgtcactcgttggagctatgagaaatctactggggattcttctacctgcatcatggttctttagctcctttatgagagactgcaatctcatcgattctcctttggtagaatggcctttttactttgtccagcttcagggtcaacccctcgctaaccttgatttgcagattcctcagtatggagagtatagcagagaaattcaaccatgcatcggtcaaaagattagtaggagagataaagagaggacaggaaatttagggtcattcaattttcttagggtatttagttagatgtcatggctgtccacattcagttgggcctgttgcaaggattatctaaggttggaagagctacaggtgaaaatattatccaggacgttttatatatcttgatctctctctattttggtttatttatttttttttatcagtaaattgctgtgatttttgttgttgtatatctttcattttcccaaatttcttttgtattattatattatcatactcattggcactccataatgtacggttacgttcttcttgattcgaatgatgatcataacttagaacctttatttgttatgatttttttcttttttttgcttttcataatgttaggaatttgagagag

SEQ ID NO: 7644 - DNA, 2674 bp, Cucumis sativus
  Intron number 6 from transcript Cucsa.200110.1 (locus Cucs a.200110) derived from phytozome v7.0 (chr-ID scaffold0136 5; pos 537567 to 540240)
taaactctaactccaagaagaaacaagcacttctggtacacttattatgctacaagaaaattctctttatcatgaaatccagcctttgttttttcttcgtttatggatgagaatgcagagatgttaatcgcttttattttcagcaattagatttgttgtcctactgtaggtgagagagctttgagggtaaacactaaatgatattttagtcactagagtcacatataaatagatagatgagaccccaatacttatttaacgtaaaattacaagaaggagaatgcccctaatgggttcctataactgagattcttagataattaaagttgtgaaatctacatgctataacatttctcttcaagctggagttggagcatatatgttaatcgttccttatttgttacaacaacctattaaatttatatggatattcttttaattactacttaatcaaaagttctgtatccctttaaaaaataaagttaatttccaattttcatggatcctagaaataccaaaatatggtgcatcttctcaatttcaaaatgacagtaatttaatatagtattagctccatatgaaggggtaacttgatcacaacaccaaggctgaagcttggttaaaatccattttttttttgaaaaaggaaacaatcctcttcattaagaaaatgaatagataagtagtgttgagtacaatgaagagacaggatctaagcctttgggatcattaagtgtatctagacatcttaactaggttgacactctcttagcactctcatcacatctggacttagatcgaaaagtaaaaaccaaacaaaagcgaatacaactcgagcaatacatgatgtagtaggaattggtttacagcaatcaatacatctagaagcaaataacaaaacaaaacatctttaccttggagtctgaaaatacaacaaaaacacctgaaacagaataagaattacaaactaaaaatatctaatcatataagaatgcctgccaattaaggctaatgtcttggatggaatatgcttcaaacgctttagctaaggaggaccatgagggggcattgattctagcaatctccaaacgagtcatatgaaagctttgttttggaatattctttgatttcgctcaaaccaaatttctgaaagtagggcctttattgcatttatcctagcaatcttggtttctcatttagattggggccgattaggagctacaaaacattcttcttaaagtcagaataaaagatctgattgatgttgaaggttcagaattgatcaagccaatatttctctgcaaagggacacttaaaaaacaggtgctgtaaatcttcagagtgctgcaaacacatagagcaggcatttggagataaaatgtgagagtgaagttttgactgcatgaccgaagtgcaatacaagagccgattcagcattatccaaattgtgatatcaactcttcttggacttttggtctttcaaatagctgaatataaatgcttccggtctttaaatctaaggataaatgtttaaccaacgatttaaccgtgacttttccgttagaatctaaattccaatctcttttatccgggcttgccatgattcgcttttgtgaaatggttctgttgagagcttggaaatcatcaatttcttcctcttgagatttaaagaccaagatgctgtaaacgaatcccagaaatcatgaactaccccattcgaatatgatgagagtttaaatagccttgggaaagagtcttttgagtggaatcaaactagcccaagaataatgccaaaaagctattcttgtgccactgtcaagtttaaacatggccagcgaatgcacttgtttccagctccttaaaatgctaatccacggcccactaaggctgcaagaaacgcttcctttggtgtgccaactgaattggctttctccatgtatgctctttactgcactggaagggagttttcttaattgaaaaactttcatcccatttgggtaggagagcgagatttttgttttctagccaaattactacgcacacacaaaaactgtcattgggtagttggaagacaggataagcagaatatgtggtcaaagggtactaggaagaacggtggtaagcttttcttgtttaaaaaggagcagtggaaagatcagcactatctggaatctaatgcttttcttaatttttttatgagaaacattcagtcataatttaccaccgttgagcctgatggtttccaaatgcttcaaaaactgaatggatttgtgattgtttgaattccagctgacttcaaacaaaatttctcattaaaggcacaattcaaattttggaggaaccttctaatgatcttctgcttccattccattaaggaagcttctaccccgtcccctaagttgtcaacccttaatacatttcactgttactaaaaaaagtaagtgcaaactttacatccatagaatgtaaaacaagtttctcaaaaaatgaaaaaaaagcaatgtaaaacaagaaataacaactaattaaaatgaaggatgagaaaatacccaccggtctgctaattgctaaatactaaacattatatacttccagctttatttatttatttaattttcctttcgtttcttctcaagtaataaacttttcattgacaaagtaatgcaaataggat

SEQ ID NO: 7645 - DNA, 1360 bp, Cucumis sativus
  Intron number 1 from transcript Cucsa.253590.2 (locus Cucs a.253590) derived from phytozome v7.0 (chr-ID scaffold0222 9; pos 2132897 to 2134256 reverse strand)
ctgctagattgacgtttcctatttctgttaaacaggtttcattcttatttcttaattgttttgcgttgattttcgattttatgttctaatttcttaatgtaattcccgtttatgtgttgtaatcgtgttatcttcttcaatttactatctgcttgtttattgttcctgaaaatcagcgggagtattttttggttaggctgttgattgttcattattagatttttccttttttagattcacataaactattatcctgtttatcttttcctgtagggcatatttctggagtgtagtccaggttaaacatattctaagaattataaacgagtcttctagttcaagatttgggatgaggatgaacaataatataattaatagttcctttcttgtatcggtatttaaactctattaggtttaggtttagctggaattgattaggactggaaagttttctttaatgatataaagagaactagcgtgcaccctttttgggtttttttcaaaaataaaaagtattgaaaaactatttaccttcgtacaacaatgtatgaaaccataaaagaatcaatttttctttgatctattttttgacaatttcctttttttcaataaataattataattataatttttcattcactttttgtcataaaagaaatcacatcgaatttgtatattatagtcataagcaacataatttttagttcattagcaattgatatagtctttttcactagatgttggcgggtcaattcctataattgctgtattaaaaagaaaaataactgcttatggggataaggtgagttaggaaaattcaaactcttgtttgtgctgagtctgattaagtgctgccatatgcgacatctcatacacttccagttccacaaatttgttatttttacgtttggaaatttccaacaaaaggtattgctaactttaagggaccacgtttagctgcaatactttaggtccactctaattattggcttctactttttaagagtgctgttcactacttttttttttctagtattcatctcaaaatacagggacaactggttgagtgtctcataagtttatacattattgcagctccaatttctggtgaagaaattaattacttggggtacttgattttcctttctggaatttatgatgcataatagcatatatacatacctgcccacaaatttacgtatttaattggctccaaaactactgagaattatttaattagtattgagattatatttagattaattaagtttgtgcgtcaccacattccttcttatctatatgttttttctttttggttttggcagcctggtccaagggatttgcttcttcattgcttcat

SEQ ID NO: 7646 - DNA, 1145 bp, Cucumis sativus
  Intron number 3 from transcript Cucsa.394210.1 (locus Cucs a.394210) derived from phytozome v7.0 (chr-ID scaffold0410 0; pos 249897 to 251041)
gtgccccgtcgaaggtatccttgccgaaacgtggggtgagtaattgaaattgctcctcttgcactctggcagcacctgatgaatagtaaaatgctttgattaatacctttacattatttaattaccgttcgtgttattgttttattgatttcttagcctgcgttatgttcaatgcagtagctcatgtatagcagtagacaactttgttgttttcctgaatatacttaacttctcttaccgttagctaccgatggaataccttaaattgttatgtggtggttcgaatgactaagtacgaaggtgtcactgtcgattattctgtattctagccctagaggcaccacgtaaatttgtatgtgtgtctatactctgtagtttatgttttctatatttgttatttgtctatttcattatagttaccttcttacctgtaaggcaattggtgcgtacattgttcgacaaacgattccttatattttctccttagtcaaataagctaagacagtgagtctgaccatcgtcctctcaaaaagctgcattctgcaaacctaacttcatcaaagttttatctccattatgtatctatcttcatattgaaaaatcttttaaatactctgcactagggtttgttatatggattaatacatttccggtgtattatgcagatggaattgtttacgtgagaacgaccagtaagttccattttctctaaattacttcagtttgaattaatagactggggaagaatgaaattaacatctgcatcgtctccaagggagagtcaataacttatagccgtatgctgtatccaagaattagagattgttcataatcattcaacacttcctgtactcttttaaagtaatagaatttctatttcacttcccatatgccagcagaataggtgtaggataagtttggtgggaacggaagattcagaaaacaagatggaattcttttgatggggaaaaaattgatttatcgacaatttgccagcccttctagcacatttttatacattttcagttgctttgccccataaagttgtattctgttcttttaaatgttgagagcattgtatatatactgacggccatttagagattgcagatatttctgatcctgagataagttgctatcagttg

SEQ ID NO: 7647 - DNA, 879 bp, Cucumis sativus
  Intron number 7 from transcript Cucsa.198950.2 (locus Cucs a.198950) derived from phytozome v7.0 (chr-ID scaffold0135 7; pos 1826486 to 1827364 reverse strand)
gcatcaggtcgtgctacatcactcgttgttgacaggtatcagctgatcctatactacatatacttattgtatgaccattgcatattgtctctttgaaacttggtgggccaaggctttaataatatcattttcttgctcaataatgaattcattgatctgatttcatcagaatctattgttatatcttaatattaccgaatagatagtgtttttgcatatcgtgtctaatcagtttctaattattttattcttagtagttcttgtcttttcttgactcagttatatgccgattattttgatagttcgcccctcaaatctggaaaagaattagttcattgtatggttaagtcatatgtcaaaatcaaatggattctggaaattttcatagtttttaaaacagatagttaaaaagatacaactgtcatgagttggcccaatggtaaaaatggaggcaaagtcttgataactaactaagaggtcgtaggttcaatccctagtggccacctacctaggaattattttcctacgagtttctttgacacccaaatgttgtagggttaggcgggttgtcccgttagattagtcgaggtactcggaagttgactcagacactcacagataggacaaaaaaagttaaaagacacttcgggttttttttattcattcagtttttcaaggtttggagactaatggcatatttataaattcttggtagaagttaagttgaattgtaattttacatccaaacatccatttcattgagattgagttattctatacgataactttagtgcgggaatgttttctggctgtaagcaattgggttttaaatgattgatacatgcagtggtggtggatcaacaactgtcgctccggtac

SEQ ID NO: 7648 - DNA, 2817 bp, Cucumis sativus
  Intron number 12 from transcript Cucsa.197930.2 (locus Cuc sa.197930) derived from phytozome v7.0 (chr-ID scaffold013 57; pos 1125345 to 1128161 reverse strand)
tctggggaacacactaaatcaaggaacagcgaggggtaaggtcttaattacttgagtgaattggactatgctgtttgtttatggaaaattcacctttatctacttttaactattttgatggaaatatgaaagtaacttgcatatagatatagagatttaatgagtaattctttctgtggcatgagttttacagtctcgtgggactgactaaatataccaaagttatgttatagccaacgcatatatgtcgagggacatgttgaattcctgacattttgtaaaataaattttgttgatatacttcatgaaattttggtaccaaaaaaacaaaacttttatcatgctttgactcatttatattagttagcccccaagaagctcagtgaagattctggtgggggaaaatctaaatttatagggaaatatgttatccacccttttcacctcaccgatgtaggtcaaactttttgcaaacactccttcatttccattccttcctctctccgctctctcctccatgcctcacagtgcacatcgcactcttttttcttcttcatttttcatttaattagttattttattttatttatgtactaattgttgtgcctttttttcttttcaaaacaatatttcattttcttaattttttaattacattccatggtattcattagcctttttaatgtctgttctcacttctttcacacttgaatcgcaaatttcagttttcttattattctcggagctctagtttctgattcacttacttatctatacattaattttaaatgttattttgttatacacatgcaatatttcatctcttctaatcttgtaactaattaccaatatttgatatattctatatttgatgatccattgtagtttttttttggaaagtttcctttttagtccctgaggttttagggaacaagcgcgattggtccctaaagtttcaattggaccaattttgttcctcaattatgaagaatagatttaaaatatccctattgttattttctaccttaattatttatcatttattattgggacattttcaaaaatagcaaaatattgaaactatgtacaaaatatagcaaaatttatcaaatttgtcttaggacacttaagttttttttttgctatattttgtaaatagtttcatcttttttctattcataacaattcccttttattatcactattattttaaatactgaaaatggcatttttgaagtaaaaaaaatagtttctcactcctctctctcctctcctccctccaccagcctctccccttcatcttgccctcccattcttccatccccccaaatacagtccattttggttggagagtttccacattttgttggccatgaacctggagcctgatgctacttgtattaatgtcgtgacacttgagggttctggggggcaaagcaaatatgtagcggtcagagatgagagggagagttgatgggtttgtgagaaatagagatgttgcggtaaatttccatcttgaaaacaaaggagtcactgtctcgaagatgatttagaactaaacaacagaggtatttggcttatggattaaaattaaactacgaccaatttaaatttggtgtatgatttttcttaatctcacagtatgaaaactttcacaaaataagaaaacccatcaacagttatacttctcagtgttttagtaaagagaagggggaaaacaacccattaacaaatgatgatggagctgcaaatttaaagggaagaatggtgtaacaagacatttagtggaaataaagaggacccttaggatgggttgaggaaacatatcaacacaagaaagaaggcagagaaatggaagaacaggatagaaaaattattattattattattattttgaaaaagaaacatttcattgaatggatgaaggttggtagaggaaaaagaagaggaaaggtcggtggagagaggtgtgagaaacaattttttttaattttcagatttaaaaatgccatttttagtatttaaaacaacaacaatatataagcaaagtagacaataacaataaggaccttttccatttgtgagggacattcctagactaaaaaagtattttttcctccatgatttttaaatgcaaataaattatagtttaacttgaatcaaagccatttcataaatattcataatttgtctttgttctaaatttcaaccgatatcgaaatttcacattttaatacacacacacatgcatggttagaaatggtcacttattgtctagttaagttccatttatggtagcacaattttcaaaattttcataggttttttctgaattttccgttgatatcgatattttcaataaaactgaatcttgatatctctattaagtactaacatattcattctgaacgatggttataacttacaataccgtatcctgtcatgctatggtttgtttatttattactaatgagtggcctatttgcttatccataatataggatggcttatcttctgttctaaggaacatgaaaacattcaaattattgaaaaagaaacactatttttaactccatcttgctgctgcttgatgctatatgcaaatgacattaatgactaatacgttagtagctcatcccagtttggtcgatccaatcatcatttatctccccaaaacttcttggcaaatgttaaagggttttatatactgaatgtcttgactttgtccattcattttcttgatttgtttaatgaaatatccctatgaaatatgaacttacaggttctgcagtcggtttcaagttggatagtctttta

SEQ ID NO: 7649 - DNA, 1290 bp, Cucumis sativus
  Intron number 2 from transcript Cucsa.160030.2 (locus Cucs a.160030) derived from phytozome v7.0 (chr-ID scaffold0114 4; pos 340554 to 341843 reverse strand)
tttttcgtcagaaccgtctgccagcattgtttgaggtgaatttccggcacttttctgtgggtattttcagtgtgattttgattttcgtggcttggtttggcttaaaataaactacctttctagtaggttaggggtttggcgggactatatctgccgtctaattcgttaaaatcttcttgtagttgctggaatttgggtttatcaaactataattgccattttttttgcttaggtctagttatcttctatgggatcaggagtattggatcaagagattctttggatcaggagtattggatcaattgccaatttaaatggtttagggttggtattgatttaaggctattaagttaataattgggtttgaaggcgtcgggttgatatgccaattttagataaagaggagagttgagaaagagaaactatttgctagttgttttttttttaaggtctcggcgttagatgaatttaattgtgaacttcttgaggccatttgttctttctttgatgtatggttgcatctttaagttcgaactagcattgaacattgggtaacatgtttagacttagcatatgggtcatcaaacttgctaagtaattgagtcttcttggaagactgctaaattctttggactattctttgaatttagcattagttatttaatccttgttttggttggacttttgaagaaatctttaaaatactcttttaaattgggttatggtttaagctatcgtcttggttctttatattttaggtcgtgatctgggatattatgttttcaattacaggttgattgaacttctatcttgtagaagtccttaataggaacctagaattgttgtttcttaggtgttaagtagatgggtatttttgcagcataccccaagccgaaaatttgggaatgttaaattaaaaatatggtctattttctcttttgtcactcttgcactgttctagatcgtaattttgttcaacattctaatagatttttaacagttgtgaaagatttatgaaatctctaagtatatatggagttcttgaaattatagacccatcttttaagctaaaggcgaagttcaagagttagttattcttttgtaaccaaatccaatcatgcagatacaaacacacaattaaatgtataaataacaagcaagtctagtacctttaacttttcttataaagccctaggttgctctcaaaagcaggattttggtatttggtattgactctcttgtcgtgacactgaatacctattaccaagcaggtaacttgaagaggagaag

SEQ ID NO: 7650 - DNA, 2498 bp, Cucumis sativus
  Intron number 2 from transcript Cucsa.079510.1 (locus Cucs a.079510) derived from phytozome v7.0 (chr-ID scaffold0079 3; pos 2367156 to 2369653)
aactaatcaaactgaaaccaaatttcaagcttcgggtaaccatttgttttcttttcctccctttaatctcttcattctttgactgtgaccaatgatatattacttattgcctttttgagttatgattttcaattttgattatgttcaattgcttgaattctggatttcacattaaaaacttatgtaattaacagtatatatgttacattttgcactgaattctatatggtatccatttaggggagaacaacatagtgtttagagaagaacaatagcgtgtttagaggtgttgcgggagaccctagtgatgttttgtttttggtgaggttccatgtttctcttccaactttggttttgaacactttttatgggattatcatttatcaacagggactgtaacacaaaagaacaaagatttcaaggtttcaaatgttaaagaataaaaatattgggggattaagaacaaaaatttcaacttaaataaaaccatagcgataccgaaatgtaactagctgtttcttgaagttgtatagttgtttttttaatgtttgttctagggagaacatagagtatgtagatttttaagtgaagtttaagtaaaaagctgagaaatcataacatattctcattctctgtatttgcacattcttctccaagctatctattctagctatggtttgattattggtgatacagtgactccatttatgaaggtttttgttaagattttcttttcttttacatatccaataaacagagtaattattttctttagccatgaatttttttttggttgaagtacactaatgataaaaagcttttcattgactatatttgtttagtgatctagttttaaaacgattgtagaagtatatgacaaaccaaaggatgtaggttgcattcatgatggtcccaggtataaaataatttttgttgcagttttaggtaaaaaaataggttttgttcttggtttagtatcctaatttcccccctaaaatcttatttagtgaaggagtgtaagaaatttggctatttcttttattgggtttttgaacaaaaagaaatgaaaataataattgaatatttttaatttacgtttgattaattattggtatttaattttagatattgttttgtaaatgatatcttccttctgtgattcttcttataacttgaaagttaaattatttaaattctaggaatttaatacgtgttggttgtgtaagttatatgattataaatcttcttccatgctttggtagtttgtataaaaaaaaaaaaattatgataataaaactcttgctatctacattttttaaattgcaaaaataacgaatttgaaaacagattaccatatgattatggtttgattatagtcaaatttgtcaaatttgcaatatacaaaaaaaagatgttatgagctgttttttttaatttttttgtctatctaatgcaatttttctttttttaatttctttgtggggcttttgcaaaaatagcaaatttttttttatgataatagacttgtcttaacattttctaaatttgcaaaagtaacaaatctaaaagtgatgtcctatgattagcgtctgatagtcttttgatatcataattttgtcatatttgcaatatgcaaaaaattagtgtcctgagttgttttttctctaaacgtttttgtcatttaatgtaatttctcttttttttcggtatgattcatttatttttaattatctattttatgtacttaagtgagcatatcttccttgcaaatatttttggacaacaactctatgatccttcacaatagacaataactccctcatttgttagattttgaaagctttgtttatatattgatcaacgtagtttgctaataggttacttagttaaacgatttgtcactttctttgttatgaatgagataatttttgtgtttgttgagagttgtgttgtatacaatagatgtattattgattttcacatgcgtaagcgatatatagcgatggatttgatgtcagtttttaagtatttgatcgtcattaaaaatggattagaagacaatgaggaaattattgaataaaattggtgacaaacagatgcagaagatattgaaatgatctacaatgttggattcaaatgacattgttgggcatctataattccagtttaaaaccaacatcaaagcaaaactgacattaaaatgttttgataacacgttcatagatgtcagttaagaactgacactgtatctaaattgacattgttggcatctttaatgtccaacatcaaagaaccatcgatactaaaagcctttaataacacgtttatagttggttgacaatcgacattgtacctctataatgttagttttaaacggagattaaagtctagttttgttgtagtgagccattactgatgtgttggacaaattatgatgtttttttgtgcaactatggttggcaggtaaaagcaaggattatttggataattatattgtc

SEQ ID NO: 7651 - DNA, 800 bp, Cucumis sativus
  Intron number 1 from transcript Cucsa.166260.1 (locus Cucs a.166260) derived from phytozome v7.0 (chr-ID scaffold0115 3; pos 1508701 to 1509500 reverse strand)
acatcactgcttctcctctcggcattcctcaacaggtctgtttttttttctttcttttttttcactttctttttgtttcaggctgtgtaccacgctagtttctgattggaacttaggatttgtgggttgctttcgatttcggttccctttgtttggttatctattggtggtcactttcgtcccagattttggtttggtgttgttgatttttcacatggatttggaatttcctgagttgttgacttgtggatgtatttatcattttttggacttgggggttccttttcagtgatcttcaagattaatgtcatctctaaagtgatggtttgggtgaacttgtgtttaaagatttctaactgaatcttgaactgatttcagaatctttgttttaggactgtcgtttgattaattaacagagaataatgctggagaaaacggatacacgtttctcaccgtgatttttattttattctttctgtgcctcattgatttgccttttatggtagttttaagacactctctttgttctttaggttgattttcctcttctgttaattttttctattttattttatttgaaaggttgcatcttactgcctatgctggtgttttttaattgaattcttctctgattcgattgaattttcccctacttataactttatattggcccttttcaccacattttcactttgttagagttttcaagttttgtagatgtgaaattgttagtgcatatatgattttgagtgacttaaccgagtttattaataaattcttattgtaggtcatagcagtta

SEQ ID NO: 7652 - DNA, 1608 bp, Cucumis sativus
  Intron number 13 from transcript Cucsa.050880.1 (locus Cuc sa.050880) derived from phytozome v7.0 (chr-ID scaffold005 57; pos 101177 to 102784)
aaggaggtgaccggagactgctgggaggggaggtacgagtgttgtatgcatttatcttttctatcaattatcatatctgagtcaatcatagaggcgattttgatattttttccgtttgggatcctcaggttttaattgctaatcgatttatagaaaaactcagtatatgcttcgtagctaatatttggtatttttcaatttagtttttattattttaaaatttccaacttagtgctctaacacgttacaaaatttcagcaatagtcatgtttcccttcacttccaataatttcgtatacaaacttgaataccaaaggcctgagataacatcctcccccccccccattagggatatcattccatttgtttgtatgagcgaaacattttggtaattttctgtttgaactttagtttttaacgatttaacctttctacttttcattttgaaacaatttagttcttaaattttaggaggcaacacttttaaatttataaaatttagtcaattcttcttttatcataataactttctcaaaatcaaatgttaaattttgttatttaatttttgtagtttataagcacatttggttcttaactaattttatcaagaaaactaattgaatcttaataatatttttcataatagagacttaatcattacaaaattgaaagtgaaagactaaattatcacattatttaatttgtaaactaaaactcttgtcaaactgaaaatgtaggagctaaaactaccaaaagtttaaagactaaattattgcttacataaaaggagaaaaagtaaattttaacttaacatttttatttaagatatgtggatgaataggaaaattggttgattattaacttaaaattaattaaaatttagaagagtagaaaggtcatctaaaataaaaaagaatcgaaatttgtactaatttctagaaatttggaggagaaataagaaacttccctttcttagatgatcttttttctcctattaagtttttgctaattgacgaagtattataacatttattcataaaaagggtgtattatacaatgcatgtttatcatctataaatttaacatttatcaactgtcacagactaacttgaaaaatgctaatcataggggattattttagaactactaactcatagggattattggaactttttcaatgatatggactagattaaaaaatacccaaacatgagagacttaaatatgtttacccttttagaaatatccaaaaaagatgagcttgtgctggatttgcttcttggtaagcgtgcagaaaggaagattttattctagttcttccccttcctctcccccttcctcccagctagagcaaccacggtgattctacttgatatgaatctacaactccatcgacaaagttgatacatctaaagttaaaaaatataatcgatgaaattagcaagacaatatgctttcaaaatatagtatttagtagtaaacattttaccttccgtcatactaacccgatacattttgctattgaaaattgtatgcgactcataactgaaaccgttgattttatattcaacagctttcctagaacgaacgtcctgtggttactctacc

SEQ ID NO: 7653 - DNA, 1939 bp, Cucumis sativus; identical to SEQ ID NO: 7424
  Intron number 1 from transcript Cucsa.087950.4 (locus Cucs a.087950) derived from phytozome v7.0 (chr-ID scaffold0088 8; pos 422593 to 424531 reverse strand)

SEQ ID NO: 7654 - DNA, 1867 bp, Cucumis sativus
  Intron number 2 from transcript Cucsa.166840.1 (locus Cucs a.166840) derived from phytozome v7.0 (chr-ID scaffold0115 4; pos 225233 to 227099)
tcaatctgtgctcttttggactaatttccctctaggtaatctttctttttactttggatatataacagtttgttcttcgtcaaattaatgacttttatttttttgttgtttttaaaatgcttttgaaaacacctccataaaagaggatatcacagacattataggaactaagaaaacttgtgccacaagtttttttctttatttttcttaatagaaatattgaatttttctattaaaaaattagagaaaacttgtgccataatctttagtaattgttgttttcttttttcttgtttattagtttttttatttttttatgaaaaaaattaagacttctagtggttctttttttaatggaaaaatgattcacatatatattatatatagaaaagttttcaaatatgaagtataatgcccttttaataaaatacccaaaccagatttttcaaagttaaaagaaatagtaaaaaccatttttcttactttcgttaaaaaaccaactctggtaattagaaaacatttaataggaaggaaataagttaattttcaaaaatcaaaaacaaaaaatagaacattactaaaactgagtaatcatttattgttagtttttagtttttagaaaaataaacttacaatcaatactcttatttttacgtttttaatatatatatattttttctaccgatcttttaaaaatgcaacgtcaaattcttttaaataaaaactagagaaattattttaaataataaaaaattttaaaataattctaaaaatatttacaactatagcaaaacattacaatctagatgtgatatatagatcaagatagactatttagacacatgatataggtagacaaaataatagtttatcttggtctatcatgtccatcatagatagattatgatatatttctatattttattaaatttttttattactttttctatattttgaaaataactctaaaattgttttgaaattgctaaatcgagacgttttgtttaagaaaacaaagttaacgagaaaaggaaaataagtataaactttcaaaatcaaaatacttattactaaattgtttggattgagaaatatagtaaagaagagagatcacatgatagatttatgatttaaaaccgaactcgttttaaacaaaaagaaaacttgggtgctccttttggcgggacgtatgttgattcaatctacatgggatcgacaattataacaaattttgtaagaaattttttttggcacaccctacatttaaaaatgaatttgagaaagaaaaaatgtgattgtggctaaaactcttggaatcaatttttctttttgaagaaaaacaacatatttttattttgttgaattgaaaatcccccacgagtttttataatataataatgaccaaactatcctttcctcatctctctcaaatctgtcccaccatgactagacaacacatcataatattttaaatacaaatttgactttattagtagatgtatttagagccaaccaaaatacaaaactatgaaaaaaagaaaaaaagctcttctctaacaacgcaaacaaacctataattgtttttaagaaaattacttttaaaaaaactttcctaaatataacaaaatataacgtatctatgtctaccgttagacacatatcaatacaaatggtagtacattgcagtctatacattacagtttgatagacgtcaaattttgttatatttataaatatgttatagaatcgatagaaaataatataaaaaatatttggaaagatgagaccctatgatctaaagttattcttttatgaaatatttgtaaccacaggcacatcggtggaagccctactgtccagaacccca

SEQ ID NO: 7655 - DNA, 1594 bp, Cucumis sativus
  Intron number 19 from transcript Cucsa.239900.2 (locus Cuc sa.239900) derived from phytozome v7.0 (chr-ID scaffold020 46; pos 793897 to 795490 reverse strand)
ctacaagtacagttgtctatctattctttgcagtttgatctgactttcttgaaaacaatgttttgaaaggcgcagctaggcacacgcctagacccaagtcgcacggcttgggcttcttcttgaacagtcaaggcgctgtgcattaggcgcgcgacttacataaggtgcaaaaggctcttgagccgcggttttttcactcagtgggcttttaataaataaataaatatatatatatatatatataaacctaattatgtgtcttttaagttaataaacattccacccagctctatgttttaaaccaagcggcttcaacaatccaccttggttatatacttatattttatatattgttaagttaatatatttaatttacatttcccttttatatattttataaattgttaaattaatgtatatacttgagttaatatacatatccaccatgtcttttaagttaatatacttatattatacacatatacgttcgtacatatgagtatatatgtatacttaagtttttttgtcgtaggtacacttcaaatttgacttgatgctgaaacactatttctctccgttacattgtttgatcggtatctctccctagtcaaaatcaagaagaatgaaatgcagttggttggtcttactgcactgttattgacaataacagtgcagtaagaccaaccaactgttacatctattctttgaagccaataacagtgcagtaagaccaaccgacttaatttcattcttttttattttgactagggagggatactgatcaaacaatgtaacgtgagacatagtgtttcaggcatcaagtccaatttgaggtgtacctacaaacaaaaacataagtatacatgtatacctacaaacaaaaacataagtatacatgtatacctacaaacaaaaacataagtataaatgtatacttataagtgcgtacatgtgtataggtacacataggtgcatacatgtgcataggtatcatatgtgcatacatgtgtatacgtacccatacgtgtgtacatctgtatatgtacatatatatttatatatagtgtgcctcataaagaaaagctgcgccttgcacctagactccagaggtcattgcgccttgagccttttaaaacactgcttgaaaatatattcgactttccaagtagctggttgaggatgtgggaaaaacgttaaccttcattcaactgtaaccatggtcgctctgccttgctcgcagatcctctgacaaactgactaaaatcctctgacaaactgtctgggttcaatcagtttgatttgatcagttactcttgcacgttgttttgaatttcccagaagtgttggtattttatgctacaaatactggtttttttgggacattttttagattgaattaaaaaaatgattatacgaaaaacatttgtatacaaattatttttactaaatgattagacagttaagggaagcttaaaagttctatatgctagcggaaacatcaggtttactgctatagtttttgtacttactcctatttctatgacttgatctccctccaggaagcactcattttgaagaagttgaagtttcgctt

SEQ ID NO: 7656 - DNA, 2702 bp, Cucumis sativus
  Intron number 1 from transcript Cucsa.136360.1 (locus Cucs a.136360) derived from phytozome v7.0 (chr-ID scaffold0104 4; pos 979795 to 982496)
ccaggctttcttcttagcttcagccgaacaattaggtaattatagctccatttctaattttctttttatgtttctgaaccgaagtttgtcaagttgattggattttgatttcctctactttatctttgatttattgttccttctccgttttctacttgttctttaaccaatttgtttctttgtttgattgtgcttcaatattttacttttgaaccattgcttcaatcctcttgtttactttaccttttgtgtttattctaattttcgctgccaagggtcgaaaacgaattcatctgaggttttctttccttttttcagcttcattttaacaactattcggcttaattttctaagaatcagtgtttttcaaggattgtaaacgataggttgtttgcaattcttgctttcgaatctaaaatcttgcacctgctcgttcttgttttgtttttattatttagtttgtcctgacttggaggaccgtggaatagtggtgttagaggattggaaggttgtacgtacacatatggtctagattctgtgatttttttgtttgtcataatttattgtaattgttgagaaataatgagctctcttactcaagcttatagtttataccctttgttggaactctgcaattgtaagacccactttacatttgagaataataggcataatggtggttttgcttttgagaattttggtgaaagagaaacttgaaataactgaaacttaaggaaattgaaaattcagatctaagaagtacctttttgaatgaaaagagcttacatacatatatttatagaagaataggaatagaaaacaaaacaaaacaaaagaaagaaagaaagaaaaggataaagaaatgtgtggcttcctcgtacatgattgaagccactctgttttgtactccaataattccaaaccacattacccattgcttgtagcaaatgtgtggattcatacttgtttgaacacaacttaacaaatgcctacatcttttggtaagttttattgggctacaactcactctaaactcctttttaatcggattaaagtgtatgagtttagctttagttctgaaaaccctatgagtatagttttggataagatccaacacgttgtaaaaacacatcttaaaaatgcattgggcattggaaaagttctaaataatgctgtaagtaattcgattagacttttatccaaggattcaacttggtaaactatcttgtgagtaaatgtttggaagaatggaaattagatgatatagttacacgaatttcctacttttgttaaatgtttcttatgaataccttgatggagctcgagaaaatgtatgggtgtctgtatgtataaattttggagttagctcaagtaaaataaaaaggaaagaaaatagaaaagtttcaaattgttagcatagaaggagcaaagaaagaagtttggactttggagtaaaaacaattagtttttggaggaaaagggaaagaagtattgaaaacttttcggaccttgattagtaggaaagggcataagggtttttagataagaagttggtcaggatatttggttagaagtaggagtagtaggtgtggaaaaaatgaggcaattatccaatgagtccacttgagttgattcttgccaccaatctccacagaatgcataccgttttgtattatgttaagattctaaacctgaagctcaaaaaaatctcaacaagggccaaaacagagacaatactgcaacatattgatatcaaaataaaatgttcaacacccaatcataagcacaaatacaagaaataaaagcaacaggaattcaataaagacaacccagttcctttgagaagactggaaacttctctcaaaggcaacagcggcttttaaccaaaatcaatacctaaaaaaattcccaatcctagaaagcattccctatttatactcccttcacagtgggccctcaggtgctattctctctttggtactgtgcattaccctttttaccccttcttttatatatgtgcagtgttgggttctaacatattcaaatcaatttagatgcatctttcatatgatatgatataattttaaattttttaacgacttgaaattggaacatatatgttctttttggccaaaatgaacttaagctcaatgttaatttctccctaaaggctagaggttcaatcccccaaccctacaattgttgtaataaaaaaaacataaatgctttttcattggtagtttttgtgtatgctgggattgttgaatttcttatagtgattattgattagtgtgtggaagacaaacttgatagcagagttggagtttgaacatattatggttgtgtctatcttcttttcaagtttgttttacccgattttcaaagtttctcctgtaaattttttttaataaatttataaaattctttttagtgacttgttttccatagtgtatttatggtaatagattatgtagtttcattggaatctattgttgatgccatgccctaggtttgctagggtaacctgaggcagggggtgacaagatgaagcatctcctcaagtattgatgaatgcgagatatctcatgccataagttcataatttatgtcattccgatgatattcctcattttattctgacttgggattttaatttctctttgtttgaaggtagtagaaataaggctcctggaattaggttc

SEQ ID NO: 7657 - DNA, 769 bp, Cucumis sativus
  Intron number 5 from transcript Cucsa.133590.1 (locus Cucs a.133590) derived from phytozome v7.0 (chr-ID scaffold0103 7; pos 1278956 to 1279724 reverse strand)
atcttggcaggggtaatgttataaatcttcattgctatatttctaataggaattctacacatttaactctatcgaaactttatcgtgcaaacattttaatgattgacctgaagaaattaacctcaattgcattaattgtaactatgctccactttcgccttggtattaatttaatcttctttgaattcagtgatatccttttggggttcttcccattttctctccatacgtgcagaacatccatattcttcacatttgtataattcagtttattcaaatcttaaaccaatagatcattttacgtgctggaagtatcaatctttggaatatttgtttcccttcaatttcttgtaaacctcccgatgtgttcaaaaatacctcaaaggaatcttttttatcacagaatgcagaatggttaaaagaaactgtaaccagcagccatttatataggctgagataaacaacctagggaaaaaagggctctcgataaaaacaaaacaaactaacagctaccaaataaagctgtaaaaatacaactaagaagggtaaaatctaagaacaaagaattatctaacttaaacaagaaacatccccaagaaagaacaagaaactaggaacaaactaataacaatagccctaatgacctccttttgtctctgcctgtcaagtggatgacattccattaaattcaggataaccaaataaagaaatctgaagcataatctgaccttgtctgcaggtggaactgaacttagcctgaccactggca

SEQ ID NO: 7658 - DNA, 1507 bp, Cucumis sativus
  Intron number 2 from transcript Cucsa.088960.1 (locus Cucs a.088960) derived from phytozome v7.0 (chr-ID scaffold0089 4; pos 184982 to 186488 reverse strand)
ttgctctcagagccgtcgtccctaatatcaccaaagtaagtttaaagtttaattttctttcctttttcttattaaaaagaaaaggttcataaaattaattttggtattagggagtgaattttagtactgcattttttttagaatagttaaaaaagaaaaagaaagcaataactcaaaattaatttaaccattttggatctgtgttatcattctagataacgtttttaaaaaagaattatttaaaacaaaatgttaaaagtcaaatgctgtcttatgtgatggagaaattggatatgaattttttatccttgcatactaaattcaaatctaataaaaaaagaaactacgaaaaataaaatgaagtagactataaagtattataagaaaaaatgtaatctcgattctctcacccaatactcaaatatttccctggggattaattaaataaataaaataatgttttttcatatttatatattttttggccaactctgcatcacttcttgaaaacatggacaacgcgagattttaaattatttatttaaccgcatggatattaaattataaatattgcgtgagatgttgaaaggatatacagcaaaatttaggaaaatcaagtttctcttttaataattttcttctagcaactataaataatttgtcagactttttttgtttgtttaaagaacctctaaatttttattattttaatcaagatccactctactactaataataacaattttgtttaattttaaaaaaattagagtatgaatatctttatatttttttaaattccgcttaaattcaatgaacttgatttaattattttgataataaagaaatcattttagatgtagcttattgaacaaactactcatattattatatatatatatatataattgattatatgtgatcacgcacaattaattaaaagaaattataaaaaattagaaatttgaccaaatattttccatttagataaaaatttatagttttaaatagtttgttagttttatttttatttttgaaaaaaattctactttttttttctaatttcatttattattccttattaataacaattcaattattgggtgataactttcaaaaacataaatacataaatgtggtcttcagacttaatatgattttttttaaaaaataacaaattttacaaaatatttacaatgtttataacatacaataaattctatcactatataagtgataaaatagtttgtaaattttttaatttattttactaattttaaaattattcttttcaatcagggtttatgattgttcaagactcttttttttttttgtataattgtttaaattagaatttattctccgaatgttcaaccaaatacatctagagaaacctaaaatatataaactaaccaagtaaatatatgtatggtttgggaaagaaagaaaaaaagaaaaatggattttctaatttcagatgtttgatggaacaacgatgtcgataatgcag

SEQ ID NO: 7659 - DNA, 7385 bp, Cucumis sativus
  Intron number 2 from transcript Cucsa.239250.1 (locus Cucs a.239250) derived from phytozome v7.0 (chr-ID scaffold0204 6; pos 132149 to 139533)
tttgtggatctaaattttcgtgaactttgaagctggtgagttttggccttctgatttagacgtattttttttccttctggaaattgttggtgatctcgtagacatttttgcttcgtactgttttctgtctgtttaccattttttttttgtacgttttgacattttgttaacgatcaatttgtttctgggagtttttatcgattcaccatttatacttgattatgggtttcttccttttgttgttgttctttcctttaatttccttgtgcaatagtagttagtttctgttgtttagtgctttgttgatgatattcgatctgaattccattcccagttgtcatcaataattgttggttcagagcaaattgtttggctaattaactgtcacagctttggccttccttgtcgaactgttcttcaaagccattttatgttttgtttccatttaaaagaacgcttgttaatatagcgcagctgtccagacacatttttaataccataaaattgttctgaaaatagttcttaaacaaaccttgtctttttttgcataattattgatttagtccctaatccttgaactttgatgaatttctatttaattcctaaacttttaaatttaccgttatgtttctatatgttaaaagatggttctatgcaaataatgtgacatgtttattggacaaactaagggagtaaacaacatgaagaaataaggtgggatggtgtgtaaaatgtgttcaatgtgtctcttgaagaagagagtatgtttgcgtgtaatacataccttttaattcttttagtgttagatttttttttgttactcatgttattctatcattcaatgtatttattattgtctctctaatatgatctattatgattaaggcagatatatggaagttattggaaattgctttatagcatcacaaaattctagactgcaatttttagtggttaactatattacttcatgtaggtttggaagccgtttttattttttaatttatataaataagaaacaatgacattgatctatgaaatttacaaaggaaatgggtaatccatgatgattacacatgatatgcccaattagaaactaaatacttcgaaattgaaacggccaaattggaacaagtatgtccatgaaagaataaatgtggccgttccatagggagggtggaccatgttcatgtatatatatatgtatgtatgtgtgtgtatgtatgtacatgaaagaaaacataacttttcattgatataatgaaaagagacaaatcttcaaaatacaaggatacaaaagttttttttttttttgaaacgtaaaaggagacaagcctctttattaataataaatgagagtaacgctcaaagtatagtactatactatgagcaaaataagcataagactacaaggatacaaagtaatcaaaagaagatatcaaaactgctaagatccttgagataaacaaccaaaattcaaagtttaagaagaaaaaaccaatgcttcccaattcaaacaaatatctcggatggaaaagttcacagagtttagaaaaagaacaccaagatgagccattgattctagcagcttcaaagtgatccacccattgaagagatttatcatggaacaccctttgatttctttcaaaccaaatttcagggaggtgctttgacagcattgatttacaatagatcggccgtgggaataaaagatggtccaaataagatttgaagaacattatctttgaaagaaacaccaaagatccaatgaaggtgaaatatgggcagcaatttcttccaacaaccagtcgcctaaccacaatcaaagcataaatgttggagatctgctctagcagcctgattgtaacttggctgttattgattgtatcgaggttgcaaattggcaactaaggtgatcaggaactattttggcttgattcgtaagattaacggagaatgatttcttatttgtggcccatgtaagtgttttttgaaaattcgactttgtagattgaaaagaaagttagaatccatggttctttcttgtcataggcccatacttggttggcatatggagggtccaaaacagtgtaatttgggcgacgcttaatacttggtactcacaccattttggtcttttacctgccctggaattttgaaaagtctaccatttcattaattatgggtcaacggtcaaaccaatagtttttaagctgaaatcaaagaaaacattttgagatagcaaccatcccccgaggtcctcgttaacccatttctgcaaggaaaaaattataggaggcaatacaatgaaaatgagaatgggtttctttttctagggaaagttaactttgtttttttgagaagaatggaagaatttgcttgacatatataaaattgatgcttagtcctcaagtaaattcacggtggtaaagaaaaggaagatggaattagctccatcttctccattccaagtggcgattatttggcccaagagaaaggtttagaagtttgcgaaaccaccaccactgttgtaaaccctctagataactaccataattgcttccaagaagacttccgaactgaagggaacagaaatgatgaaggagacaacaaatcaaaacaaattattttgatctctctcatagtaaatgacacagaaacagtattataattaggagatacccttaagcaggttttctgaggaggtatcagaggaggatttctttgaatagaagatcaatcaagtctatatagagctcgggaagaattggttgggtagctcttgatactgatcttaggtgcttattttgtgcaaagaagacattatggctatctctgattttatcatgggcatgttctttatatctatacagttcttttgacagttggttaatatgggtttatgggctagacactcccagttgaagggatgagttctgtgcatgaaataagggatctgcttatggcttgcctctatttttctccataaaaattagtggtgacttcattatagtttgctggattcttgaaaacttaaacggggcaggatacctagaagtatgagggcttttaacaatcgagtggaagagttggagttgattgctattcccctaaaaatcatagatttacttctgacggtagagagaggcctacttccaccaggatggttaagttcttcttcagtacaagaccttttggcaatacttgagaaaccttgcgagggtcctaggatgacaatggggtccttcaccttttcatttaaaaacatgtggcttgaccatcctaattttttttttttacgattgataattggtgaattcccacaattacagtgggtggcctgggtatagagattcattgatacttgaggttgctagctttttgaaaacctggaacaaagaaacctttggcataactgatgatgaaaagaaataatttaaaaaagaaatagatgatatttattattaggaagaaaatgtcacctttcatcagaccttataaagaaaaaagctgctctaatggtggatctgattgttagagcaaagaatgtgaattgtggagtcacacaaatttcagtggtttgaagacagataacacaaatctcttccacaaatgagcttcaattggaggaataaggtctttatttctaccatttaagatagtaatggaagtctattatcaactgaagtggagataacggatttgtggtttgctttaggaacccttttgacagcttttgtagtatgtacagcttaccttcttctttatggtgtcctagacaaaatgaattttcttgcaattgtagcctagcttttcagtgcttcaagatgggcagcccatgctttattggtttcttttggggagggtgccctctcatccctctgctcctaggctgttttctatgtgcctcttatgagttattatatattttgattatttcctaaaataaaaaagtaggagagaatagaaaaaaaactttatgaagccaagagatttgacaattttcacaccaagaaatagtataataaatgacgacatcaaagaacacttccaacgcatgcacttgcttatgtccaaaaatgaaaaagaaaaaactctttgattcttctcttttcaaattataacaaaaaatgtgaacctacagaaaatctttgatatccttaaaggagtggactgataaacataagagttggaagatccctcacatccctagggagtcaagaaaattgcctttttcattagataacttcattttgtagcttcacatgggagtctgagactgcatgagattaagacaaatgatatttgttgatgttcttttttattcaaactattttattcagatcctgaatatgatttaaagtttccttttattattattatttaaaaaaatttcctatgaaaaaagctagtcaaaagaggtaaatctactcctgatgagtagaatcaggatcattagtatataaaatctgaaaatcctttcattcttcatctttctacattttcttttagcacttgtctagagacaatctatgatagagtacttgcatccgacatcccaattataaaaaattgaaccattgggcaataacaagattttgaataaactcagaaaactttaattcacagcctaattctcaagccaaaaaatccttcaacaaaaaaaaaaaaaaaaaaaatactactactaataccaagtttataaataacaaaagaatcaacttgtacttgagccttggaaatacttctccaagaacttcgaagactcaatccaaactttttaggtgtgtgccacttatgaagagctttcccacgtatgctttgaacaactttacaaatgaaagctaagcagtatacacactcctaaaatagtaagtgtcggtgtcagacactcacaggccccgacatgcgtcggacttcaaaataccagtttttattattaaatttgtaatatctgacacgaccaaacaccacaaatggcacctcaagacaccacaagctgcaaggttttatttaaaaacaattaaatgctgccttttttagctgacttagcaacagtgaagggaggggaagtgataaaggatgagatcgatgtcattaagaagaatcttatcaattatcagtggcgaaaatgaagttttctttggataaccaccaagtgaatgcccaagatatgtaatagacaaatattgtacctcacaacgcaaacaacaagaattggacaacttatctttttccatgctaacactacgcagaagatttttcccaattatcctttttggccaaaacacctctcaaataactcaaacggttttaatgagaacatctaatatcccgtcatcacgattgcataataatatcatgtcatcgccaaattgaagaataaaaacatgaactttatcaactgtcaacagaatgccatgtaaccaccgaaagaagaaaaaaatcacccacaataaaccctttgataggcacattatataagggctaaaaaacacacttagaacctcactaactaagagaaaaaggtaaggaggaaagagaatcgtcaacctaattctccttgaagtagggattcaaccacaggtctaccatccaaacggaaaatttagggtctctaatgcaacaactaatccatgaaatctacttaggatcaaagccttcaaggataagcacattttccaagaagtcccaattcaccccaccaaaacatttctccaatttaagttttaagatccaacctccctcgaacttcaccacttcatttgctttaagaattggattaattatctgtccccccgataaaagcactttgagaagaataaatgatgcttggcatgaatctctcacgggtctgttggttcaagattttataaatgttcgggaatttaagatgttttagaaaaaactgtttgggaattaaagataactatgtttggttgtgtaggggaacattaccaacttttcttaagaacaagtaatgtaggcttttgttgtttcacaatgatattatcatatttgaaataaattatattataatttaaattgtgggctattatttggtatacgatagtttagatttgattgtttaagtttgatagtttagatttgggtacaagattcctttagatttggctacccaaatctgaactattttttaaaagatcttttgtatacgatcgtttagatttggggccaaatctaaacgattttgtaccaatatcccaacgatttttttagatcttttatatttgttagatttggttgtagccaaatctaaacgtgtaccaataagccaacgatttttgttcaagatcgtgtaccaagatattttatatttggtatacgcttgaacaaccaaataacaatttgaaaaaaaaaatagaagaaaaattgccgaagaaagaagatagaaaagaaggttaaacctggaatatttaaaaaaaaatggttggcttcatgagcattttgattgtgttacacgggccataaatatttaggtgttttattatatttatgaaaatttcctattagtttactctatttatttttagaaaattagttagttaattattagaactcaaggacaaagatgtacaacctatagaacagattctgttcaattaaggttgtagttgttatttgattattattttaagtcaatattctcaaataatttaagactataattcaatttaatgaaaaaacaagatgaaaaatatcacaacaatggtaggaaataataagaaaataaaaggtcaaaaatagaaagataaataataaagtataagaaaaattgaaaggaaaacatgtaaaaaagaaaaaaaaggtaaaaaagggatgaaaattttcaatataaccagatgggatcatgaaagatcaccaacgggtaggacaacaaaggagatgaaaattttcaataaattcatcgaggaagctgccatacaggatctatctttatcaaatggtctgttctctggttcagaaagggaatttcaactccctcttttacttacaatggatctttggaccattcttcaaagacaatcattatggggttccttatctaaattgtttggagactaatcaattcaagatatttgtctcaattggaacgtgtttataacctctaactaataccactatgttctagtaatttatgttttgatgtattgttggttgtcttcttttggtatttaccaggtgtattttctaactttacaactaatctttgaaatggatgaggtgccttgtttgaatgaggacctgttccattggtgtaacagcataaataaaatttgctgtgtgagtttcattatttatttcttgcatccacttagttttgttgataatgtttggctatatgcaacaggttgaaactcaaa

SEQ ID NO: 7660 - DNA, 3792 bp, Cucumis sativus
  Intron number 1 from transcript Cucsa.002930.1 (locus Cucs a.002930) derived from phytozome v7.0 (chr-ID scaffold0003 4; pos 108376 to 112167 reverse strand)
ccttcttcaatctctcaacttgcttctcaccagtaatattctcattttcatttccttctttcttcactttctttagatccaacttcagttttctcactcttcttccatgtttttactttgaatcccttcttccatgtttttactttgaatccattgcctctcttacccaatcattttttactgcatgttgctgtcaattgttttgtgcactactttgagagtttacttccttcttgaatattcatatagttgtctttttctttgccgtgttattgcacttgggccgatcttcattttccttggtcttttgattcctgggtgtttggtttctagaattggaaagtttttgtgttattttaatttgaaaatggccggataattttagaaaagaaaatgttgaaagatgtagaatctagttcagcaactatacatttgcagttataaaatttccattcaagacaaattttttagctcttctcttttaagttcaaccagcaaccttagttggacttccacctaaggaagtgacaaatcaatttttttctattattgttggaaagttagcatcagttttgtagcaaataagtgtgaattcctcttttcgacaatgtcttgattatgaagtactgattgcaacttagcaatgtaggagttgttttaccactttaccagttaccccaatttgccaataatatggtattctcaaatgtcataaccaccctctgagaatgctgacatgggagatccttgatttagttggaatgactttatgtttcaaagtccatacctatcctcctgcaaatttggcattcagtccaactaccaggaataaaaagacaagtcaactcagaaactgtcattttatctgttttctagtgaaaatcacaagagccaacctcttcattccaacaataagccactgaactcatttgaaagtgaagtggtggttggcagaattagggagttacagatttagtcaatgtaggttgtggaccagttgtgatgttttctagacgctaagctagtattgtaattttggtaactagaccactgaatctcgatagtttcatattgtaatttcactaagatatcaataaacatagacactatatcagtgttctatcaaattggtcttagagcaatttgatagaacctttttaggagccattctagaaccttgtcttgttggcagcttgatcaatgaaaccaatgtgcttttaagtgaaaaagcatttatccatgttcacacgatggaacttagtttgttcataactttgacatcccttaaagagttggatcttagttatgatattttcaatgtagaatctgttgaggtccttgtggaacacctcgtagattttgatgtcccttaaagactagtgtgggcattgggttcggccaaaaggaatagctaggaattggaatgatctgaactttcatccttttctacttttctcactttgataattttggtaactagatagtagatctaacttgacgaaataatcatactacgtctaaaaatgtcaaaaagggttgtggagtgtacttgcttcaggatttgatcgtcaatacatattttgaggcccccatcctttttcttctagagtaggatttggctggaggcatctgtttttccttttggaaggacagagggcctgtgtacagccttgactaaaccttgcaagcagctcgtctttttgtcagtctgcatgacataatagtattttcactctttaggttgttaaggatcgttgggtgattctatggttgctggtagttgttactaaacattttatcaatgtcattttcataaaaccacattaaagtaatccatttatatttataacaaagttagcaccttcattttaggttccttactggccattcacctcttttgttattccgacaaggcaacaatggcgctaaggccttcaatttcagaacttacattagcatgtatgatgtatctttctcaaacttaaagcctagttgatgggtctctgcttcaataaggaagttgtgggttgtcatcagtatcacctactaaattgatcttagtgctcttttcaaagttcttgtgccccctgacataaaaatacgggaatcatctctatgggaaaatcttagccccattaattttcacatgtagagctgataaaatcttgatttttccatccttgctgctgcatgtatgttaggggcaacctagtaacttagaaacaagaaacagccagtgatattcacaagtagtgttgaagatgaatttagagttgtctcctggagatgtgaagcgacataaagaaaaatctgcactgaaataaaaataagtcgaaaggaaccagtgatgactttgttttataaccaagctatcatagttatagataacggtcccaacatcattactgattgaaataaggttgagacagatcatcacctgatgaaggtttagagattgaagtaaagtttcatttccctcatctacatgcccacttgcccacaaagatgtaggttgtagatatcttgaccatctctgccaaggatatttgttgatgatttgaaggccaggctaggttttaactgacgtgagtgatacatcctttttcaccttgaacccaacatcttatctttttactgttttttttattagaaacagatatattcatagaacaaaagagaaacaacctaagggtaagggacaacagggccctcccccaaaaaaactaaagaataagcgcctttcaattgttgaaaattcatagaaatgctgtaattacaaaagtgtttggtgtagttcgtattccaccaagaagttgtgtgttgcaacacagtccaaaaagaatgaaaagaattatgtcttaaaaattactgttatctttgtatttatccatccttttattctccccttatatactctagtgtaatatagatgtttactttttttttcttttattcattccttaaaaattttaggctgttgggctttcttttcttatgcacacagatagcttttctttaagtttgggcagtgcactttggttcattggataaataataaaaataaaatacaaaaatacaaaaaaaaagaaaaacaaaacaaaaacttaagcaaatccttgaccctaaattctaagccctaaaccattgtttatatatgtggatacacttgggtttgtgattccaaggtttaaaaagcacatcttcaattgactttctggtcacactcggagaggaaaagtaagagttccatgaatcaacattgttaaatatgtgggttggggtatatgtttaaagagaatggatgatgttctgggaacaaaaatgttcattgagaggaaatatttcatatggttaagctctgtgtggcttcctggtctgctctttccaaagatttttgcaactgcttgttttattagatggtttcttgttggagagttttcttgttagtattattcagattatgtttacactttagatgctgctctcattactttgggacttttggaatgattcacaactcatggagtcttttatcctaccacattacatctgcagaaaactcatttttcaaccatggaaatctcaattttcatcaataaattgattgttctcattggcactctcacatcccgaaaaaaaatggactcttttttcttcattgctcctatcgtactgtgtataaaatggagacttctccaagttgttgaaagtctattgattttctgttttaaatgaccggcaattttttgtatttctgtttaatgtaggccttgttaaacagaacactgaagg

SEQ ID NO: 7661 - DNA, 664 bp, Cucumis sativus
  Intron number 1 from transcript Cucsa.379730.1 (locus Cucs a.379730) derived from phytozome v7.0 (chr-ID scaffold0383 7; pos 135727 to 136390)
ttctcaaccggacgtctttccgatctgcttttcaggtttgatttcatttctgatccagatttacacatttcgttttgccttccgatctttatttttcttccttttatctatcaatgctgctccaagggtttcctcacatactctcgagttcttttcttttgtggttctactctgaaaaggattatttgaatagaatcagttcagaaacactacgacaattctcattttgtttatttgttttagttgagggataatcattcatttttagtagatgtaattacctttttctgtgtgttagacggcgatatcgtgtttgtctttggaagatttttgaagagtttctgagtcgttggttgcttctatagatatgcgttactttactagttacagtccttgattttgttatggaggtttggatttcattttacttttattatcttgtttggaggctgcctagactacagtgactacgcttttctaaaagcaatctgagaattgtacacgttagaagtataatatatgtactccttgtttttcatattatactggctctgcagccacattgggtttagttttggtgtttttatcgtacttatgggcttactcttacactatactattattttcaggctgtaatttggttagcaataaagcatttcaaata

SEQ ID NO: 7662 - DNA, 2531 bp, Cucumis sativus
  Intron number 2 from transcript Cucsa.139610.1 (locus Cucs a.139610) derived from phytozome v7.0 (chr-ID scaffold0106 6; pos 821806 to 824336)
ggacgcttttcccctcaaatcatcacgcctcctcggttagtcctttcttctcttttcccccaatctcttaatttcattttttttaaaatttcccactgcatttttcttctcccttttccttttttttttcagaaaaagaaaaaaaaacattttaaagtctttttaagttttgagttggatttaagtgattttattaatttggttttaggttttgattgttatatttctatgttgagtttcgttttgattggttttaagttttagtattttcttttactattactgtatttgagttaacttttttattaattaattttaataaaggttaaatattagaaaaatatttcttctacgatggtcatatatttacgtttatatttaaacttttgtgctcaattcataataccaaattcatcacattttcaatccaaatctcttttctactttttttttacagtgattcaatttgcatttctagttcattccaatacctcctaaatttataataatcttgattgcactctagtctatggatttaaattgagcaaataataaaaatttaatattaaaattgtaaatttttaatctcgtagagatcaagtcataataaattaaaaattgtgtgaaaatataatattataaaatcagaatagaaatcaatttctaaattcaaaataaaatctaaactagagtaattgaattatttgttgaagtgaagtaaagtgaaagttggatgaaaggttactaattttatgtattattatttagtggaagagcaactaattttacttaattgtctcgttgaaatcgtttttttccttcgtttttttttaataatggaaaaatggaaatgcacgttatattttgcgatgtagggtctcattttagaaaaaaaaaaattccaaagcaaaacctgtttgggtttcattaaactctttctatataaaaaatatttacgtttctccaactaacttatactctcataaaccgtaaaaacttatttttggtaccatcaaatttgtgttatttaattatttttattatgataacaaaaacatattcaaattcactaacatacatatcatttcacaattaaaattttaatttttatgttgattttaaatgttttttaaataatttaaaatattattgttaaaatagtaaattaaaagctcaatcaattcttcagaataattttgtgacagtctgatagaagtaaaaatcatacattgatttttttatttttatttttatatatttttgaaatcggaaaacttgactttaaatattatctgtagccattttatgttactatttataattaaaatataacaaaaatagttttatttaagaaaattctaaaaatttccgagccttaaatcggaagattgcgttgacttgacagtgaccgactaatctttgtaaatccaaacccatcattttcttaattcggaattcaaatactctaatggatttttttattttattcttattgtttacaaccatttattttattttacttaaaaattatattgagaaaaggtgagatggcattttggtcaaaaattaagaatggaaatgaattttcttctactaggcagcttttggtacatgtggctacttgctagcaatcatttcattttggtccacttgaaattggcaaacataaataatagccataataaacaagaaaagtagagaaaaatataatgcacacaattattgtcatgtatttgatatttcctcaaccctctatttgattattttttataccacgtcgctctgactatgatggtcaattaatgttgagaaaaataatggctgtagccatttaaactactgctcaaaaaaaaagataaaccaagaaccatgttaatgaatttaattcttgcgtttttctttgaaaagcattttgatttaattccactctcaaaaatcatcttttgattgaacctcaactatatcttaccttagatcatcatagtcactgatgtgctgttctcgttgtctttacaaaattttgggattttcttcccatacgacttcttaaggaccttaaataaatccaaggagtgtgtcgtgattattaatcttgatgtcttttttttttctttttagtagaatactatattataagataaaagcttattgggtgtctccaaattaacccatttatgtttgctgtatcattactttacctttgaattttccccctgttttgttgtatacttctgagaatattttcaaaattcaaccaaaattttgaaaaacagaaagagtaggcacaagaatagagaagtgatagttgattttagggaactaaagcgaattatgtaagcaatgaggctatagtttttgaaagacggaaactgaaaacctggttataaaatggaccttaattaatgagtttttcctctagaggttgtagatgtacaagatcagagaagtgacagtgtattttgtttttttgttttttgttttgatactgaatgacagagactgagcgaggaattatcaagagcaattgtgga

SEQ ID NO: 7663 - DNA, 4112 bp, Cucumis sativus
  Intron number 20 from transcript Cucsa.356310.1 (locus Cuc sa.356310) derived from phytozome v7.0 (chr-ID scaffold035 77; pos 1046052 to 1050163)
aggttagttcaaggatctttagttttctgagactatgatgtttggactttgaaagtacgatggaattgtataactttcagagtttgctggtttcccatcattctaggtgcttggctcatttgaatgaattgttacttgcattgggttgagcatcaaatgcatgacattttactcccctattttcctatcttctctccacttttctattcaattcttgtttctgcctcttgcttattctctctctccctgacataagggatcggtctgtcaaaatcgattttgggatcaggctggtgtaggaaaagaggaaagaacaagaagaaaataaggaggaaagagggagaaatggagaaccgtgagaaagaagtttttaggtgctactgcaccaacatcaatgctgttgcagtagctttgccgtgcatttgccatcagcagttacaaaatgacttagccaccagagcccacgaagacacgttgtaatctagtaagagcctaaacgacactccaaaacctctgaagactccattcttgctctcccccaagaccccatgaaacaacacacccaacctccgagagaaaacctttccctcgctctcaaatgagggtgaagatggaactctttgaagaagcaacttcatgcatcacaggttaagtcatagctccaaaggatacgatcaaagtcgagttcagaattatagctaatccattcacgacacacaacacaaggaacaaaagtcaatttgaaataattgaaatgcgtcaataacatcaagatctttcttaacaagcagataagttacttgtaattcatgtcaaattatctcttttgattgaaaaatgtagtctgcagttgtaatcaatattcaataccagcaataccacctcattcttcttcgggtaaagtttagttgggtggctttgaatggattaagtgatttcaagaatcttttattatggtgcaaagcagtcaaggcattattagtatagttatggtttgaaagaaatcagcgagtcttccatggcaagtcttcaagctagaacggttgtcttgagtatgcctgatgaaatgcctcatcatggtgttctttatccaaggctttacaagattattccctaaagagatattactgaattggtacgccttcattttctaacctatattgaagagatgtttccatgttatctgtactttcgtttatatttctaagcgctagaaagtatcttttagcctatggggaaaggcttgcttcggcctggtgattttgatgtaatctgtttttgtaatttgtagttggaaatgatgagggctctaagggtagttgagatatcctgatgcatctacttatccttaggttatttgctctttgtacatcctcatgtactttgagctttgtcttttttgttattatcattattaaataataatgagatctgtttcctttttaaaaaaacattgagacattaatggtcttcatttcgatatggaaataatataaattatttgtaggcttaaacactgagactttaattgtcttcatttggatagttagcttgctagtccataagaaaaaaggcctttgacgaggtcgattgggacttccttgatcttgttctaaatagcaaaggttttggagacaacacttgaagaaattgttatagtgtctattgaaagcaatgaaaaatacaaaacaccaacttacgtggaaacccgagaactgtgagaaaaaccatgatatttttgttcttattatttttctaatgatctacaatagctacaatgaaggagaataaatagaaaatacaatgaggtaaaaaaggaaaagaatttagcgattaggctattagcccactaattctaaccgtgtcgataataagtttaccttcatctactagcttaaacttttgggtcaattggtgattcaacttgcctgtgtatgcattgttgcgtaagaagccctagatgatccaaattgaaaattagtagttatggagaaaatgaatgctctcaagatagagtgtacttgggaagaagataagaagaatgtggcgtgctaatgggtatttacaataaagtcaaatgctgagggtagcgttaacagatataagatcaactattagctaaaaactttcctcagaactatggaattgattgcctggagacttttgcttttgttgtgaaaattaactccactagaattctttggattggccttttcatcaattaaacgataagaatgcttttctcaatggtgatttagaaaaaatgtttatgtgtttacccccaagatttgaaatggaacttgcaaacagcaaagtttgcagcttgaagaaatcattatatagtcttaaacaatcttcaagaggatggttcaaatgctttcaaaaagcaatcactagttatgactacacccaaaatcaagtaggtcatacaatcttctattggcactttgagaataataaaactacaattttaattgtctatgttgatgacgttattctcacaggaaatgatgaagaagtagttgatcttaagagcaggcgtgcaagtgagtttcaaatcaaagacttgagagcctttatttaaacattatttagggatagagtttgcaagatctaaaaatggatttttgttaattttagagggaaaatgttattgatttacttcgagaaacaagtttacttggttgtcagacaacaaagacttctattgagccaaatttgaaatttcaagcgactcatgaagaagcaaagtacgaaggcagagataccaaaaacttgtaggtagatcgtagacagatttatttatctcacacatgtctagatatagcatttgtagtaagtatggtgagtcaatttatgcactcatttgggcccattcatattgaagtagtgtatggaatcttgagatacttgaaagaaaccctaggtaatggtatactatttcaaaaacatgatcattttcaagcaaagtgtatactgatgcaaatagagctagaagtactaccgatagaagacctacttctggccattatttgcttgttggaggaaatttagcattatgtagtaaaaaaacaaaatgtagtagccagaagttgcgttggtgtgaaatttagagctttggtccatggaattcggaaagtacatggattaacaggatccttgaagaatgtcttaaaatacacctatacaagtttattgtgataacaaggctgtagacataactcacaatctagttctacatgataggacaaaacataatgaagttgactagcatttcataaagaaggttgatgctggtgtaatatgcctatcttttcttttgatggcagaacaaacgacagatatgctaactaaaggtctttcaaaaagaccatttgacaaatttatctgccagctggctacgaatgacatctacaaacccgcttgaggggggagtgttggatttccttttttctttatatttggatgtattatgttgtgcatattcttcatttatgtccgtaatatctgttccttgttggtagttggtctttcatctatataagaagaccttgtatttgattcataacaaacaaaaaagtttaaataatataatcctttggtagacccatttatagttcaattggtttaggcaactctcgatgaagaagtcagaggttcaaattctcatttttggttgaactaaagaaataaaatataatccattgttttctgtttggatcaatatgtatgactatgtactaggacaacaaatacaaaatacattaccatatcggatgtagtacccaaacttgttggtaatcatcagcgacaccacgatacaactttataagtgctaaacatgtggaagatatttcaatacgattatctcaggagtgcttcttgcttcaaagtttgttttttcttttctgttttaaaccatcatttgtaaacgaaatgtgataatattagtatgaacaactttgtttccaatatatgtggtttaccactttagcagttaatctgaaaggcgtctgtcatcaggaattatcttagaatattaattgtttgtttcttcttatgcctttcgatacctaggaagccaatcaaagctgctctatctgcgactgcag

SEQ ID NO: 7664 - DNA, 2973 bp, Cucumis sativus
  Intron number 1 from transcript Cucsa.322980.1 (locus Cucs a.322980) derived from phytozome v7.0 (chr-ID scaffold0308 0; pos 2527876 to 2530848)
tgcttcatcatttccacctctcccccgctgatttggtatactcttccctcttccctcttcttctttatatataattcctctcatcttcaccatttctctttaccctaaattactctattattatcacttctttttttctacaatcatataattaactttccctatattttcaattatgcaaccttttctccctttcttttatttacttttgttgttattaaatcgtaaaaaaaatatttattaacatataacaaaatataccacttctattacacggtggatattaatttagaataagaatggaatattggaaatttgacattttttaaaaagaatatataagtttaaaaatggaaggatttaaaagtaaacaaaaagaatgtaattaaataagtgtgagttttgtttatggtttatagttattaataaaaatctagcccaatgtgacaaaatatctttacaatatattattgaaaacgttgactccatatatatggaatttaattgattgtctactatatgcatataaaaactatattatatagtttagttttataaaattgctcagatctaatctaatctttgtgtatatatttgtatttccactttagaaaatcactaaatggcctactataataaagtcaattgatagtttttttgttttaaattttccttctttattttaacttatttgacattctttttttaatctctctactccatattatttttctttgttgaattgggtttttttttcttttttcttttaactaaaattacaaaacaaaatgtttggcttaattttatttatatatataacccttcaactttatactatatgtcaaaaatactttgaaatttatgtttcgaagctaaatcatttattgtttgtttcataatgttcttgatctttgaatttttttttcaaaaataaatctaaaagtatttataaaaaaagttttaaaatgttctcatcctcttttttttttcatatataaatcctctttttttttcatatataaattctctttttttctttcatggttttaatcttatactaattttttccacttaactaaaataaaacataagaaacttttaagttaaaatctcacaaaattccaaaatttattatctcctcttgaaaacatacacacaaccaaataaaaacaaaaataattaagttaaaatatcattttattcgtttgttcaattctaatctccctattttaatactttcgacaaatcttaaatttaatttccattactagtttattggagaaaatagaaaaaaatatatataccaattgcccccttatgtgtggtttacaaaaaaaaattaactttatttcaaatcaaattgtaacgatagtaataaaattattatattatagctattaaggtttcaactagattaacgtgcatatgataatattaatgctttataatgattattttttctttcaaactagaaaaatagacaaaaaatattagaaaagtaacacaacaaatgaaaaacacaaaaaacaaaaaatagaaatctggaaatttgaacgttaaaataaagaaaacgaaccctacataactgatatagaccctaacagtcgaactatattcaccattttaaaatcatacttacagcaaaattatgaattctattaataatagttactaattaaatattttatcaaatttgctatttatttataattattcgaactaaaataatattttaataaatggatttatgttatttaaaattgaaaaaaaataaaaagggaataaattagaattattatgaagagggtaatgtaggggagaacttgacttgcaatgagtcaatggtcaacgaaatagggtttgtgctattttagaagaaaaaaatatcattacatacactgaagccgtgtgggatcatgcttcatttttatttttattttgtcaatttcaaaaataccaaatatatataacttaaccctcaagacatcaccacaattaataatatatcaaacaaaatacaattcaatttcgtcttctcaatttgcatccctacatctttactgtggtgagaagatggagagatttgtgggtcaaattatatccatctattacttctatttataatacattatattaaatttcatgttgttatatataaattcttcagtcaagttttataatctaattagaaaataatgaaagagtttttagatcttttttaaaaaaaaagtttttatcttacaacttgactaagttttaaatttaattattcttttgatggagtagaagggtttgttcctctactcgaaattgatgtgacttaagaacatgatttagtcttagtatatgaactttaataagtgtctatactttatagtttgtagtaatttattccctattatgataaattttatcaggatggaagtatataattttattacataatgacttagttagtttttgtcattggagtttatagataaattgattcatcggtcaatttatcaatctacacatgcaaattatatttaaacgataataatatttttcatatggtcatccatttaaaatttaactaaattgtaataaaattggactcttagtttctccggatatcgttaacaataaagctcggaagctcctattttgatttaggtccttttgtctagctttggaaagttcaaaaaatctaaagtttatttcattgggagcgagagaaacgtcattctaggccgtgatgtgagcaagcgaaaattagaaagcatagaaaccaaattattatcaactaattaaactgttaaaaaaagtttaagaactaaaaatgtttttgaattaaattgaaggtaaattgtaagaaaatgagagccattttaaaaatccaaataagaagaataaatcattatatagagggatattcaaggtgacatttgtaaattttgatgagcgatatatgcatgcatgcaggttgtagca

SEQ ID NO: 7665 - DNA, 1800 bp, Cucumis sativus
  Intron number 2 from transcript Cucsa.181790.1 (locus Cucs a.181790) derived from phytozome v7.0 (chr-ID scaffold0125 1; pos 51596 to 53395)
tgatttctattctggtttttgcttctcccatgtgagtttcattttgtgtttgttttttgttcaaagtttttcctttttctttttagttcttatggtagtttgttgaacatggttgaatactatggataaagcataggtttttaagaagaagaaaaaaagtgcgtaacggtcaataacaaataaatttgtaatttaaatcatccaaaatatagacgtagtttgtttaaatcttatcctatagattgttgaacttaaaaataaaaattacaaacataattcataatttttcgatttgtgtgtataggtcattgaagttaaaaaggtaggcaagaaatcctaaaaactttaatgtattttaagttttgttcggtagctatactataaactccgttagaattatttttaaaaagtattatttcaaaaaaattatttaaatcctcttgtaaaaataatcatttaaaaatagaagtgttgtaaaagctattttaaataattaaaaatcacattttcttttaggaaaaattctataatttttttgtttttagtttttgaaaaacttgaatttctatttgtttttatttttgaaatttgagtggaaatgataagacttcgatttgaaagagggtttactatttttttcttttttgaaaagtagaacttttaatctctcattcggtggtgacaaatttcaaaagtttgttaggctacaaaggtaaaattacgttacagtagaaggaattaaagtttgctaataaatgtgcattaattaattgcttgtttttattttattttggtttattcatttattcattttattttatttgtagaggccattttttattttattttattttaatttaattttgggttgctcgtacttttcccactttcaaaagtttggctcaaaaaatcaaactctttttgttaggggacagtttggtagttatgtttttaattgattttcttgtttccatttatagatttcacctttttcatatatatatatatatatcatttgctttagtttatgtattttctataaaaaatattttaaataactttaaaaaatatttataattatagcaaaatatcataatttatttaaaattactatggtcttatcttgatcaacaatcgttcacaataaagatgttttgtaaatatttttattcactatctaattaaagaactttaatttataatgatttagttatccaaactttaatgtctaattgttagtcttcaatgtaacaaaagatatcaaaacaggtaggtgttaaattttattattttatgacttagattttgtattttataaaaatatgcaatttcattaaatcttaatactaatttctatggtaaaaactaaatcagtggatgtttattcaaagtacttaaaaggacaaagttgttaaaaacaaaaattaaaaaccctaaggattttattttattcttagatttttaaaaatatgtctatttcttttcattttcttacggttgttcttaaataaaaatgttgcatccttaaccaacttgcaaaaggaaaaaaaaaacttattttggttttgagatttttaatttcttatttttaaaatattgatgaaaaatagatgtcaaaggaagtgatttagagatgaagaaacgtctataaataaacaaaaacaaagtggttaccaaatgagatctaaattattgttgattgtttaataagaaagtagaagaagatactgattttgtgtggatggggattattatcatatgaaaggaaaacgtttataggaatagtgaagaagaaatcaa

SEQ ID NO: 7666 - DNA, 2188 bp, Cucumis sativus
  Intron number 1 from transcript Cucsa.089650.1 (locus Cucs a.089650) derived from phytozome v7.0 (chr-ID scaffold0089 4; pos 1049645 to 1051832)
cttcctttgcttctgtcactggtttcagtctcctcgtacgtaccctttttctccatcttcttctatttcatcaacatcaaattattttcactaaaatatattaaaaattcattctatagataaccgatactgtttataaagttgtttctataaattacataaaacaaattgcaagcacaaggttgagtcaagtaaactagagagaaatgtgacctcgtaaaagaaacaaaggtaactaaaaaatacctggatgcatgcgttccactcctcctttacaacctaattaaaagttggcttgtgtctcatatatatctatccaaaataaataatttatttttttatggtagatgccaacttaggcttagactacaattaaatgattaattgcccttttgaaatatatctattttgttatatttaaaagtaagtaaataaatactctctgttccttgtgaagtgtgcctcgctaatttccatggtatgttttgttttcaagaaaacactttatatttcggatatttaaatttatgtctctcgtttttatcttttcgttttcaataataataacaatgtcacctaatctcattttcaaccttttagtttaaaaattcaattggaaaactatattttgtcatccttttttctctttttaatgcttaggttacctgccaatttttctaatacaaaaatttatgatttttctttttaaattcaaaaataaatctttgatacctatttttttctttttgtttcttaaaacaaagaaaatgatctattaaattcaaattattatgtatacaataatatttttaaagaattactaatataacaaaatctacaacgatcgtctatcaataatagaccataagagtttatcaataatagtaatctatcctttttatcgttgatagacttcattgtacttgcaatttatttaaaatattgttatatacttaattattatttatataattgctacctatattataattacaaaaagaaaaattgtttaataactattttattgagagattgtcataaatagcaaaagaaaattaaaactatttaccaaatattttaacaaaaaaatctcaaatttacagtcaatttaatgattttgttatagcttgtaactagttttaatttttttttgctatatcgaaaaatgatcatttatgtttatgttttctctttctcatttccatttttttatagattaaatataatttaaaaataaacaatccactttaacatatctataaaacataattataaaagtttagtaataatataattatttgagaaattattatagattgaaaaaaattgaaactatattttaaaaatatagaaaaaagaaattttctaaaatctgatcagcaatgttatcttttctctggaaaaaactacattgacatctctcgatgtttaaataaacgttgggagatgtcaagactcttccgacgtttcttttgtgcgttgagagatctttcatttaagaaaaatactgcaaaacctgaaacaataagtaaacaaatggaaagacttaccaacgaggggcgaacagtgaggggcggacgacgagggaaagacaaacacacaaatttaatagttttttctcaacctcaaaccaaaatttaaaaacaattaaaaacaaagaattattgacgacgggtggacaacgacgacagcgaaaggatagcggcggacgacaatgacaagaagaaaaacaaacaagagaatacctcgacaatcacaaaaacatacataattaatatttttttttctcaaacttaaacgaaacaaagaaagcaaataaaaaaacaaacgcttaccgacgagggaagcatggcagctcacaagtgtcgacggtagacaacggacgacagatgacaacagcacgacaacaacaaatgacctggctctctcgatctccctatctcgacctcttcctctttgtcttcatttcgttttaagttaataaagttacttattaaagatttgataaaaataatttaatccattttataactatccaaacatgccagaaccaatttgaatttagttgtacaaaaagattgacgatatatataatatatatgtaacgaatttgaaagtagtttgtaccaaaagagattcacgatatacataatatatttgtaacatattttattattatatgtataga

SEQ ID NO: 7667 - DNA, 4115 bp, Cucumis sativus
  Intron number 3 from transcript Cucsa.377910.2 (locus Cucs a.377910) derived from phytozome v7.0 (chr-ID scaffold0380 6; pos 388569 to 392683 reverse strand)
agcaggggaataaagaaaaggtacgtgttgcatttcattagtgccaaacatgcacgaatgctgttcaggtttacataattgcagatttctataaaaaaagatgtacataattgcagataagttctttatgttggttgttgtttccaatttactgcattaccattgtctcattatcattttggacacatagagttgagaagcaaagcaaacctttcagtgatataatgaaaagagactaatacttagaagatactaactttaacaaagtagctcaactttttgacaagaaagataatgtagctctcgtgggcttagtttttctttatagtttatactcttgtattatttcatttttatctcaaatggaagtttagtttctcattgaaaaatatatataacacggtaggtaactagttagttgatcatgatataatgatggagacaaaatcactggaccatgttgtccatgtcaaattatgcatttagtaataggaagttctctgtaaattggtccagagtttccattttttttaattcacttgaagtctttcttatttcttttcaattctagtcttcacttcgaatcacgtttttgttgtttccttgcatcttattacgttaagaatagtaaacccagatcgaggtctgagcaagtcataaacttcaaagccctctcaaggttccatgaaacatggctggaggaaattttgatcacttgtattttgcaaaatcgtaaaggaagggagggagaagtcgatctcttagaaagtcatgaaccatatggctctgccatagttcatctagtatccagtctcttagatgtgtcttgctggattgtacaaacagaactttctttatcgaaaaggggggggggggggggtatcccgtcagaacaattttttttaaaaaaggagttcaactagtataaatttgggttataattacaataaaaaaaatggaacacaactttgtggggaaccaatgaaggataatatggagatgatgtcgttagttgacaatttactgattaggaactaaagaactgaacacaggaggttaaaggaacaattagatagtttcaaggagaaaaatgtattgttataatatgtatgttgttaggtatttaagtagtatgttggtcatctcattctaaccaaattggggacaatgccataactaccttggttcctaacaataccccatccacggaaaaccgacatccgaacagctactttcgcgatatggggccatacttggtcagaaccctccattggttccacttcgaaacgtcaataaacctggctctaataccattgctaggtacttagctattgagatagagagccaagtcacttaagtaccacattggtcatccattctaaccaatgtgggacaaaagcatcctatgaggaccttggttcctaacatatgtatatataaaaaaatcaagtttccatgaaaagaaaatgaagaagcagaaactaaataatgtacgggggataaaaacaagctcacaaaaggagtcatcagatagtctatggacagggattaaatgcaaaagaatacaaccaagatgataattgcaaaaattttgattagcaaatgtccttaaggacacgttgaatctcaccacctccataccttctaagaccacttcaccgatttagaaggtgtactgttcccctcgagccacattcataaaataacaaaacaagtttgccacaagactcttcttatcttgaagattgaaaatgagaatccatcaggatctcatcaatcaaagagcaattctccctattacgtaccatgacaaccccaaacaaactagcgtactattccccttgagccacattcataaaataacaaaacaagtctgccacaagactcttcttatcttgaagactaaaaatgagaatccatcaggatctcatcaatcaaagagcaactctccccattacggaccatgaaaaccccaaaaaaagttgaagtactaactcccagtggagtaagcgaactggcatctctccaaaagacgatccaaatcctttaccctgttgttggaataggacagacatcattgcaaacaacttcaaggtagaatgccgctgggcacaatcttggtattcactccaatgtgagctttaacaagaaaataatttactttcttaaggattttaactttcaaagagaggaaaaaagtgaggcttccttaataggagaagggaaacaaaggatgggaaagaatgagtgataggagaaaccctccaaaagattaagctctcaaactagaagatccctctgccctaaaccaatcttctgatttgcaatagtagaaataaaacctagtttagctttgttggcttgctggattgtagagagatgattacagagtttcctcttttcccatcttttcaagagaaagggtaatttttgtggtaggtcggggtttgtttcattgtgtgggatcttcagtcaattactaggtttttctgggtaattatttgcttggtcttattttactggattgaagcctttttttttgtttattttcctctgtagttttgtggttaggctccctcttgttttatgcttttctttctgcacgtgcttgtgttctttcatttttcctccacgagcagggtttatcattaaaagaaaatagaagaaaagaaaaaagagaacatatatataaggcgcaccacctccaaagactcacaattagtaattgatcggtgaaaatccaaagaaagtgaggggaaggcttggtagaaatcaacaccgaggcaactgagcttaaccttttttgatgcaaatgataaagttgtgggaataactcacaaagagtcctagatctcacccaccaatcctttgaaaaataagtattatccccatcgccagctgagtattgtacaagtaaaaaagggaaagcccaaagcaataacagtgcataggtttttactagagcctttcaactaaccattaggagtccactcaaaagggtgtggttctggtccatacctgatcaccatgacccagctgcagtaagcattagactttttatctcgttgaaggagaaaagtgtgcacacactcaaatctcaattttggtgatttatccaaattatcaatttattaccaagcttattattattgttattttctttggtattaacaagtgtcaggacaacctgcttgatcctacgatatttggatgacaaagaaactcgtaatcataagatattaattcctaggtcggtgactaccgtttattgaaatcatgtccccttagtcatttattgagaccatttctcctttttttaccacttggtcaaccattgatggttaatttattaccaaatttaatttttgttgcatcatacaaggctactttgcatctcatgtgcatttctatttcaataattaacatagtaataagtagatgctgtatgccaaagttgatagtcatgttagcaacataatgactataaggctaagggcttcttttttgtggcaaaatgatttgaactattgaatctttcgttttcctctatatatttagtacctaggaaaaactattatggctacgaatatgctagaattttttatgtaggatttggttaaatagagtatcttggtagttacttaattgattagacttaggactagtttactcgattgattcggattagaattagttttcttagtttattagcatgaagattagttttcttgattaattaagattttgattagtttgcttttcagttctatacaaatagagagactgtcttcttgtattaactacttctaatatagaataaggattttgcttttattattggagatttctctccttttatccttggtgtgaaaatcagattgcatacaatccacccccatttagtgcagacaaccatcattttcttggctgtagtaatgctcattttttattatttattttgtccatttgtacttcttactccttattcatgcatataagatgtaagctatgttcttacgaagcacactatgtggtatcctaaaagtgtcacactgtagcatgccattttgcttattctgtcattcttgcgcttgtgcagggccaaattgacttta

SEQ ID NO: 7668 - DNA, 5452 bp, Cucumis sativus
  Intron number 1 from transcript Cucsa.363060.2 (locus Cucs a.363060) derived from phytozome v7.0 (chr-ID scaffold0361 1; pos 698013 to 703464)
caactgactcttgaatttgggtaattctctctctctctctctctctctcttctccaactctacttggaattggttagtcagatcctgagcaactaaactgtgatcccggaacacaaaatttcaatggctttcgtttccgcggaggtccgaaatcagaataaatatcgctcaatcgtgtttttatctttttttcgcaccttacaaactttaattgctctatccgtgtttatccttaaaagattgattgttttctgaatttgaacaaactattaccttcatgaactttgtgcactaatccggtatcgcgatattgttgtttgcgtttaactgtcaatggttcaaaattaactcgcattctatggaggttattggaatcaaaacgtaattttgtttgaatgtcccattgcttcattgcctccatatcatagtcattctcgatctgtcccttcatctaacatctttttaagcatgctccagattgtaaacgacgctcagttgttatctcataggattgtatataagttggatagctataatgagttcttcatcattttcaacttctatttgtgttatgttgaacttttgggctggattgcattgtttgctatttataaccatcaggtatatcagatccaattgcatgtgttgtttcaacaattcatcagcgtctggtggcaaattttgatctcaagcattgtttttactccatttgtagtggctctgtttcctcctccccaccaaaactaaaaagaaggaaaataaataatgtggcagtactgtcagtgtcttaagtatgtggtataaactaccaaagggattttgaatgaatattattctgcctccaaagggagggttgggctttatttattgaagatttaatacaaagttagttactaagtaactaactgatttgtttacacgataatccacccccctccccccccactagactcgcccttgagctgggtcagcaagctggaacccatctggggtgtggtatttctttaagtctaccacattaaaaactgggttgatattcaactcttctggtaattcaatcttgtaggcattaggatcatattttgttagcactttgcaagggcaatctgcttatctttcaactttctgtaactgtaagttccggctgggaacctattttttcttaagagtgccataacaaggtctcccacttggaagtgaacttctcttctcttctcttcttatctttctcttctttaggagctgtattttttattaagtgatcatagacttctttagaagcttctgtacacggtctgccatctcttctgcttcattttgtatatctacaccagtaggtaagctagttatatcaaaagtgagtctaggagcttaagtgtagtgtagtgatgtaaatcaatacctactatcttctagtttcttttttaattcactgttagttggctaaactacttagttaccatgtaaccaacttgtacagaatttctcaataaataaagcatcttccaaatattcataagaatcggtaggggagaatataggctggcattagttgtagtctctttagctctttggcatacgacgcatcttttcacaaagttattagtatctgttcttgcttatggccagtgaaatcttgggttgattaaatggaaagttttatcttgaccaaagtgaccagctaggcctccagcttgagcttctttgattgtacttcgcttagcgttgtatgaggaatacatagctgatctcctttgaagtggaatccctcaataatatggaaatcttccatatgaagatggtcagtgcagttgcgccatattttcccaaaatcttcgtcattttcatacaatctaggagattatcaaaagaaatgatcttggccaaaaggatggttaataaggtgccttttctgctcaaagcatcaactaccttattctttttcctggcttggtgtttgatggagaacttgaaatgtgggatgtaagatatccagtgggtgtgcaaagagaaatcatccatgagtaagacaaactttttggataataggtagtgttcccattgcttcaaagccctcacaagagcatagaatttctgctcataggtactctatgattgtctagaaatgctaagcttttcactaaaggactccactggatggcctccttgggataaaagagtgataagtgcccactatgtttgttgacgcaaagctagaggtccttttaggatccttgcaaacctagaatctatgatggtcactcttagatcctaagataactcattccatgaaattttttatcaaaactaatccaatgaattgatttttaacatcaaatctaaagcaagatttgaaaaagataacaccaaaagggttgaataagcacaagcttttaatattgatattctaccttttcaagagcattacaagtcattttataggctaaatggtcatgcatggggtagaagcccaatagccattcacttaaatgctaattaaagaaaatacatgcatggggtggaagcctaataaccatccaaatatacttaaaatgccttttaaagaaagcaagacctaggaacttaacataagattgcatactaaattagaggttaaattgaaaaactaaaaaaaataagaaagtcttaacaatgccttcaataactcttctaagatttttcccgtgccatgtttaatccattctcatcttgactcattgaactaacattgtatataattttttgctcaaaattatttgtcacttcatgtgaatttgctagcttttgaaggtgcaatgtaaaaccctatggaatcttctttgccttgctttttgtaattggttctttgggcacattcaaaggttctatcgttgaattcacatcaaacaacccctattcgggctccataagcatccacagcaacttcaaaaggattatcaaacttgggaagcttcaaaactggatgagttctgagtttcagtttaatgatgttaaaactgtctagttggcatcttccccacagctaatcatcctttcttcaagtggttcattatgggagatgttagagagctaaaactctttatgaattttatgtaaaaggattccaatcccatgaaagctcacacatcttttattaacttcggaattagccaattaacaatagcttcaacttttgcctcttccatctttacttgattgttgccgatcatgaagcctcggaatgatgtctcctcaattcaaaatgcacatttcttcatattgatgtataacgcgttctcctccaaagctttgaacactatctttaggtgctgatgtggtcttcctcatttctgctatacactaaaatatcgtcaaaataaacaacaaatttgtttaagaaggagtggagtacttggttcattaggcacataaatgtgcttggggcattcgaaaggccaaaatgcatcacaagtcattcaaacaacccttcatttcagtggtggtcttccattcatctctaggccgaatacgaatttgttggtaaccgctcttcaattccaccttcgaaaaaataagagttcccctgaattggtttagtaaattgctaatttgggtagggaagcggtatttgactgttattcaattaatgaccctgctatcaacacacattcttcatattccatcctttggagttaacaatgtcggtcgcacaagggctcatacttggctgtatgtggctttttttcaggagctcttcaatatgttggtgtaggatggcatattcatttgggctcattttgtaatgaggaagatgaggaagcaaggatccaggcaagaggtcaatagtatgttgaatatctcgcaaaaggaaggagctttgaaggttcatctttgatacttggatattgatccgatagatcttggattttcagaggagtcatttaaagcatggcctgcaataacaagacccaaaatatcggtttctttctctctatcaaattgctttccacttacgatgataaagagatggttgctcgaatgctttgcattgatgccatcctcattctttttattgaccgaaagtaagatcattttcttattcattcactgaaactcgtacgtgttctctccttttatgtattgactaagtgtcatattgtcaaggcctcccaagtcccaagtagaatatggctgacgtccatatcaagcacatcacacacaatccggtctttgcagcttcctccaaatactgctcattctccatcaaatttgtatgagctcccaaacaatgtaattcttcaatataatcagtcatagctcgacctccctgtcgacagctttggtattgattataaagtgtgtgttcatagttaggagggtgaaatcttgccttcattagttttttcattttcttccatgcaataaggtcttttacaatttcttctcctattcacctctacttgctctcaccatgctgacgtgccaacttttacctttagtgctactaagtgagccttctttcttttcgccatattcataaagttgaagttctcggtattctttagccaatctagaaaaatcacaatgttcctcttgcgatcatagttacattaatcttcattttatgattagtaggttctctgctcctttcactataatgagcttggaattttctcccatagccattgttttctctaacttgctcctcatcattcaaaaaactccaatcttgaaattcttggaatcttagaagcggttcttgatgttcttgattgggacttcgatcttgtgtcatcttccttcttgatcatttcatcttaatctttgtcgtccagctccatgaatgccacattgtccccactgatgaaccatctctggtcgctctttagggatttctggaggagttgtcgcatctaacctttgcaagacttcattaaatgctctctcaattctctccattgaagcttccactgacaacaagcatctgaaggaggttcctggagagaggatggggtatcttctgcatcttgattctgagcaggttgctcagctgccaccggttgcattctatgccggataggcatagatcccaagagcataaatgctctgataccattttggtgtaaactaccaaagggattttgaattaatattattatgtctccggagggagggtaagctttatttatagaagatttaatacaaagttagttacagtaactaactgataactaattgaattgtttacaccggtatggttttctgcaatattacaaatgatatttccatacacttctaggttgcattataatttgaatcttttatgaatgtaaaaggtggaagggaaaatctattaacgggggtacatttacgaagaatatcacttactgggttttatttttcaagctagtatttatacgttggacatgacattaatattagactttaaatgcagtggggggttggagttact

SEQ ID NO: 7669 - DNA, 1439 bp, Cucumis sativus
  Intron number 1 from transcript Cucsa.076420.1 (locus Cucs a.076420) derived from phytozome v7.0 (chr-ID scaffold0078 9; pos 782048 to 783486 reverse strand)
cctcttcctctttcgcccaacgattctcttaactggttagtttgtttctagatcttttatttcaatctgtttctttttgttctctgtgatcttctttgaatcctaatgaatctccgtgttttttttttcttgattttggggtttcattctgttattttatctgggtttgttgtgaattttggattggtgaatggagatctcttgttgtgggttgaatttttggtgtttttgatttcctggttgaatggggttgtggattggtgtacggggattgttggatctgttcttgtgggaaatgattttgttcgataattttgatctgtttttgtttttgttaaaactaaaatttgggtctgattttgaaatgtgacttcttgttgatgtgtttttcaatatctttcccccaattgtttgatccttattgatctgggtttttttggctcttctgtttctgaattatgaattcttagatttggatattttttctcggcggaaaatattctgatatgaacatttctaaagtgcagattggcaattcttttcattttaccttttctgtaaaagccatcaaaactcttgtggagtttggatgcgcaggaagtatttgaatttcataaaaagatgttaaatcaatgacatgcaaaataagtaaacaatcatatgttgtatgtatgtatattttgtaactcattaatttgatcacatttaatgcaagaattataagtttttggtttcatcctgcattgaattgaaacggttttagattgaaggagagatgccatcataatcttttgtcgatgtatacacacagaatactatatgtgaagttaatgggcaatgttgtttctcataatcaatggcttgaagtttttctattttgtgaattatttcaaactcgtttttcttaaagttcctaagagattgcttatcttgcttggttacatctttgagtgatgaaattcattacttgaatttgttttcttatctctaattccttttgagggtgctagtataataaccgatctgtgattttttctacagttacttaatttgtaacatttttttttatatatgtgagtgtctaggctagcttacatgcacttcagcttagactatctcataagacaacccatctaaccctactcttttctcttttctgagtgttaaagaaactcctaagattgaacctatggcatcttagtcatttgttgaggcttctttttttttatccctaggccaaccttgatggtttacttataatttgcaatatgactgaatatttgtagcttttatcactcagtgaatctgacgaggtctttgtttttcttatttgtacaatcaatctgctagtgtaacttattttgtttctgttttttacattattgatatttgaatgatcgattctcactttcttgttaatagttacttcatcttggaag

SEQ ID NO: 7670 - DNA, 2106 bp, Cucumis sativus
  Intron number 1 from transcript Cucsa.087950.7 (locus Cucs a.087950) derived from phytozome v7.0 (chr-ID scaffold0088 8; pos 422593 to 424698 reverse strand)
ttccactctgataagctcagactcttcttcgcttggtatacgatattcatattttcttttccctttgtcttgtgacgtcttgtaatcagccctcattttgggggtttcccctgctttttatgttgttgttataatgccttggaggaatgttgttggatctctttgttgttttaaagtttttggtggtggcaacgcctttcaggtttgtgggttttcttgttactggatttcccagttgctaaattcaaaggaaatttgaattgcttgaactttgtgaatgattggcctgtctatcggttggatttacttttgaattatatgtgttgtttgttttttgttttttttttgaagcgggatatggatctatcgaaattgcagagcttttatatttgatttgatttgatttggaaatgaaaaatgttcttcttttgactttagtttttttcttttgataatctttccttgaaaattcttcttttaattgatcaaactgtttgaataaatgcccgtaagaattgtttggctgcagagactcatatttataatcccattcatttggtggaagccttcatgattaaggttttcttttgtttagggtaattatacgaacaaatataattgtttggagacttgttaagatctctttttaggcacttttgctatataactttgagttgaagtaagttttctggagtttttaacaaaacttttcctctgaaggttttgttggggttatttaggttgtatcacaaacgagaccacagctttcctccataactcttgattgctttccatccattaatttcccattgatagatcgccagaatcaagagaatcaaaaggtataagtttccatgctttgtttttctcgatgattgttaagtctgattctgagcttccttttttctttgttttttttgcattaagtatcctttttcctatttttgtattagagaatcagatttgatttatactgattcaagaaactttttccatttctaggaggagaaatgccttattctctcttccaccctcctgtacagctttcttattaatgaaaagtctcgtgtagaattttctttttagacaacttaggactgtagatggagtacaccttattgaattttaaataaaatttcctagttgatcacttccatggtgtcggttgggcaagcaggtgtctggggcattcctagataaaattccacagatattcttccaaattcatcttgattgtgacaataacccctagggtggggatgcaccaacttatgctatgcaatgttcatcaatgatttgttgaattttttagttttgagatcaagctctgttacaacagttccatttttttggtactattttcagccctgcattccacttggggaaggatgatcctaatagttctacaatacattacttctaaatcttttggatgaattagttaataggtcattgaaaattatatttacatcaaactcttcattgattccacttctactgtgttctacaactttattcaactatttgatttttatacccaatgagcttaagacaacaaccaggtcaactaacaaactgtttcggtggaaattcattctgtagggactatcttctttaagcgctctggatgcctttgaacttttatcgctttttcagttataaataatccaacttatttctcttatactgttctttgtagttttaacgtaactatttctattagcatgcttgtaaccaaacagcgcacatcgtagatgggtgtttgcatgtgtatgcatgtaaaattctttgaattttcttaatttcaaatagacaatacatctttctttgatcttagcctttgttgagagcctagagtaagctctattctttttcaatgtatttgttcttttctgtttgtggacaaggtgcaacatatttttttctaacatttgtacaattagtcctgctgaggaaaagagaattctagtattttctcacagttcttttcttctattaacatggtttacaatgcagcgtactgccatcatattactgcaaggtgaaggtggagcctgattttatttcatttttggttttgtttttatgcttgtgcagaacagcaga

SEQ ID NO: 7671 - DNA, 1621 bp, Cucumis sativus
  Intron number 1 from transcript Cucsa.081310.1 (locus Cucs a.081310) derived from phytozome v7.0 (chr-ID scaffold0081 7; pos 162022 to 163642 reverse strand)
ccgtggttggccctgcttagattttttcgccaaaggtatatatatatatatatagatagatagatagatggatgtgcaatttaggttttttctttcccgatcgattttcgtttagtggttgattaatgcgggattgatgattgaaagtggtaatttttaggcgttggttgttctgttgcttgtattatgattgggaatttgtgttcttcgctgttatttcagagtgattgaatttttttgatgttcttctaaattggagaggtaaatcaacgtctttttgttttaatgctaaaaaaactactgcttcgttggtgcatatggattgggatgatacctgtgatagatttgatggtgtgtgaagatctaattcgaattgtttcaattgcagaacaatggtgtccttgtctattctttaaggttttataatgtaattagcaatctggtcttataaagatttggttgccaagttttttttcttgagttttatagttctgaagtgttgtagaagcctaccatagggtttcatttattgtgacaaggttttgtctttgaataatgttcacatttgctgagaaaggatgagtatatatgatcgatcagatttattatcttactgtcttgatattttggctgaatcttaattcagaatcataatttgcggttgcagtcaggatgtaaaacatgagagggaacactgtatgatatgtttatggtttatgttaactagttactagttacatgatttggtagttttgagttgtgattacttgaaattccaaatgattgattgttgtgcttttgataacacatttggattgcaattcatcaagcatttactaaattacacagaatatgaaatccttggtcatttgctctaacccccaacttcttgatctgttactttcactttatttaattccagtttctctttttcttgtgattaattaaaccttgttccagcggctgcttgagatggacatttgcagaaggaatttttttttttaccattaacttttctttttgtatacgacacacaacattgtttctaccattttgcaatttgtgtggccatgctagtcttcattgttaccagatgtccttaagggactatactttctctattgttgcctaacttttatctgtcgcccaatctatagcctgaataaacatattccactttttgtaattgtatagtttctcaacttttatgaattttgctctttctatcttggtctttcattgtttgtattgtctcagtgtattcatttatcttatctcattcaagtttgaatcttttttaaaaaaagtgtattcctacaagcctcatgcaatgattacagtaatgtaagcccagtatttcacaatcaagcgtgcaaagagatttgtgcttattgctcaattggtgatgagaataggaaccaaaatatttccatctgtttgagcggttaaattgattgaaatttcgtcttgacaactaagtttatttgcagaccatttagttttttttttttttaatttccatatgcatctaccaacattttgtactactaaattggtggaacaatgacatttttacttgaatgtagaatctatctctggaccaactcgattggctccagta

SEQ ID NO: 7672 - DNA, 8242 bp, Cucumis sativus
  Intron number 2 from transcript Cucsa.277230.1 (locus Cucs a.277230) derived from phytozome v7.0 (chr-ID scaffold0260 1; pos 238165 to 246406)
tcttcttcttttgtatcagaagggagttggtggaggtactgaatactgctcttaccatcataatgcgtataacataaatttgtagtaactgccatgggtaacatcatgtttacttttatatctgattctagtttgaccatgcttggtaaaagctgtcgttgtccaactgcggagtctttgtgaaactgaattagctcatattttatgtacagctttgagcttaagtgactatcaaattgtgctgttcgatttcttgtggattttgatttcataccactggattgaaatattcaataaacgcatggcaaaaagtattgttgagttaacaaactggttactaattgagcaattttatttggggacttttggttggattttgctaattagataaactgttttatgtagtcattggggttttcttatgatatcaaaataagctggctatgtagcaaagaactataatcatgggcgataattttatataatatattgaataaatcaaaataattaagagtacatatgaccttttacatagggaaataagtagaagacctcaaaagagctactgaaggaaaatagtaatggaaaatactaataatccataaaccctaattttcctttttaactctctcaaactcaaggtggtagaatcacaaataacttgagtttggtaagaaaatgtctcaatcaaatctgaaaatgtaagcttctggttttttttcttgaaaaggaaacagaatatttcattgatataatgagaacgggaaatccaaatacaagagacaacacaggacaacgacaaccacaatggcaacaaaaatcaaaacagatacaataaatggagaaataacaaaaccagaaccaaggccacactaaacaatacaaaacaactatacaaccaaacaaaacaacttcaagaaaataaaaaaggaaaattttcaaagaatgtatcgtcagctgctgcaatccaagaaaagactgacaaccaggggacagaacaagccagagatgacaccagctctgaggaaggaaacaacttcagtcaccacaatggcaacacaaaagcaaggatagctagaacacttgaataaacactgaacatcatccaatgataaaacccaaggtagaagagcgctcaagccataattaagtcacaagtttcaacaatgaatctcaagtgagctggaatttttgaaagggacaaaggggttctattgaaaagctcgtccacttttgaagccaaatcatcatcatgaaacaaagcagccaaatcttcacccaagatttctattttcttcggagaggtttgagctaaagactcaatgctgtcacaagaatcctgagtgctcacactaaagggagaaccaactttggactctaaaatctttttttggttggaatgcggtggagagcatggaatgctctttgaaaatgaacatccgaattaggattaaaggctgagaatttgaatttctgtggtagggaaggggcagatttcttggtagaaggtggtaactgagcatgcaaacaacggacttctaaaagatctaggttggaatctgaaaaggaaaaatgaggagcgagatttcttttctttttcttgaaaaatgcttgggatagggtttcaacaaccgagaaaacttgtgatgctgttggaacccagtttccaacacagattcaatatgaaattgaactaaaatctttattgctaatagtatagtttggattacaatgaaagatttcaaattgaatattaactttcaattcgatgtacaagaactctccctcaccaatctgtatcctatctctcaaggatgcacagaactgattacatcaaagactagccaacttttccctcccacttattttctatttatatcactctcgtctaccctgtggttcccccttcagttatatttacagctaactccttcaacgacttattctctttatttttcccccttctactgtattgatgaattattggtggtctatcattgcattaccgctccaaattcaccttgtcctcaaggtggaaatgaggaaaggattgttggaagttatcataagtctcccaggttgcctcatgttgtggtaaccccttccaactcatcaaaacctcccaaactcccttatcattctttttataaccatagacttcgtccagtacagcagtccattcatgattctcagtcatgtagggcactaactcttgtttatccttacattcactaaatgctcttttcaataaacatggaaaacaggatgaatggtagctgaagctggcaactccaacttgtaagccacagatccaattttcttaagaatttgatatggaccaaagtattaggggacagtttctcatttcgcctctttctcattgatacctgtctatatgggtgggttttcaagtacatatctccttctttaaactctacatgtcttcgcttaaggtcaacatagctcttcatcttctcttatgctacatgtaaatgatccctcaatgcccccaaagctaaggggaaggttcttaactgtgagccaccctccataccttgtaatgtgttgcttttctatgcatcatcccacttttcatataataggtgaaattttcggtagttaaaccattttccgggtttgatagttacatcttcaacctttcctttggttactttgatgacggctttattggcatataacgggttaatgttgaacaagtcttcaagatgggtcttttatgtccttccattcatcaaaggcaaataaacatgataatatctagaggttagagaagtcttccttaatgcaatcgtctgattttcgaacccaatgcattttgcccaaaatttgatttttttcctttgtgctcgattgagaattgctcatggcatcctttactttatttgcatagcttaaacctagggagtttgctggaggaggccgtgattttgtattcagtgagtcatgttgtagggaggaatgctactgtttgtattaaaaagtccttaatcatattaagaaatgaagaccatcccttcttagaatcacccgaaaagatgtgaataatggagaagtcactgtatccctttcatgttacacacctcatgaaccaccctgaaggagttcgaaatttagttagtcttgctgattcacgtccttcatttctgttttccaaaaagaacttcaattctggttcttttactaggttcgtaatagcttccatgaaccattcaagttggagcttagacactttgagaatatttctgaaatctacatcctcaatatggaaatatcctctttcaaaccatatgcagtaaaacgaatcttggattttccagtttttcacctccatgtctaaaactaattatcttgctagaattagagggtgccgaagtcagggagaagctgtggagtgtggggggaggagagaggagagaggagagaggaattaccttcccctctctttttactttgtttcattgtatttggcttaacttttttcttactttattttgggttatgttgttttggtgcttagggggtgtcaacctagttcagttgcccgggtgcaccttctgatcccctttgcttattgctctctaggcatctttattacactcattgtataactctcttgtactttgagttttattattaacaaagaagtttgtctccgtttctaataaaagaaccttcaatttgggattgtggtgatggtgaatggcatgaggactattttgctgcccatccaaagtagctcagatattctctcgcctcttatgttgggcttgaacatcatattgccattgccattgccgacccaaaaacgatgccttgcattcatgcaaggacacttgtgcacatctcttagtctctttcgtgagataagtgggtggtcggaacttttctacaatagcttcaccaaagctttgaatttccaatccttgtagctatattagttcatttacagaagatcctttctctggccttatgtggtcttcagtgagatgatttctttgattcatcttcactttttgtctttttgctttatgtcaatgcctttgtggattctaattagttttgatttgttttttattggataagatttctggccaggtttttctagttgtggttcaagttgttggctgctgttccttttcaagatttctctgaagttgggctttggttgtttggtctttcttgttttttagttgttcttgttttattgtatttgttttaagatcttgttgttttttcccactcccttttggaatttgtttccacattttcgaagttgttctagttaaaaaaaggtagaagaaaaaacctcggcaagcttgatcttttgtacaattttttttcttgtcaattaaatagttttctaactagaatcatagagttaagaaaaagaaattaaattagttaactcgtcttttaatctgcaaatatagttttttttctttttataacaatggtgttagcacatgatagtcaaccgatctttttattatatataaggtgttgcaaatctgtcatagtgggtcgttgtgctgtctcagttttggtggcttttggccatgttatatgtaaaacattattgatccaaattccacatgaatctaatgggaatccatttgatagaaatgggttatgaagttagtaagaacccttcgggatttttgttttgttaagcagtattttatttttgattggcttttgtacttttcagcccctttgtgcttgttctggtggttgttgttcagggctttttgactacagcggtgtggacggctattgttttgtatctttgtatgtttgtggtctttttggcagatatgatgagggtgctaagggggtgtcaatctagatgagatgtctgggtgcgtctattgatccataggctccttcttgtttttgatgctctttgtataactctttagtttgagcatttgtcacaaattttaataacaatgactggtctctttttcaaagaaaacaaattatagcaccaccattcgagatttgcatataccttttctagattcctataaatgaaacacgcacacacatgacgtaacactatctgcatgtacttgctggattttacatgtagaagtaagattttacttgaactggcggttgaggttattaatcttttgaattcaagtaatgcattttcagctcaattcaacatttcaagtaataaccaattgacatggtgtcaattgatctgttgttgcgatagatttgcattgaagattggtgtaaaatacattttgagacagtttcatgccttgccttgcaccaatagtgggctatttcatgcatctctcctataggattctggattctgtagtgagctcaacagaaaggtagggtgttcagatcatgcaacatagttttgcaaggagccatggactggcagaaaagatagaatttatttggttctagttctctttctgacaagcaactagcttgctgaagtttgaagaatgaaagtctcttgtgtcagttatatattgaagccatcaggtgcaattatcttaaggtatattatctatataatttctccatatgtttttacttggcaaattacacagtaaaaacatgttttagttgccatccattggtacatcgtgaaaagaagtattaagcacttttagttatggcaaatgtttaactatcttttctaatgtcataggatgtgaaagattgtcaatattattattctgtttccttttgaaaagaaaaaaaaatgtcataggtgatgtgaaagatggtcaatattatctatgcctatgtacttattttgagagaagtatttgcttttgatatttgggagttttttttttttaaatttttaaaaaaggaaacaagtctctttattaatatagatatcaataatgagacaatagctcattggacaagagaattatacaatgagcaataaaaattttagattagtagatgcacccatacatctcaacttggttaacaccatggagcgttatcatcatctccatagttacaaaatgaacaagttgggccatacaaagcctatacagccgtaaccaccaaaaacatataatgaaagagaaactagagtacagatgcaagacaaaagtactaaaggacaaaacttcacaaagatttctactaagcggaagaatttctcacgagttttgctgaaaataataatttctttcttatttctttgagaaggaaagagttccttaaataaaagaaacacccagtactagtaaggaaaaatacaataaatacaaagaacaaaacaacaaaataggaaatcaacttcaatgttgaagttcttttgatattggttggtagaaacaaattattctaaactttttttgatctatagttatttggctgtgtttgaattctaatgctctttctttagttgagatatgtttttttgtgatagacttctgaaaagttgttggctttctggatgtgtgaattttcatccattttgtggctttctggtttgcggattttcattaattatccaacgcaaaatatggtgtttggaattggaatgaagattagattttttgttactggagtggaaatgttttatctatcaatattgcttcgtttactactttgagttagggtggagtttatttttgtaactactgttcttttgctagcctttagctcaacaatggtgtttgtagtatcatggaaattctgcttgtaagtttgtcttattcttcatccaaaattgaggacataagtgttcaagctggtggtgttgaggcgcagtcactgacagcgaggcgagaggcaaggtgatgtgaggccatgccgctctgcaattacccagggcgagcacccataacaaaacaagctatcttcttttgttttcttgaatacaaatatcagtttcttataaaaagaaaacaaaaggcagcattggtcacaaattcatctgttgtggaagtgttcctcaccccttcctgcgttcccaccttcaccccttccccatacaaccggtgatttcctgcctgctcagggtgggtccctgcaggttaaatgaacatgtttatatatatgtcctcttgacttccttttttcattaatgaaagatgtttccttttttagagaaaaaaactagtgggtgtgcggtgttcgttcgttcgttcaaagccaatctgttttgttatgggttgtattttgttatatttgctttattttttcatgattagccatgctacggattatacttggttgtatgtgctttgtttatttcattgtattttgagcattagccttttctcattttatcaaagaaaagctttgtttttcttgtggaaaaatatcaatttgtcaatattttttttgaaatggaaacaaaacatcattgaattaagggaggatcagagatgcatccaaatatctcaactaggttgacttatctttagctctgacatccaagagaccgagattgatattaacaacaataagactgaactaaccaaaacaagaaaccgaccatacaagttaaaaactttagtcaacaaaaacaaattatgggaatcttggctgcaaaatgttaatgcttgattgttatcgagtgttgcaaaatgcttactggtttaggccctaacttggcatattagcagaactgtatacatgttcatcattttctgttattccaatgccaaccacatcaaagtaggaattctcccaaaaccagcagggaagtattctaatctgattgaataagtatgcaaatatggggctatgattcaaaaagtatgcaaaccttaggggctaactctcaattttcttttgagttcaacaatgtatatgtgatgagggattcaaacttcttacctcgagggtacatgctttgtgcctgttgggatctgcacagttcgacaggggttaaaccctttatttgtagaggattagtggctaacctcatcaagcaagaatgcaagatgacaacagggcatacaaaattatagctgaactaaactttttaatgaacattgaacagcatgatgctggtaattgctgtagctaactttgtattccgttttgattccatggtacgggaatctgagcttgctgctattctaaaagtccatcattgttgtcataacgagtgtaggaaataactcctatggctgtgttttatgattgttgagtttgttccatgggttagctttaatatcttgtaattttctcaatattgcagctatacttgcag

SEQ ID NO: 7673 - DNA, 4825 bp, Cucumis sativus
  Intron number 6 from transcript Cucsa.275240.1 (locus Cucs a.275240) derived from phytozome v7.0 (chr-ID scaffold0258 1; pos 92413 to 97237)
aataggtattgtttaatttctgtagaagctattggcataggtttgatattatttagcttagtgtggtttcttgttgtgctatgataaaaggaataacgtttttgtgaagcctttatttatagagtttgattttaaattgagtttatttccgtagttagttttttcttataaaaaaatgttggtagttatcttccttctttgagagttctgagtaagtgtaaggcattcccttactaactttagtattactgataaaaggttctgaaggctacaaaatacttttgagtacagagagcgtatcctctccttccccagactaattccaatactaaaagcctgccctaattaacactctttattctatttatcggctcatcactcctcactttcatacaagctagtggtccccccatgtaactaactttcacctgtgcatccctttttacccctcctagagtatttcagcagaaatggtggcctaacatcatccccagggtcagatgaaccttgtcctcgaggttgaaagtggagaatttctgttgaaagtctagcgatcatccaagttgcttcatgatcaggaaggcccatccaacttacaagtagctcagtgtcctgtgtttaaggatttcgacggaaccctacaatatccttaggttcagctattcaaagttatctgtcaatataggaggtccagcctgcattatctgcatttctcccacaaatttcttaagttgggattcatgaaatactgggtgaattgttgcttctgatggaagttctcatttgtatgccacctgacctattttttcaatcaatttacaagggccaaagaacgttgttgttagcttctcatttcgcttctttgcatttggcaacctgtatctgtcagtatggtctaatcttcaagtaaacctaatctccaatttcaaaagtaaattcccttctacttttatctgcaaactttctcatttggttttgtgccatttctaagtgttctttaagggcattcattgtaacatcacgatcgtgagcagttgatctaaggttgcatttgtagtcttttgatttccataagctatcaagggttgtggtggtggtggtggtggtctgccgtaaagtgcttgacaaggagtcatcttgatggagccatgtacatggtattgtgctggtattccgcccaatgtagctacaaagcccactgttttgacttctcactacaaaagcaacgcaattacgtttctagccctttgttaacaaatctctatttgactgtctgtcaggggtgatatgttgtgcttggatgaaggcttgtgccttgagatttaaacggttctgtccaaaaatggctcaagaaaatcttatctcagtctgtcacaatggatcgtgggaagccatggtccttgactactcccttgatatatctctgtctttgccatataaggatgtttgagaggtgggaaatgcccatatttgctaagctgatccaccactactagtatggactcaactttttccgattgtggaagtccttcaacgaaatccattgatatatcgtcccaaattcgttaattcgtgaacgaatttgaagtgtttgcagtaaccctgccggactcatagattctattttcttcttttgacacactgtacactgctccatgtatttcttgacatctcctttcataatttcccaatataattccccttgcaaacgtttgtacatatgtagaaaactcgagtgatcatgatacaagtgtaatattgctggaatcaatttagaatttcgggataagactaacctgcctttgtattgcagtgtatcttggtggattaagaatttcgaaatgtaatcaggatcctcatgcggttccatatggttaacagtttttaatccatcactttggccttaagcacttcaatgtcaactaagcatggaacactgagacttgctaaatgaacaatttccggcaatcatgaaagggcatcagcaaccttgtttcctggtcccggttggtactgaattttgaaaatgtaactcagcagtttggaaacccatttctgatattccagttggatcactctttgttctgttaaaaacatgagtgctttgatctgtctggatgatgaaatgttggctcaaatgatatggtctccatctttgaacaaccattactcttaccataagctctcgtttgtaaacagattccagacgagcttgaggagaaagtgtatgactgaaaaaagctacgggttgttggttttgcattagcacgaaacccaacccaattcctgaagcatcagactcaactacaaattgttgagtaaagtcaggcgcagtgtgatcatggcattttttagtttgttaaatgcctcttgtgcctcccacgtccactcgaacccccctatacgaaggagttaagttaatggtgctgttaaactcccatagttggcaacaaaacactagtagtagcctgttaatccgaggaaccctctcaattcttgtaggttcgttggtgctcggtattttatcattgccctcaactccggatctgcacttacacctctagcatagattaaatggcctagatattccacacattcttgagcaagtttgcatttgtttccatttagatgcaggggttttttttgcaaaatttggaaaacgtgcacattttcactaatatcagcattgttcagtgcttggtagtcaacacaaaatcttcattcgccgtcctttttcttgactaacaagactgggcttgagtaaggactggtactaggttgtatgattcctgcctgcagcatatcgtccaccattttttcaatttcattcttctggtgatgtgtgtactggtatggtcatacatccactgccgctgctccttccacaatattgatctgatgatcaattttgcatgatggtggaaattcattcgacatttgaaataacttagagatgtgcagttcatacaactcttcggtttgtgtatttggtaccagggtcatgataggaacttccggttttatacatctctcccaatttcttggtattttctttccagatttcttgtttgattggagggcatgaaaaatcaaattccttatgtggaagtttgtgatcgctttgcctcaatttcattattgaaaaaatatacagaatagaggagacgtaggcctaatcacgctttctaccggagaaggaagatttttagttttacaatttttttggaggagtggaattttgtatagaacaaatttctggagaaaaaattgtgagagagataggtagcgaacttttgttcttctctactctcaaaatccaccattcagagaaaggattgaagaacaaatatgtaaagataccacagaagtatctatgtatattgatgatcaacaattacaatatgaaataactctgtgattcaatgaatattgatcacggataacaactcaagtaaatgacaatctctaataacagaaataattgaacaaacagaattactcagacaaattctctcaaacaagaaaccatagaaagcaagaacaataatgaacctggaccctctgcctttccttccctcgcaaggaggaatgccgcttctcttcttcttaccaaaatcctcgatgcctcctcccttctctttccttccttttattatgttttgctaactaactactgggctccaccagagtggtccccatctcctttactttctcctacactcccacgtatggtattaatagtatttttatttcttctgctatatttaaaaagcagtggaggcctgacaaaattcgtgaggggagttacccaccccaatccctagctgcaagagagtaaatttaataaaattagctacttgataaagtgcattgtattcgttgtattacttggataagaaaccaaatctaatccaaatactatagacgttttagggtatcactctaacatgatccacttttatgtcgaccaaacactgttcaagatacaaaaaataaccttggaagaataagtaagacttcatgaatatcatttatttatgaaaaaataaataagacttttattcaattaaaatatgtttagaaaatgtaagtttacaaactacgaaatttatgatcaatcccaacaggacttttatttattctgaccattctttgttgtaatttgtaaaatgtggttctcttgcatttgttcttttttaagttttctgggagtttgctttgtttccatgtaatttgaacaattgtctcttttcattttcaataaaaacttttgtttcctttgaaaaaataaaacaaaaagtaataggtaacaaaatataaaaaatagacatgcaattatgtaaagacaatcacgaccttacttgaacatggtctgttccgtaggttgtacaagtgtatccttgagttcttatgatactattactatttgcttgcagctgatatgttagtcatgtttagtattactcgtgcctcctaaattcaacttcattgtagaattctggaaataactttaaaaacttcatattttttggagcgcgctttgtgtgtttttcgtaatttttgttcttggttgctctgttagtattatataatatgttaatgatagcaatctatatgaataataataagaaaaaagatagctacctttaatttctactgtagttattagttctatcattggaattttttcacttcccttgtgtggtctgtgtgccgtgtatgaatgggccatttgaaataatttaccaatgtacactgtttttttttcttcttttctctcttccaaattggagcaggaagctgtcgctcaattatcttcagctta

SEQ ID NO: 7674 - DNA, 1543 bp, Cucumis sativus
  Intron number 9 from transcript Cucsa.088660.1 (locus Cucs a.088660) derived from phytozome v7.0 (chr-ID scaffold0088 8; pos 931556 to 933098)
caaaattacttcttgacgtttctggatcagaagaggttcgttactttttgctatgataattatgatatttttgtttgcatgaattcctgcgtgctctcatggtcattctatttacctcattatttagagttgaatcgatactttctctaaatatatatggaaaagtataggattagtgtatgtgactaacaatcctcgtcggtttatcctacatctgtcaagttttcgtcttacaaaactagcatgttttttgaaaccttgtttaacttatttttctcgattcatcttaggtgagatcaaccactgaaattttgctaaaaaaataactttttcgattcttatcaattgtttttcgaaagctcgtctaacttatcaattttcttgagtctcgagaggattacatatcgagataccctaattatatgtcatatcttacataaattttcaaatcttgtagcaatagaattgcattcttagccaaatttttttaaaaaaagacaaacttttagaaactttctttttttttttcaaattttggcttgcctctcgaaaacataggcaagagtagatatcaaagtaataggtttaatggttgaagagactatttcgagaaatcaaaaacaaaaagttgtggtttttcaaagttcgtttttgtttttgatatttggtgaacataactccttttattgaagaaaaatgtaagacaagacactttgaggaattaaaataaatgaacttaggtcccatctagtaaccattttattttgaaagttaagttactttctgcaatagtttggatctttttaaggagaaaagtcgaattcttcatcaaatttcaaaataaacaaacttttaaacattattttttgaagaaaaacatttgacttgatttttgaaaacatagaatgtgggtaacaaaacaagatttttcaaggtgaaatgagtgtttatgactgtaaatggtttttaagttaatttgactgttagttaactactaacaaataaaaacagtggacaatctttttctgctttcctttctgcttttcagttttcccttttctcttctctttcaaatttctccccccattatgtgtgacgatgcatgaaaaaatcaattggaggtatataaaatttaccaggggaatcaaattgattgactattttttataggtttaagtccaagattcaactcatttgcaggttcaagagcagatcactacactgaaaaaaaaaaatctttaattttaactaacgaaatgaatcaaaatatttatagaatatagcaataatattaagtcctatttgaaactatgagacactaaaattttgaaaatattttataattctaaagctaccaaccagaactaagtttcaaacaattgaacgccacctaaactatgtgaagaacaagtcatcatcccacactaaacttgaactaagtttcatggaagcacaatggtttatacatagtcttcatggacttattacctcccttatctaaatatcaggtaccttaccttattgatcccaatactggtattaa

SEQ ID NO: 7675 - DNA, 2213 bp, Cucumis sativus
  Intron number 1 from transcript Cucsa.105970.1 (locus Cucs a.105970) derived from phytozome v7.0 (chr-ID scaffold0092 9; pos 406446 to 408658)
gtggaattgagtcgtatcctttgctggtgttgcaggtattcaatacaatccttgccttgagtttaaattgtttttttatttgaaagaaaattgaattaggattttgttggtttagtttggttagaaataaatgaaataatggtcgagacgaagtagtctgtgatagaggagctctgtagtttgtatttggcttttcttgtttttggtttccttttctgttttttgtttgccgttttttccttttttattattttcttaactatttcattttttctgtcaacaagaatagaaatcttacttaaataaactagtaagctattggagtcttttaaaaaaatatacaaatatttacccaatatataataactccaaaaacaaaaaagctacaagcccaacaaaaaacctaaagccacgatggaaaatacaaaattgatccctgattaattgtcacacaaaaattaaaaaaatgatccatgattaattctcacacaaagtgcaaaattaaaaaaaatgattgatgattaattgtcacacaaagtgcaaatttaactgttattttttacattttcatttagatttgactatcaaaatttattttaaagatttgtggtactatattggaaattttagattatcatttggatctgactgtcaaaatctatttttaagattcgtgttacacaattgaaaattttagattttgttattctttataattagatagtcaaatttactttataattagatagtcaaatttaaatgatttttctgtacatttgtacacaataaactttgaatgatcctacagtaactttgaacgctacagtattcttaaaaaaaaagacgaattttatggcttttaaattgggtaaatgaaccgttttacctaacatttttctaatatttaagaaaaaagttgaataataaaattagtctcgaatcttgtagtaaatggtttttcgaaaatggtttatttataaatatggcaggaaaatatcatttataatttcctttttgtgtattgataactaaaaaaatttaaagatagaaaaaactttaaaatgaaaaaagtctttatagattcaattggataccaaatttaagaagttgagatttgtttcaaaattgagtttagaaaccaaataaatggagggataaatttgtaatttaactttacacgtaatgattgcatagaagcttgcggctgtggatttagggaatttctttgttgacttgaacaagaagaagaaaaaaaaaagagagaattccattgacttggtacaactgatagctaatgatttgggaaataaacaaattgattttgtttagaaattttgcaatatgattcccttgaatcgtcagcttacaagtttacttgggtggaatgattaaatacaaaccacccagcaaagactttttgctttcaatatactttttattatattaatgatttaatgttttcatttccaaactttatttaattttaagacatggtttggtcatggtgggaatagggaaaagtgtaatatttattgttaagtttattttctgtttggcgtggacaacacaactatgtaaatatctaaatttcataattttgtaagactaaacatttgtacttttggcctaatatctttaaccacagtggttaaaggtcaaagataaatcatgtcgatcatgtaaaattatttatatctaaatatggtatatctactgtttctaaatttaaaatattcaacccaattaaatttctaccatatttagactacgtatactaaaattttgcccacactaactttacttaagaaaggttttctttaacaaaaataatttactttaaacaaacctactttttgaattttaccattgtaggacaataaaattcaaaccaaccaaaccaaccaaactttaattatttaatttatttgtttccatttgcgtaattattcatcattgttggctgtaaagtcagaactaatttttcaagtgaccttagtacttattacttccttgttctagaaattaaaacacactataaacgttactatgaaataataaacatttacatcaactctttttgttgttaatattttaatttattgttggtaggtattgatgagagtaattaattttaatttcaatcgtttctgaatttgggtttgtttttgttgtgtttaggtgacatacttcaagtgtgggggcgtttccctcgg

SEQ ID NO: 7676 - DNA, 1133 bp, Cucumis sativus
  Intron number 1 from transcript Cucsa.202100.1 (locus Cucs a.202100) derived from phytozome v7.0 (chr-ID scaffold0137 6; pos 243656 to 244788 reverse strand)
atttctgcaaaacccacaagcttgactctccattggtatactctccatctctcaactcaatcttttttttttttctcatttcttgcttttgaggagcatttttttagatgattatgaactgggtttcagcttaatcttgttataactttagtttttggacttagctctgtggttttgtagttgtttgttgtaacttgattatgatatctactgtttggttcctgagaaaatgggaaagaaaaactttaagctctgtttcctttccattgtgtgtcttaattgcctcaaagtgcatatggaaatagtttgggtctgctttacatgttggatctggaaaaggatgggtgaaaaagggcaaataaaaggagagtgaaagagagaacagtttcttttgagttccctacttcaatcattcttccttttttaaaattcatcttttttgttcaactcatttcccactattcttttccttaaccttcatggaaaagtgtttttaaggaagctctctctctcaccagtttcttcttttataatcatatgttgtgaagaaagagaggaaaatggccagaaaaagccgatagtgctcatcagctgcttttgcttaaagatatttcagtcatggaagattgtatgttgtatttggtaatgtttgcttatgtgagctgttttaacctaagatatctgcaaattctcagttttgtaatgccaaaaggaagctctcatcacagcttttccactacttttttcactataaatagttagccttagtagcaatattctttgaactacttcacttttctccaatgatttctgttaacttggctgaattttacaggatccttacaacttacatccacccttttcattcaaataacttttattccttatcttttcatcaaagaatatgttcacctgtttactcctcaaattagcagctctttttcccttggaacaatgaatttttgtttaaaacaaaacaactgtattttgcatctgttagatagcattaggcattagtttgattttttattgaattaaagtcagctgggaaagcgcctcttgtatctttatcactgacatattagtttttctaattttcatcattcaccttctttcttctaatgcagagcaac

SEQ ID NO: 7677 - DNA, 5438 bp, Cucumis sativus
  Intron number 1 from transcript Cucsa.263980.2 (locus Cucs a.263980) derived from phytozome v7.0 (chr-ID scaffold0233 0; pos 92430 to 97867)
gttcatttaagaagcataagcaaggttcgtttttctatattttaattttttttattaaaaacaaaaagcttttagtccatgctttgtatggttgcttataggagggaggagagacaaattatgtgcttggtcattgctttgttttgttcaatgtagggggagatatgattgctggtttctgtttattatccttttcttttcttttcttttctgtagttagaattgtcgcttttactgtcttagtggatcatcttgcatttgtttctatggattgttgagttggattacgagaattactggctccatgtgttcgtgcttgtggtttacccttataattgcgtttatccaattttatctttattgtttatttttctttgtttaaactagagatgactggaaatactcccttagcaagtggatctgcttccagtagttcaaggtggttattatttgtaggttatgcgactaagggaaaggtctgttatcactagtggtgaaataggaaagtgagtaattggacaaattttagaactatatctgttggtcatgatttttgggaccattttagggtttttggtcttcattgtcattctttaacaaagtgtcccattgggctcacgatcaaccattaatacttgactaatttttccagtagtctgttgggattgttgatgaaaaacaaagaatcggggaggaagataccctgccgtatacctcttgtcttgatgcaagtattctactccttggactagtagctagcatttctaatgcttgctttgtctcaaattttctatttgttgcgaacttgaaattatcgttaacagaattcctatcagttcaatctctcctttcttttattttatgttctactgaagtccttattcaccatttgggggcattcagttgtatgttgttttatctcttattcttggctattactttcaagccagttagtaagagataacatgtggcttttaacactctaggatttttgtgacttagaagtactggtcaccattcatcaacgtgcttgttatcatactaggagctatctgtaaaccaggttcttggtgattatttatgtactggcttggttattccaactgatacagtccatctctaaggaactactttcagcagaatctcccccgaaacttggtccttaaccacacaaaattcagggtgaaactcaacatgaacattattatcacgagcaagtttaggtacactaaaaagattcttggcaattgtaggaacacataaaacatcatttagtttcagatagtcattcttaaaaacaagattcgatgtccctaatcgagatataggcagttgtggaccattaccaacaataattcgctcattacctgcatagtcaactggggaattcaaggagttttgataggctgtaatgtgattcaatgcaccactgtcagcataccagttcagatttgccacaacttcaggattagcaacagaagagtttgcaactagggcagtaggattagtgtattgaccttggtttggagtataattcgactcaactctgtaatgagtttgctttggattattaatctccttgttaaagtggaagaaacagactcctgctgtatgacttaagttctccatacacttggcatgttggatgtctggtagacgcattgttgcaacgcccacgaccacggccctgttctctaaaggatgggtttgaatttttgaacatttgttttgattttgtcgattctgatatgatcctccacttgaatgggatccactttgtaccatagtaacagatgcagcattactattaatagaaagagagattagacaaaccagatttcaacctgagttgatactccagccgagcttcataggcaagcaaatcagactgcatatcagtccatgaaatgtcatatttaccttggactgatatacctactggatatacacttcatcaagccctgcaagaacctgagaaacaagattgctgactaaaacagggctactggcgagggccaaaccatcaaaatactttttcattcgtgtaaaatactcattcattttttactattctttgcgagaagtataaaaaagacatttgagatagtcaatttcagaactatattgcattccaaagagcacttgtacagcagcccataaatttttagaagtttgaaaacccattccattacctgtattgcaatcgcttgggtgattgagttgtatatccaacccaaaattaattgatcaagagcaacccaggcttcatattctgggtttggaatcttctcagttagaacaccaaccgatgcaaaggagccctcacctggagtgctttctcgattcacaactctagtaatggtcctacacatggtttttctccggtcagatgaccttcccaatggtagctgcctaaaatatgccaaacaagatttgccacagtggaaattctatccatcttgataaccgtaatttgattcaaaagttagttctgaggaggaggaccagatatgcactgggtgcagcaatagagctaaaggtagatcgacttgaatgagccatttgaggctctgataccaacttaagttccagagaagaagaaataacttggagaagaatttttttctctttcactatattgcaacttgtattttctctaatgaaatacaaaggagaggtcggtttaattgataaacaaagagagtaattacatgaataaagaatgaagagtattatcacagaaaactatatacgtgccaacatcctattgagtaaagcataacagactggaaaccgtgaagcttctatagaatggaatacccagatttggctgggagaatccatgttgcctgccacatgttgctgactcactgttttgactggtctgtttcttactagaatggtcctcaataaccatgtcattagatgagtaacttagcctaccagcatttttgagttatatatgcatcttaggagatatgagttgaatatggaaaggaaagtttgaagaattgtgacttagaactcaaggacacagttgtataacccatagaatagatcttgttcaagcaaggtcgcagttcaagaattatgactttaagaacagttcgtttgctaccgtattctaaaattttttatatcatctttatatatggtcaacaatcaagatacccttaggatcaagacaaaagttcaaaaaaaattttggctataagtttattatatccttaggttagtcatttggactatatagaaggcttagaatggagggttaaaatattttatctaccattgataagattcagttttaggtggggtttcccctccctgtccccttttatttgatgttgggtcattttgtatttattacaattttaggtgaccttgaaatccaactgaaacagtggacgttacccaattcatatattaagaatgttaccctacattaacagaaagctacaaattatttagtaatgtgttagttgcctaaataatttaaatgtaaagatgtattaaagtgttagagtaaaaatcttaacaaattataactgagaaagaacaattaatgttttgcaacagaattggagtccttatcaactgtagggagcaaatcgaagccatgcaccaagtttttcaggttcatatcttacctacctaaataagtacttgaactgtatattatctttccctaacgatctaaacttgctgtaagaatttaattgatcacgagtttcaaattaaagctgagtgattgtgcttctgaaaactgggaacacaggtataaactattactctaagccttcaaccaagggaataaaattttaaaactgaacttattagtgagttttagagttttagaaattttctcaattattacaaaactcggaggctctctttctcagttttcagcatattttgctctacagaagaaatatgatctcattctggttgattcaaacttagtttcatcatctttttttacttttagtttattagtattttcgtttggtccagttctattttattagctgaagtccattgttgcatttatctttataatgcagtttggagccttaatttcatctatatatctcttatctgaaaagagatgacttgtcttccttttccccctgtcacttaaacagttttacaatatgtttttagaaaacaactaaaatattttgtagaatagtcactttaaacagcccttcgttggaactgatggaagctgttcctaaaaatggaaaagaatagaaaatagttctataaaatttttagaataacttctaaaatattttgtagaatagtcacttaaacagtcttttgttgggactgattggaagctgtttctaaaagtaaaatcttgcttctttgaatgagaaagagtgaactgtacaatttaaatgttggtcgtggtgggtttttaaatttaatttttaaaacaaaaattaatattgtcgtcatcatcactatcaccatcatcattttttttttgttcttctatcctatcccctgtttaattcttaaaaatgatttgatcttataaagaaaagattttggtaacacgttgtggggaggcattgttctgacagtaaaagaggatggggtctttagcattaacaagaagttagggtctgatggaagaggatgttgattgctaaagattgccaagtaaagtgccaaagacaaaaagtggtcttttgggggaagctcgaatattatttccattctgtagagtcccaagagggtttctttcatcgtgttatctttctatgtcatttgttgatttctcttgacaagtttttgtcttagctgaaatattgtctttttctttgtaattctctatttatttatttatttttatttcattcttagtggatttggtatcttttaagcattaatctctattcattcatcaataaaaagttgcatttcttgtttagaaaaattttaaaaaataaataagatattccaggaggtttagggttatgatctatttgctaattcatttctagtggggctatttcttacaaaaaggctgtttatagtttctttttcaatatagtggatttctttttgtttgtttcgttctaaaagtttctttcttgacatggaagaaagttgtatttcaacacaaccctgaatatcatagatttgcaatatgcatttgtttgatgccacttctcaataatatacaacttcttgaagtatttgggcttttagcaagaggaaaagatgatattaccttatggcaaaagatatgcatgcgatttcatgtgaaattggatttctcttgtgtattgtttgtactgtctaatgagtggcagtctttagatttatgaatttctgtgggatcctgctttgatctttaccaatgtgttattttatcatcttggatttcagtactgctggttgcccatttggtgaaagctgccact

SEQ ID NO: 7678 - DNA, 6063 bp, Cucumis sativus
  Intron number 5 from transcript Cucsa.079090.1 (locus Cucs a.079090) derived from phytozome v7.0 (chr-ID scaffold0079 3; pos 1673095 to 1679157)
gggattcccaggtacttgaatttttctttctcatcatccttttggtccttatggaaagctaagattccaaatgtttgaagtagtgacctatatctctttagtagtggctgaaaactggttagagtgctattataggcctgggaaattgtcttgaaagaaccagaagaaaagatagtaacatactcccaagccaaagtaaacatagctcaattgacatgaaatgtatactttcagaggtttgaatccctccaccacatgttgaagttgaaccaaaaaaagaaaaaactccttgtcccaagtaacttgaggttgttagatccacttcctttttcaagtgtattcaagactaaatcaccacaacttggctccttcccttaacttgtgatcacaccagtaatagaaagtagtctcttgacatgcttttaacaaactacctttctaatgaccatattaccctatgtctactcatttcagattgaggccaatatttcaatttagtagatggatgttggatccaaacttcccacaaacttgccacttgtagaaaacaatgccacatctttctgttgaaccaataattaatttttttacaccataaatgaataaaattgatgactaagaaaacattgatgacctgaattgcagaaaggactttggagacaacttgtccaatcaaacacttttactttttcagggcagctttctttcaaatgccagtgcacaaatgaccatccaaagttgatgtaaaccaaatgagagaattttattaatgtttttgaagttgtgaatacgagaagataactactctattgatagaaaaagtaaactaatcttaatcctgatcctaattaataaaaagacacttaatcctaatcctaaataatataagagactaaatcctaattctaaataataaaagaaactaatttcaatcctaataaattaaggatttgaccataataccttatttctaccgcatcaaaagctatttcacccttgaacatatatgagagaaggatttgattgaaaaggaaccatttgatcccaacatctaagtaaatctgtaacgtctcgagtttaggaggggacatgaataaactgatatcatatctgaatgagagggattatgaggacatgaaagtaaggttaataatgggttaaaagaattgaaagtcactactggaataattttagttgggtggccttttaggaattttcctaagatgcgtgagtgaggacaaaacatgctgaaaggactagtgttggttcgtgtgacaactttcacactaataagcatttaaaagaagtaaatacgatgttggcaggtcgtaggggacgcaagggaatgttagggccatgagtttccgaatctgaattctaaatcctagtcgaaatcctgggcttggggcattacaaaaccttacaatcatcgtcatctcttagcactttgccacttgaccgtttccaacaacttcaacttactttcctccctttcttttaagatctttctagttgtggtttccatgtatggtttgagagcttgtgtttctttttgtttggtttccattgttctctttccaatagggaagcattacatgtggcctctcttcttgttttttatgtagcctaagtagcttctaggagtaatcttctgaaagtcaagattgtggatcttttattaggatgacaatgtgtttcatacaagagcaaaaacacctatttatagagttttacaagaatttacaagtgggagtaaaaagggaattaacttagaatattatctaattactcaattaacctcattcttgtttacattagttttacttggaggtcccttttttaggcatgggagaagggatgtgagagtctggagacccaatctttttttcttttctttcttaatgctcaaagtacagaagaattatattaagagtgaaaacaacgatcacaaacaaaagtacagacgaactgatcaaaacatcaaaattgtgcgcaaacaacagaaaattgagaacatagcaaacttaaaagtctttcaacaagaagcccaaaatctgctgaaaattgaagactaaaaacttcaaaatggatggggaggaaacacaaagggagagcaaacaaccatgcagtttcaagtttgattagaaaaagaaatgattcagtgactgggaagctttgctagaatctttcaaccacaaaaaagtgataaactttaaaaaaaatttccaaatggaaacctctcttatgcccactgagaattgttgaaaaaatatgcctcctaagtcgtctttaaatcttgagtgagtgagtgtctagaaccagaatatttcagaactttagagggccaaaatagtagaagcatccgtcaaacctctcgtgatccactaaaacagacttaaaaaataattggctgaaaaaacaaaataaagtctaaattatgtactgaaaccaaaataattccacatttctcaagattgacttcaagtgatctgaaatttcacagtgcttggcttgtgagggaaataaagaggcctgcttctcagtaactaaatcctcctctgtttgaaacatggtattaagatcagattctaaaggatccttaattgactggtcgtccttctctgttgtctttggaaaatgttcggctttctcgctgctcacactagaagaagagtcacaatctgatgcactcttctttttcgatgaagagattggagtttggctgggagaacctctaaaaatttttaccttttaattattcagagagaaaacaagtatttaaaatgacgatggaactctgaggatctgagaaggggcttgaattagggccaatttgcctctaaaaagtcagaattttgatctaaaatcaattttttctttgtaaattttttaggcctccgttacccttttccttttagcaaaatgctttgggaaatcttgaagggatgtgggagaatcgttgattttggatgtcttttagacttagcctttgatccagatttggcctaggatgaaagggaaggagaagaaagagcaggggaggaacagttggaaattggagcttttccggagggcctttaagtgggcatagaaccggcaaggaaatggtagcaaaaggctttgacgaagcagaggaaagtgacttgctaagggaggaagaaaaagcgacaaacacttcaattgacttgccttcccagctgtaccaaaacttggataaccaatgggcaataaagaagggtcaaccgtaatattctctttcctttctaaaagcttctcttggacttccttcgcatttttcctttcagtttgaagttctttttcttttctatttaattgtggctctttaatatcacgcaacttttgggatttcttctaagggcatacaattgatgaaatttgaataaggctttttgcaccaagtggatgtgcgacccttggactacttccaagagctccaagtgccgctataacctctctcttccaaaaaatatgagtctgatcgtttcctctcgataatcgtcggtgggaaaaaagttgtcggggagtctctgtttttagttttcagtgggatctgtatttggttttctttttgaagcatcatagaaaaagacgtaaatggatttcttgaagaaatttctaggttgcaaggggtagcttgacaagtccattctaaatttgaacctgaagaatctaaatcttcattgttgaaaacttgctttagacgagccaagtcaattgggttggagaaatcttctataaataaagcaccttgaactttcgtcggggtccaaacattcaatatctccaaaattcagaaaaatgttacctcttttttcatatgaaatttctatagtagacaacataaaaccacataaacttttctgaacttgaatttttgcttcagcaacattaacaacattcaatgtttcatttgcaatagatactagtctgaacgaataagacccaatagcttcaaaggtttgcctgctctagtctaaaggtaagtttttaatcgagatccacccgccataaaccttcaacactgacgactatcttgccatttcctcgggtattcaactagatcgtccaactcaccttgattcaaatggattacaacactttccgcagacaaaggattgataatgacattagattcaaagtataattttagtgtgctagctatttctgtccattcattgaactcaaacagtcttgtaacagttcaaagattgttgatctactcaagattcttgataatccaataacggctcatactctgtttcttgtactcattggtttgaccttctctacagaactattcttcaacatcttaaaagtttagtcctcaatcttcttgctgctgtttgatgacctcatttgggatgactaacaagtcatgtattcatgttttgacttgaagcctccctttttagaggggttttcgtgttaatctttctctcatagtttggttcatcatttttccgtaggagcgtcagtctttttggttctatggaggattaaggttcctaggaaagtgatgttctttacttggaaagttcttcacggtcatgctaatacgacagattggttggcgaggaagtaaccttcgcttgttgagttcttctgttgtattctttaccgaaagatggaggaagatctggatcatatcttttggcaatgtgagtatgctagttctgattgggagctgttttttcagacgtttggtttctctttggctcatcagaatgtttttaggagtatgatcgaggagttcctccttaattcgctaggggggagaagggtcgttttttatggtatgctgcggtatgtgccttatggggtggaagtgggaccgtgtgagatttggtctctggttcactatcatgtttttttttaggcttcgatttcataaaccttttgtaactactccataggcattcttttgcttagttggagtctcttcttgtacaggagtttctctttttgtgggcttggtttttgtattttgtgcttctattctttcatttttttctcaatgaatgtggtttctatataaaaatatctttttggttgtggaattccaactcgttctttaatcacatggttcatttactgattggaacttccttccatcatcccatataactaaggaaatttaaatgccaattaacacttgatccatccatacattttccgaaaacctgggtttctaaggacaatatttctcatcttttggttggtccttctttatcttctagagctcagattttatggtcaaatgcagttaaagttttggtttctaagatttggattgagcactatcagagagttttccatgataatttcaaggattggtcagacagatggggttcagtttgtcttctagctacttcttggagtttgcagtccaaactctttgaaaattactctactcaggatatttgcctcaattggattacttttatttcttctatctaatcaagcattttagatgtattttaatttctgaaatcttgttttgtattgaatatgatgatggtgctaaggtttgtgttaacctagttgagatcagggtgcatctcctaatccttagtggtttatttggtttgtgtctctttgtaatttgagatttgctcttttcattgtatctgttggtgatatataattaaatttgccttcaaccactagcttaagcttttgggtgaattgatggtttaacaatgaaaaattctgtttctgttttataaaaaaacatatccaatcttcacttagagaaaaattttgaaacaccttttatttcctcaaaaacatcttctcccaccaaactttgtttcttgtaaaatccagtttgttgataacatgcatcgtgtccttctctatgcttcattgtaagaaacctcttctgattatttgagtagtcttggtgggtattatagccgctaaaatgttttattgatgtttcacatagttgtttagactaaagtagtattttcattccatcttctggattggctaattaaaacgtatattataaaacatatgatgcatgacaggagaatattg

SEQ ID NO: 7679 - DNA, 1533 bp, Cucumis sativus
  Intron number 14 from transcript Cucsa.388070.2 (locus Cuc sa.388070) derived from phytozome v7.0 (chr-ID scaffold039 67; pos 521739 to 523271 reverse strand)
atctgtcagtatcttattcctttacatacaagactgtcaaatccatatatctgtcacgccttaagtttttctgtgcacttgaataatattcaaaagaagcaatggaagtctaatggaccaaataaatgacacgtggccatccatacttttttcaaaaaaaaaaaacctacaaaagggagggccctaagggaagggtctcctatcaagccaaataagatctaatgaataattacaaaaataatctgtcattgatgcctagagagtagagagaaacaaagatgtggtatttggccccaacttcaagttggtggagtgggctattatagcctactccatatcctttctccctctttattttttattatagtgtttactatttactactcgtaccgaaataaattgcatcccaaatgcagactatcgtaaccccaagttaaaataatatggaccctaaacacagactttaataaccaacttagttctccactgaacacaaactacaataactaacttagctctccactaaacacaaactataataaccaacttagctctccaaacgcttcttaaaattcacaagggaccacacaacaagaaggtccctccctatccatctaaaagttcgttccactctcctgatacaccataaaattgcacacactgccatccataaaaatatccctttccccttaaaaggcagatggaggaccttcttgatcatatcacctaacaaccacgtggggataacttaaagccaaacatcttcaagaaaaacttccaaatagcatgtgcataatcgcaactccaaaatagactgtccagttgttcctccgtcctttgacaaggaatacaacaagaatgctcaacaaatgacagttggtcactggttgaagactgttggtgaccatctatatagtcttgaaatctagcattggtgtttgaagagtgttttccaatataattcatgctctgacggctttcacaattggagaagctgttgaaatgaaggtcaagatatggtgtggagctagcctttattagctgaattttcaagtaagcaagaatttttcagaaaactattttttggacgtgtatacaatttttagaacgcagagctagttgaggtaaaaaaggattttcattgtgctactgtcgtatatcgtgagtataagagattatggacttgatacatgaaaaaatctggtctattcttcggacttccacctttaaaatttttgtaaacttctaaaatttcttatgacctaccagtctggattgtgtgttgtatattggtgatggccacatgctgagttaccatgtgctcttttcattgtaagaattgtccagttttgaaagatcttatgaccaaccggtctgctttagattttggttaatgtgtttcattcattccatattcctttccatttcatgttttttttatacatatgaatgctacttttatttatcaataaatgactctttctattattaattgtaggtgctctcttattcaaagtttgcagcaattactct

SEQ ID NO: 7680 - DNA, 1433 bp, Cucumis sativus
  Intron number 3 from transcript Cucsa.311350.1 (locus Cucs a.311350) derived from phytozome v7.0 (chr-ID scaffold0299 5; pos 979516 to 980948)
ctcagtaagccagttgtgtattatcttctgaatcggtatgttctgtaggctttggaatcaggagcccattcttgatcagtttctctagatctaggtctgaaagaagtattaattttaccatgtttttacttttagcaatattatcattgtagtcattggaagtcacagccatttagttattacatatgttttgaaatttaaatgatttggggtctaaacagtaagagggttgggacttcgacattatatttagtcattggagatcatgacatcatatctacctctgtgttctaagacattctttatggcttttcttcatgcacttgcagatcttgtcgtttagtctattgggttacactcttgtcatttgaaacctcaaactttattcataattacttttataaataacacatttccctagaactttatcagtttgtagtgcaaggttgttctatgaccgtgttatttttctgaagggtgttcagaacattaattttttcctaacagtcttggccatagttttctgctaagaagcaccgacacttctaaaatggcacttgtttgacaccgacacatttccgagatgccagctggtgtgtcaattattttattattattttttaatttcggacacgccccaacacggttgggacacaactgggacatggaacctgcagatttggtaagattttttttactaaaactaacattttaaaaggccaaatgcccagcccaaatatagaccatcaaccccacattttaggcttattattattgtctctggcctttcttttcataaaaaacagacctcccacatccacaatatccctcatttctccacgcccaaaactccacctccaaacggtcacaccccaacattcacatctaaaccttcacttataaattcatgaattctatggtgtttaacttgttattttgatgttttcaaatgaaatattttccaatatgtttatatgcacgacatatatttaaactttttaataaaagaataatgtgtccccaacgtgtcatgttctacttttttgaaaattggcgtgttggtgtgttacgtgtcggtgtcggtcttggtgcttcctatgttttctgtagttctgatcttcgtaatgatgtaggtggataatcgaaacttgggatgctcttgtacatttttctcattgcattttatcaagggcttgctttagctgttaatttgtcattgcataatgtcatggttcagtagaagtttggtagtacgagataataactttagaattgtattgattgtgttgttttagagtctctaagctaatttatctattgaatggttcttatatatgcattctataatctgtgagcgctgagaatttcggagatagaatatatatcatacttggttcaaacaaattgctatgcttgcaggatcaaagaattta

SEQ ID NO: 7681 - DNA, 1534 bp, Cucumis sativus
  Intron number 1 from transcript Cucsa.397200.1 (locus Cucs a.397200) derived from phytozome v7.0 (chr-ID scaffold0414 6; pos 43147 to 44680)
gagaagatctatctcggcggcaaggtttcttttcttttctctaagagttaattaatttcttccattttgtcatctgggtttttctttgatgcatttgtttgtggtgtacttgaatcggggttttcttttcttttttgttggttggttttttttttttttttgttgttgttattgctgatttgattgggtaaatgtccttgttttttttttttggttgtgttgtggggttggggattctcattattggtgaaatgtcttatggcattctataggtttgtttggatgtgaagaagaagaaaaaagtaggaaattatttcggggattataactttttctactcttgtgtttcttttccccattccgatctggttcatttctgtggcttgattgactaagaattttccattttttggaagttattaataattaagttcaaacctttttcccaaaagttcattaattagctacttaatgggtttggttttgaggttactttcttgattcagggattggtgttttatccctgctttgtttttaaatgcaagatgtgataacgatgggctttgtgcatttcctatttctggcttttggggttcttttttattttctgatcctaattgttatgttctcttttttgggttttattatgttcaatttcgtattcaatttttctttacctcttttgatcaaagggttttcacctggtcgagcttttaatgatggttacaacggattggagacatcttatttatctttagtttgtgctttttaatgatctttaattgttctgtttggggtatatattgattgttcgtttgaactttccagttatcaatggcttatgtacacgttgttgtttgttagatatattttccatttttttccttcttattcttgctctggtggtattttatttttaagtttcttttgtagattaagattgtttctactttttgacctttttcttattctatggttttttattttattcgttgttatattcatcccttgtaattgtggtactgctcgttgataaaagcaaattgcagtctactgaataaaccatacctttgcctacttttctgcttcttttcttctttttgtaatggaactttatttgtattgacaggggtagttgcttgtttatcttggctgttgtcataatttttttaagctgttgataatttaaatgctgagcaataaatttgttatgcgcactacttttataaagtttatactaagttgaatggacaagttagcttgggcatcttgaaaggaaatgcacttggactgttctttacagatatacttggctggaaatgttggctagttgaacattattctttcctcaaaggcttcctttttactcatccatagctcatatggaaataatatgtgattagaacaatggacaactacgagaatgtttcgtatcgatgttcttcttgatttgagtgtttcatttcccccattacttcttacacgtcatcttactgacttaatacatgccactcatgttattctcaggagcatc

SEQ ID NO: 7682 - DNA, 726 bp, Cucumis sativus
  Intron number 1 from transcript Cucsa.103100.4 (locus Cucs a.103100) derived from phytozome v7.0 (chr-ID scaffold0092 7; pos 1989059 to 1989784 reverse strand)
ggttgccgtgaaagagataaagagaacattctgaggttggccttttgtgtttgtgtagctgtggtggctgtcaaacatgaggcacagctcatttctttgatgggttcccctttatctttacctttacctttactttttgctgtttttctttctttcttgtctctgtggcctgtggggttctttcacaatatcgctcctcgcttctctcaacaatgtttctgattgttgtgcccatcgatatttgattcttcgtgtttgataatccacttactcctctttcgtccttttgtaggtactcatgcatttctttaacttttatcttcttactgttgtattcttctctttttctctatgccttcttttttcacttacacccctccttttgctttcctctgcttcatttcttctttctagcctatcccatttccccttttgttttcttttccagagattttccaaatcgattcagcttcttcagctctcacttgtttggtaactcttatttttgtgtcttccattcgttgaacctgtgtaatatcttgattcgacgaattttcataagggtttaataaaaggatccatgtgattctcttgatttcttcttctcaattttagttccagtcctcacttgtaacaaattgggtgtgttgtgtctatattctcaacttataatggatgtttgtatttccagtttcaggtgttgagctttctaatccaagtggagaa

SEQ ID NO: 7683 - DNA, 2026 bp, Cucumis sativus
  Intron number 1 from transcript Cucsa.176580.1 (locus Cucs a.176580) derived from phytozome v7.0 (chr-ID scaffold0122 5; pos 770014 to 772039 reverse strand)
ttttggaggctctcgtcattgttactccatttgaggtcagtttgcatctctcgctctctctttcgcattttcaactaattagctagaattcaaccttcagtttcatattcgacggatttgatcatagaatgattacttgttatttttatatcatgatatcttttgatgagcgataatgaaatcaattcttagaattagaaattgaaaatcgttagctctgaaagttggtctcaaggttgagttgaggggcgctggttcttctctttcacaatgggaaaccatgtcgtgtacgatagttgacgatgaaaggacggatataatataatataaacaccttttgctgatttttttaatggtgatatacctaaatcaattttaaatgctcattgatggctttgttttcaacgaaacacatgggttttataatgacagaatgagattccaaataagaccctccatttgccttttcttgccgagccctatatataataaattacttggtgatttgttggggctggtggtgaacagtgttcttgcccttttaactttgcgaatatgtatcaattagttttcgtaagggtcagaagcagaacggagcccactgctaccgtaccctctctgaacttttagcattttattattttctatatactgatgttttagcatctggacttaattttacgtttctaagttcacaacattagaaaattgttcatagtcataaactcacagtcagaaaaatagagtaggtatacatttggacaaagtttgattcggacagcagaaactcttgcggcttcatattctctaccgaatactccattcgtcagttgtttcttttttcttttttttttcccatgagatcaacatttgagagtcgttactcaagcatgttttagtttttttagaaattccagtttctttaccactgtcaatggtttgcgttggttgccgattctcttcatttgggtttaagcctctaagttagggtaggggacagtgctaaatggaaatccataaatgttattggtagtgaaaccaaaaccccacatttcaattttaaaataagtgatttgattggtatgatccatggattaatcttggatgcattatattgtataaaaaattgtgataagaaccaaagtttcgaatttgataggaaaagggaaaatactatatatattagtaacgacaattatttaccatagtatgagactttggggtacaactaaagtaaaattgtaaaatcacgtggacacatgttgaaagtggataacattgtaccattgctaatccggtttttgaccagtctatagtggcaggtgggacagtggccaaaacgaatttgacatgtttgcagttttgccaatttactatgaaactctcaagttttccattctctacatcaaattgatttattgcctagttagttggtaccgccactcttcgtcttactatcttcttattattctccttgcaagtcaaaattcatcttttctatttcttttgcatcagtgatgcatcccttttacgtaaatgtaagtaacttattaaagtagaagtttgcgtcaaataaagagttgcacaattattttgtatctcgagtaaatttgcagagggcttcaagataaagtcggtaataaaaagatgttgggaagttagattcaagttcaaaagtttgagtaagaagaacattttggcttaaaaaatgaattatttacctcttgctcctgtccatacaccacactgtgctgcgtgctacagataaattcgagtgtcttccatctcaaacttttgttgttttttggttttcctggtcaattgaagagatttttctgcctcatctaaacattatgtaataaggtgtaagcggttcagcttgagttgatttgtttggtaaattttgttccttttcaacttgcaccttattcatgtatgtgcaataaaaagaaccgtatgatgtctaacatattgttttgaatattgcttaggtggtgaaaatcagattgcagcagcagaaagggct

SEQ ID NO: 7684 - DNA, 912 bp, Cucumis sativus
  Intron number 23 from transcript Cucsa.311690.1 (locus Cuc sa.311690) derived from phytozome v7.0 (chr-ID scaffold029 95; pos 1236743 to 1237654)
gtttcgtgtggttagtttttcccttgccatttcttgcttctaacttcttgttactttacttttcccaaaattgaagtctcaagaatcattcatgcacagttaaaaagacactcttggtctctaacctttcatagaaataacagttcagtttatgaactttatttgacaatgatacagtttagaaaaactattttaaataacaaaattctgtaaatgtttacgaatataacaaaatatcacattctttgtgtgatagatcacaatataacaaaacatcacaatttttgtgtaataggccatgataaactacaaatataccaaaatatttttcatcatacattgacacaaatagtagtctattttggtcaatcgtagatgggttacgatactttgttatattttttatatcatttttctatatttgaaaataactctttagtttatgtaattttaaaattttaacaatatagtctgaaaaatcacatcaaaattaagcctcaacttttatcacgtaacaagttggcctttataatttataataaaattgatttccaattgatttatcagtctacacaactaagaaatttcattaaatcataataatatttttcaaccaaatcattacaacttgtcaagtatatagactaaattactattaactaaagtttattaactaaattgttacaaatttgaaaatacatagaccaaatcattacctaaaaaagttcgaggaaaaaaaatgtttattaacctaccattcgaaactcattatacaacacatcctgcaagaaatttagctcggtagaactaaagttcacattttaatgcatatttttcaaacaaagttcgtaaatgaaactttgtggcttttctaatttctcatgcaggtggacaccaatctggagtctcccc

SEQ ID NO: 7685 - DNA, 1442 bp, Cucumis sativus
  Intron number 4 from transcript Cucsa.103420.1 (locus Cucs a.103420) derived from phytozome v7.0 (chr-ID scaffold0092 7; pos 2219219 to 2220660)
aggtaagtacttatttgatcagcatttctgcttcttctcattttctcaacgggtggtggtacgtgtggatgttcatgtttaaacttcaaaatcttcgtattactgccaagtatggatggacgaatctcttggtttatggggaaggaattgaatcaattggttatatgctgatcaaagagatatacaaaagaaagggaatggtatattccgacaaaagcctgggggttacaaaaaggcctctcaattggcaaaagtatgcaataaatcataatgtcaaaacaaatttgtgagaaaacaccatgaccattcactaagcgtggagccaaacaaaatcccataaaccagctgaattgggctctgacctctataaattatatgttattttccaaccatatgcaccaaaacgctgaacacatcgttcctgtaagcaactgggtgatagagcacgaagaagatttttgtaagcttcagccctaaaacagagagcatttttttattcggcagtgagcatgtttctctgagtctgtcttgcaaagagggcaccagttagtggagatttgaaggttttgcattcccctttaatgtgcatcactgttgtcaagtttgccttgggctagaatccttaggtacactttcgctcttttggggattttggatttccaaatctctctatactgaccatcgctcaagtccttgtgtttcttagatcgaataatagaggctgagctaactgaaaatcatatattttaagtggtaaaaagagtttatcagggcattttcgtttagggtttttcctctaggattgctacatgttgttttatattagtcattcgattttagaatcattgaaggagaaaaaaatacggaatgatactcggtgtagtttattccaaggagtgatatactctatttcttctcagaaactttcttttagataggttgatgttctagggaagaaaggaaagagaaatataaggaaaaatataggtgcagtgtagatgagtgaatatgcagtcatggaactatggaagcagtgatacttgcatacttaggttcaacatctgtctgtggtctttggtggcaaagcttttttggtagttatctgttggatttcgttttacttgattgtgggccccttgtttagattgtctccttttcattatgtccttgtatacctccctttcttctcaatgatagtttggttattcataaagaagaaaaaaagaacacgggttgaagattctgcttagagatcaatgttgacaggctaactttattttctttcttttccacttgtttgaaaaactttaattctaggattttaaatattgaggagcttcagtttctcagtattacactagtaataaaaagattattataggattaagtgttggtagataaattgttatatatttgttttcaggctgatttgctattgtcat

SEQ ID NO: 7686 - DNA, 628 bp, Cucumis sativus
  Intron number 2 from transcript Cucsa.031540.1 (locus Cucs a.031540) derived from phytozome v7.0 (chr-ID scaffold0042 9; pos 580211 to 580838)
tgaggagattcttctcgagcgccctcgtgctcctggttcgttttcaataaatcttgattttggtagttttttctatgtatcaactattatgttataatttggttatagagcatgtcatttgtttctttgtggagtcgaggaagcacttactagacctggaggacataaggttgttcttatggttacggtggtgattgagctatgtaaaactgtggtccatgcttactggagatgtgtaaacctttttagtttgtattcaaaacgaggggagagaatcacttttgtgtgaagagagtgatgggcttgcagaactatgctgtggcgtgtgttctttttgggaattacagggctgtcttgtgaattgggtgcttcaaattatgatttcattttctttttgtatcctatgtctgtaggatttattaagccggagaaatttctccgggcctttcttttgatttcttagtttgaaattttgcttgggtgctgctcataaatattgtttgtacagttttgatactctattctgctcaccttaatcgatcttcttgccttgttacaataaattttcttttaaagaatgaaaatgattacaggtagcaaaccagaggagcccaaggttgctggtgac

SEQ ID NO: 7687 - DNA, 600 bp, Cucumis sativus
  Intron number 4 from transcript Cucsa.136280.1 (locus Cucs a.136280) derived from phytozome v7.0 (chr-ID scaffold0104 4; pos 940162 to 940761 reverse strand)
ggatacaactggacgcaaccctaaggtttggctcgtctatcttgttgtaaatatcatgacttgttacttatccataaaatataaaaaattgacttggaggtattatatttcgtgtaagtcttcaataaatggatagattctgttttgattatggtttcttttgctattcgtaaggacttttttccagaggatctttaaaacctacccaaacaattcctagatggatcagggggacaaaaatgaaatttccgttgccttgattttttttttcttgggtgtggtaagaatggtcgatatttgttaatggatgtcttctcagaattttgaaatagaatcttctattcagtacttggaagtacgagtaacttcttaaatccttttatttgccttctagtacgaaatataatattttgttttaaggttctaaccataatcaatggctttaatttaatttagcatgcctcgttatatttcattctattctttggattttatgtttcacaataacctttagttcatgaactttgttgccataatggagttgcatacttctggtcttgtttagatttcttggcagaaacaacattctgcaccaacggc

SEQ ID NO: 7688 - DNA, 8950 bp, Cucumis sativus
  Intron number 2 from transcript Cucsa.084950.1 (locus Cucs a.084950) derived from phytozome v7.0 (chr-ID scaffold0086 2; pos 617718 to 626667)
aaagtccttgtctatttctttggaacccagcagatgtgagtactcgattcattttcaatgcttctaacttgagttatttggaacgttagttttatattagaaaaattccttccaactttgctatcatttgaaattaacttttttgggggagtttgttgaatttttgtgtttgcttgttggcctcactatttatggttttccgttctattgctattcttattggtacaagttattattagcgatcattttttatatgttcaccatcaaataatttatgttgacccttcactttcctttgatgtggaacccatcacatattaatcgattagtaggttaagaccaatgaacctatgtgtcaaaaattgaatgaatcaaacaagcataggttataaaggataagaggaggacatattaggctcaaaggggaatatgagtttgtagttgatggagatgagaagatttggaggtagaagtttggagtgaagtaagttcttgaagaaggagattgtcatttgtaggaagttattttatggggtgtttattttctgggggtatgttgaactatatcttgtttcttgttacagatgatggacatgttctgttgggaatagagagatggagtgagtgatgatattctttttcttctttgtgcattcacaggctgttcatcgacagtttagagtggcttgtttagttaggtagcctgcattagggtgatgtgggtaccagatctcgatacctttcactttgaaagagattaaagatgtgcttagtcttaagttaagactggttcattggcattctcgacattcatcaaggataatggaatgttatttagctaaatttgctttgggtgtttgccccctacccctcccattagttccttgttcaaaaaaatttactgagttgtttgtagtagtgacacgtctctttctttttgttgtctattgctctgagttaattatactcaagggaggacaattatagaggtgttcctgtcattgaatcacaggctcaataagtttccaactatttattatgcatatgctcgacaaattttatttgttatttgtgtttttgagtgttcaacacaagtcattaaaaatgcatactatgatactatcaagtaccatctcgttccttttagtggaggtcccttggaagtgatcgtgtaggttggattgcaattagttttaaataagagagggcctctagaactttggagttgttcttaagtactaggtgtttagaccaacctttcattagatgcttggtgtaattattgagctagctcataactaatagtcagaagtgtatatttccaaaaacctaaggttcaactttttttttgaaagattttttttcgtggattctggatcaacttttatttttatcatgtaacttctatgaaaaattgtcattttgcggataccctcttgcattaaggaagcttgccctttcgcttgtttggattttgctgatctttgtttgatagggaaataacggaggttatgaccttcctttctttactagggaggttgagtttagataggggaaatgacttttttgcatttggagtcttggcctttttgatgttttttcttgtagatcacatttcattctttgcatctgatccccctcctctttcagaatcaattttttcatttctttggaaggtgaaaattccaaaaaaggcgaagttctttgtttcgtaggttgtgcatgggagaatctatacattggacaaacactcaaggaagtttccgtcattggttggggattttcactgtttactttgtcaattggtgaaggaagagtttgatactttattttggagttgtgactacgctagtttggtttgatatttgttctttgagatgcttggttttcagttagcccaccatagatctgttggtgatatgatggaggatttctttctctagcccctctttgaggggcatggagtttcctttagatggccagtgcgcacgtgttgtttcggtgtatttaggaagaaagaaataatattatttttagagggattgagggaccttcttgatgtacgatcccttgtaaacttagggggtgtttgttggactgtagtggaatagaaatgtaatgttatgtaatcgaaaacccatggttggatcgagcgtttttgggctcgaattataatactaaactcattctgttcccacaatttttaattcaaccctcttctccactattttcttgcttcacgataccatttttgttctgccctcaattgtcatacatttcgacaccccctctgcttttcagtaattctgatttcattccaacttccccaacaaccctgcaatgtttctcctaggtgtcaatgacaagttctttaggtaattattcaccatactctaggtcttattttgttagattagagatcctctttttagggtgctcccttttgtggagttcattatttttttttcgtgcttgtgttttctttcattcttctcaattcaagttgggttttataaaaaaaaaaacattctctaattaaaaacagcttgtacaatcctactatgttgtacctgcagtctagaacatgcaaataacacatttttttcgcatctttgtcatgtttttatgtgcaagaacaacaccataacaatctagaaaaatgaaaatgtcacaaggtgtattgtatgatttctattttctaggccacttgacctatttttgtgtgcttactttacttttatgaattatatgttaaaatgccaagaatgtgagacagccgtattccagaacaataaccttaaatcttctcatcgaagtttctagatttgtcgagaagttctttcttgtttaggaagctaaacgatctatacgacatgattatgccatagtttttttgaagttggtagttgacaggtatgtctaaactctattattcctaaaattaagttaaatttttgcacctatatataggcatgtttaagaaaacatttccatctttcaagaaactttaaggaagagaaaactataaacacaatgtcaccttttggtgtacccaagagtgagaaagagagttcattgtaatagagttaagaaagttagttagaaggggagttttgagatgttagttagaagggtagttttgagatgttttatctatacaggacttctgcctcaattggaccgccttcatctgatgagtttcaatgtagtttcccccgatttccatttcagaattagtgcttctgtagtttggatgggctttaatatgtatttctgccgttatgtttttacttttcagccttgattttgtctaccgtagatagcttctactgttatttaggttgttactttggtcttttcatgaccttagtattggttttgttctttgtattttggatatgatgagggtgatatggggtgtcaacctagttgagttgtctgggtgcaccttctgatcctctttctctcccccatttcttaacttccctattattttcattgtatagctctcttgtactttgagtttattaataataaagaagcttgtctcctttgagatgttagttagaagggtagtttggtactactcatatttctttagaaatacaacatttctctcctcatttgggagaataattatttgacaaaaaattagactttgagcaactccaagattcgaactgatggcttgaagaagagctagtcaactgattgaggaggacaattgtgtggaagaaaaccccaccctccctccaagaatatcaacccaacacttgttgtctgttgaatcctcattggagggaatttatgtgacacttactggtcttcaagaaggcattgatttggtcactagaaggatggaagtggcagcggcagcgcagcaaaaccaagagaatggtcgaccatatgagcaagaatgggctggaagaggaaggagaagtgggggtgcagtgagacatggaagaattcaacaagaagtacttcaagaaaggcttccaagaattcaaaaacaagtccaagaaaattcaagaaggcattaaacattcaagaaatgctctaaaaatcccaagattcagattctcaagcaatgatgatcaagaagacaactcaatcttacaaggaagctaaagacaaatctagaagagaagttgtgtttcaaaagggagatcttgtgatgattcatctaaggaagaatagatttcctgtggagcctacaataagttgaagaatagaaaatttggcccattcaaagtcttggagaagtatggtgacaacgcataccaagttgaattgccaagtgatttacacatcaaccttgtcttcaatgttgttgatttgaagacctattttgctatgatgagttccaattataaaattagaaggcctcaagatgagtttatttttagggggtggaatatggtgtaaccaagagtgagaaagaaagttaattgtaacggaaaagaaatgctagttaagaaagttagttagaatggtagtttggaccttgtactcatatttctatataaatacgacatctctcctcttggtttgctcatatttcatatttgagtgaataatcatttgataaaagaaattagacttttggtttacactacctttagagatgactggtgtctagaaacttgcttgcataaaactcaaaccacataagaagatatctggactattggtgtaaatcatgaggaacatgttcaaattatggtgaccacctgcataggatttaaaatcctaggagttttcttgggaattaaatgcaatatggttagatgatgctttataaaatactgttgggcttgtaataaatctgaacaagggctacataaggtttattgtgactttttttcccttttagtttctatttttctttgaactttaaagtagaaagattttgactgaaagggggttcttgtatttatagttatatttagggttacagatatgcagggagaattctccactctttcatagtttcatgtttaggagaaagatgaataaataggtcgaagttaggatatgggtgggtgagggctagtggggattgggtgctagtcatctttaggatgtctgtgataccttttgttgatgtgtgaggaaagtctgagagaaccttctattacttttatttcttttcgaattggtaatgattagggtgtgttaaccaattcattcagagaaatttaaggtccaattctgaatttttacggacaactttactccaaaagcctaggtttgagacatctccctttgaattttgattggaatggtgtctccacaagggagaattcaacactcatagtaccttttccagagttggagataatggaagccatcaagatgcttggcaagaataaagcccctgatctggatggatttacagcagagtttcttttaaaattttgggatatatgaagccaaacatcctaattcttttcgaagatttctacaaggatggaaagttaaatgcttgcgtccaagagaacttcatttgtttaatttagaaaacggagctagcagtcgcagtgaaagattttagacctattagtttaactaccttgtgttacaaggtcattgccaaggttttagctgatagacttaagaaggtaaatctattattgccgagacttagagtgctttcataggaggaagagaaatattggatctcattcttattgctaacaaggtgttggaggagtatagggctaaaagaagaaagggtggattcttaaacttaatcttgagaaagcatttgatcgtgttgattgggacttcttagagaaaattatgtagaacaaacagttcaagtacacttggattaaatggatagaatccaaggtactccatcttcaacaatggaagaccaagagggagaattttggctcctgggggatacggcaaggtgatcctctttcaccttttcttttccttttggtgagtgaagtattgggggcacttgtagacaaacttcattagaatcaacagtacgaaggattcattgttggaaaagataaagtccacgcttctattcttcattatgcagatgacacattcttgttttgcaggtatgacagcttaatgttatataagttaaaacaagtgatagagttttatgaatggtgcttaggacagaaggtgaattggaaaaaattgatattatgtggtattaatatagaggaagatgaattggtggccatggctgcaacttgtacctgggatttctgttgggggttactcaaaacaagtatctttttggcaaccggtgattgataagatgcatgttaaacttgataaatagaaaaggttcaatctttcaagaggaggaagagtcacactctgtaagtcgttcctttctagccttccaacatacttcatgtcttcttttctaaggccgaaggggtcatatcttcgctagaaagaattttgaagattttttttgggaaggacataaaggcagcaaagttaatcacatagttaagtggaaaacagtcaggaactctgttaaggatggcggcctcggtctaggtggcttcaaagttaaaaacttggtccttcttgtcaagtggggatggtggtattttgaggaagaagattcattgtggcatatggtggtgcgaagcattcatggaaaggatatgttcagctgggaaagatggaaagagcttaaggagtccttgggttgaaagtggaagctttggccaaattcaaattgggaaatggaagccgaatcacatttaagttagatacgtgggatggagatttttattttaacattcaattccccagacttttcagaattgcattacttccaaaaggtttgatagcggagcactaggactttaagttgaactcttggtctattaagtgtcaacaactattaaaggaagcaaagactacagaatatcgggagttgattggtataaattcagtaaggagggttgaccatcatgggttggcctagtggtataaagggagacatagtctcaatatctgactaagaggtcataggttcaatccatggtggccacctacctaggaattaatttcctacaagtttccttgacacccaggtgctcgtaagctggcccggacactcgtagatttaaaaagaggtttcagtaaggagggtttcaacacacttgacaaaagaattttgtctatgagagtaacaaaatgttcttagttaaatctctcacaacttatctttccccatctccacctgtagataatgtcttgcacacagctttatggaagactaaaagcccaagaagggtgaatattcttttttgggttttgatgtttggtcaattgaatgtatctacagttttagataatgtgttgtacatgactttatggaagtctaaaagcccaataagggtgaatattcattctggtttgggttttgatgtttggtcaattgaatttgtctacagttttgcagcaaaaattgccaactagttgcctttcccctttaatctgtccattttgtcttcagcatggagaagatccgtctcatctccttttcctttgctcatattcagccaaattttgggaaaaattgttctccattttaacatgtcatgggtgtttaataaggagtgtagagaatcggttagacaagtaccaggagggccttattttaataagaccgtccagatattatggtggaatgcggtcaaagcattattggcggagttatggtttgaaagaaaccaaaggactttcaaaacagatctctttggttggatggatggttttgaagttggtcatagaaacgcttcatcatggtgcattctatctaaggagtttgatatgtacaacatttatgagctaaacttgaatgtgagtgccttcatttcagcaaactaaccagggtttagggataattggtcttctatttcagttaattctgttaccagacagattggatattttgtgtatttgggtttgtttccttgtattttcatacattcttattcatgttgtagaggccacttattttgcctcaatttttaagtacttactagtttgtatggatatgatgaggatgctaaggagtgtcaacctagttgagatgttcgggtgcgtctatggatccctaggttcttttgctcattcctcattgtataattatcttgtaatttgagcttttgtctcattattatcttcaagaaaagagactcgtttccctccccaaaaaaatagaacacaaatctctcttttagagacaaccccttttttggtattctttgtctgaaggtggaggaagacttggatcatcttctttggagttgtccgtttttgagatccatgtagaattctttctttcaagggtttgatcttgagttagctcggcaaagagaggttcgggagaggatcgaggagtaccttctctgtccatctctcaaatagaggttgattttatgttttgttggggtgtgtgttatagcgtgggatgttttggggagaggaacaacttggtttttagaggtgtggagagggaccttggtgatgtttcatatttctctttgggctttgatttcaaagacttttgtgtaaatgtcctctaagttgtatcttacctagttggaaactctttctttagaggagttttgtgggcttgatttttcttgccctcgtattctttcattaattgaaaatgtatcatattctataaggacttatgggtcaagaaccgattaccccacatattcccaaaacctctttaagttggccttagcttagccttcatggacttatagtagcgatgttattctcttttttggaattgtagtatcaatttttttgggttctcatctttttttcccatttccttggttgctcttacaagttgaatctgataaaacatgatttggacagaaaatttatgttattctcatcactatttcttgcagagctttttgtaatcctgctg

SEQ ID NO: 7689 - DNA, 2003 bp, Cucumis sativus
  Intron number 7 from transcript Cucsa.266090.3 (locus Cucs a.266090) derived from phytozome v7.0 (chr-ID scaffold0235 2; pos 534573 to 536575 reverse strand)
tttaaggtgagtgaaccatgctccatggaatcaagcacgattctagatttttttatctatttcatggttaagctcctcaaagcatcttctttaaatttcacatttagtgattggagaatttttcttcttccgaattattgaaaatgagaccatcatgggttacttaatggtcaataagtgccatggatttaggatgcatttagatagactttctcagttttaaatagggaacatgagtgcagaaacgggcccttaacaaaaggattttgaaggaagtagttcaattcatcgtagtaatctcatggaaaccagaaactaaactgaattctacttttattgataatagattcaaatatgaatctagggtacaaacactaatttgatcaaacaatcaaaactcaaactcccttctgctatactatctctcaaggaagaacagaaaacttttcttcaaaaattctaactaactttcccgcccactacttgttctttatttatactaatatatcttgacgtgtcattctacacacgtgccactacccttcttccctctcctactatattgatacaatatcggggggctattataatctaaaagatttaatatcctacgagttttcttggcaaccaaatgttgtagggttaagtgtattactctgtgagattaatcgaggtgttcactatttggcttagacttaaggatgtcaaaaaaaagtatttgaatatagagtttgatgtaagttagaggactgaaattcaggttcttaaaaggttttaatgatgaaaaaatgcaaggagttgagagtttaggaaactaaaattagcagtataagaacgtaacagtagaatctttcaaggaaaagaagcatctttccattgatttattgatactatagttaatacagttgtaacttggcgtaaatgctctctcatatttcactactataaggtctttttgtaactccctattggggtctttcccccttttgtaatttcatatcatcaatgaaaccctttctttcaccaaaaagaccagtatgagattagttaaaagcttaggaaaataaaaatatcaaatatccaagtacaagagaatagaaaaagagtttggagaccaaaatgaaacaagttaaaagctcagaaaaatataatatcaaagttataagataattaagagaccaaaatgaaagttattagagtttagaaactaaaattagaagtataaggatttctggttttgagaacgaagccaaagttgaatgaaaattcttggaccaaaccaacacacaaggaaaagatgtagcctcatatattcatggggaaattttagttagatttattaggaaaacaacactggatgatgacatattgtaaggtctccctgtttccatctgttagttgttgtgggacatgttctctaactacaaggaacaaatgatagtgtccatagaaaactagggttttgagatgtttggaagtgtcataaggaaacttgagatttagtgcatgtttgaggagtggttttgtagagttgaaaatcactcttgtcatgttgaaagtacctccaaacacgattttaattactcaaaacaatttcgattatatgaaaattgcattgaaaagtgtaaaaatcaaactctaaagtgaataaagacgtatttcgtattaattttaaaatagtattttgaatatgacaaaagtgattttaacactatttcaaaaccactcccaggcaaattgcatttaagcccttggttgaggagttaataatttaaaacacttgttgtctctcaaagctggtcttggagtgtacaaacctacaccggcacaaacatgacgaaagaggcacactctcaaaaccccatttatgaaaaggacatcaactgtctaaagttttcgagcaaagtttgaacttgtgcctgtgcctgtgactatgacattctcattgtttgtttcactattgtgcaggattgggacacacaaagtgcaacacaaattgcaac

SEQ ID NO: 7690 - DNA, 3212 bp, Cucumis sativus
  Intron number 4 from transcript Cucsa.109290.1 (locus Cucs a.109290) derived from phytozome v7.0 (chr-ID scaffold0093 4; pos 214268 to 217479)
aggtggagagttggacttctagcaaggtatatataaattcttttatatatgtatatatttagacacaaacacactgtgtctgtgtgtgttcttatctttttgagggtaagaaatcacacttttttttattatttttttatttttaggaatactaaccttgcacgagatgaaaactatctaaaagctgaaatgtcttgtttatttgaagttgtatgcatagcttagtagagagcattttatctctcatagaagacgggactaccctttctataattttaactcaaggggatccttccatgattttggatcttcttatgcgtttacaacacttccttttccagttggagtttgttttccctaaatttaggcctccatctttggactattctggatctgttgagtatcttgtcttgtaaatctatctttgtctgtttgcttgttcagcctgattcttccatcctttttgccaagctttggaagggaatttctttttagaagattagattgatgtcctggtttgctgcataggagaggtcttaatactataaattttatctagagatcttgattttttgctctatacctttaatgttgcacgttttgtgtaaaactatgttaacttggatcatattttatggatatgtcatttactgcaaaaatttggggtagattttgtaaaaattatcaggttagtttggtcctagtagaaattggttttccactttttttttttttttgcatttgaggacaatttaaaaaaaaaaaatcaatatccatgcatattcagatcaatttaatctcaattgattttatgagataattgtctaatgcagcaatatttggttattagaaaaacccataagatttcaacatcttatgtaggtagatggccgttttctattattggtgatcaagcatgagataggggactcgtagtttttggtcccaaattcgttcaaggatttctcctctccttggaatgatgaaatttctaagaaagtgagacttttttgcctaataaggtttgcggtgaacactcaagaccatcctcagagatattcttgtgttgggtcacaatggcttcttttcaggcaataaaagaaggccttgactatttgctgtggaatttcaggtttgctcctcctttggaattagtatttttaggactttagggaaaattttggcttgcaacgaaggctgttgttctatgattttcgaggaggtgctcttggactctctttttgcgttcaaggaagagttgtggcagacttgtcttttttgttattttttgaggtatttggcttcagaaaataagatgtttagaagggctgagagatcttgaaaggagctttgagaattggttaagtttaattcttctccgttggtttctgtttatcaaatattttgtaggtaccatcttttaaaaattacattgtgttgaagaagttgaagtcccacattgaaaaatccaaggagactcatactccatataagatagctaggttactcctctcattgccaattggttttgagatggaaccccatactatcaaatttaacatggtatcaaagtcatatagagcttggcgagtgggatgactatttgaggggaggtggtaatttatcgaggggaggaggattgtaatgtggaacttgttcgagggggttgtcataccgttgtgggggttgttgtcctaacaagttcaagtgaagtaaaattgattgatttccacttgttggacctttcaaatattgcaagtccaattggttttgagatggaaccccatactatcaaatttaacacatcgaataaatgaaatgggggaaaagtatccaacacccataggcgattacaagaagaatctccaataggagactaaaaaggataaaatgaaaggactgaaagggtgcaatcaaaagaggagaaaaggtccttgaaaagacggtgattgcatctgtctaaaagaatgcacagagaagataattaccatcttggtctcattcttttggattgggctcgatttcttccaagaccattctacttgtgagtcgaattggagaatatttaagaatgtatactttagagggggtcttgggaggaacacagtttatttcattgcttcccttttatctgtttttgactgattcttttgtatttatccatttaggaccatcagcaacttgagcatcattaggacctaatctttctttaagaaaaacttgtgttctaaacttggatttttcttaatggaatcaacaattttcattaagaaaaaaatgaaaggatacaggggcacacaaaaatacagcccacaaaaaaaaggggaactccctttacgaaaaggtcctccgactaagtaagatcacaccgatagaatgaaaagggtatcgaatcaatgtccatagagaaacatgaaagcaaatgagccaactattatgtggtgatggaggtgtggaacaattctaattttcttgggatctctcaggagaaatctctatgatttggagatggaggaatgagcttttctgtaattggtgttttctcattgtattttggtagactttgtctcctcatgccttttgttggccatttcttttctacttttatttattttaatgaaagttgggttcttataagaaagagagatgccaaagcgagcatatcgctcaattggcatacaagagtcttagtaattatgaggtatgtgattgaaatcctcctactcccaatttttacttaaaaaaaagagagagatacagaataaatttataaaattaaaagagaagaaaattctgaattaaatatgcatatgagggcacatgcaaggcagtgagagttgttacttcaaaatcttctagttaggctgcagttagatgaatggttatttcaaaaagaaaattttcggtcctcaggttttgttatataggatgcagttgttatttttccatgtttcaagctcatgcagaacttcaataatttaaacaattaaattaaattaacttctttgaatgttgagcaagaaccacggtaagtttaaaactgagtgcaattctatgcatcttgcttgttggaatatattaggttgtttcctataaaataaaaaggaaagtaaaaaaaaattgtgcatcttgcttttgtttcatcataactatgatctattgttttctatgactcaggacttgcaaagtcaccgaagatcaagttttagctc

SEQ ID NO: 7691 - DNA, 1877 bp, Cucumis sativus
  Intron number 2 from transcript Cucsa.158420.2 (locus Cucs a.158420) derived from phytozome v7.0 (chr-ID scaffold0114 2; pos 553638 to 555514)
cagaggtaataaaaaacaaaaaacattactttcaaattcgacatcttcctcctttgctaatcatttaattttttaaaaaaagaaattaattttatttctactatttttttacaatcattttcatccttttttataagtaataaaatttaattcttagtcaaaattttaaacataattacttttcaaaaactattttttatcaaagcaaggcttgaattttataacattaaccaaaattagataataaccaagttgaaagaatgtttatggatttaatttttttaaaataaaaattaaaatttcctttaataatcctttcatcttttgattttagtttttaaaaaataaatttattttctttaaatttttcgagaatattttgcatgtttattcatagcctgaatactatgaacgaaaaaggcgtagcatgagattaggtgtaatatatgttacccctaatccttgttcattttcataataatagtccaagtttaatgtgttaatacaaatgaaaatatcataatcttaacttataaactatatgtgttagaggtggatcaagctgtggtgttttaaggtttcaaaaataaaaatcagaaaaccgattaattaatgaactaagtcaaataattattgaataaggcttagttttttaaacttgtttttctttttcttttcatactatctatttacaactattttcatcttattaacacctttgaattcatagtcatatttcagatacaatttttttattagaaaaaaaactattccttaattaacaaatccaaagaataattaatgcaataaatttcaaaagggaaagtggaatttagctatctgttcaaaattcctgaatttgtgggttattaaattttccttaaggaaaaataataattctttcaatttaaccctagtaggtataagtaagagttccttattaacctaattttattgagtgtgtgcatcaatatatatttatatatactatgaattaaaaattattaagtaaaaaagtgtgtctgttcgaaaaaaaaaatgcagaaaatataagtagacaagtaattatgaagtcgtaaatattcaaatttattaatattaaattcgttgaaaattttaatttcagctttcttattttattgtttataaaacaagtgatatgaaatctttttaatttaaataattcagaaaatattaagttgaatttaaaatataatatcaatagttggtagattaatataatttaggataagaaatatgttgagataggtaaattgatttatttgtcaaatatataggggttactttaattagcaatcttgtatcataccaacctagataatctgtttggattattcttatgtaaattaattattctcttaattcatttagtgattatgtctaatctattaagtaaaagtaagagttgttttcacaattccattttgattcaaacatatcttttacccaacctaaaaactgtcggttaatttaaatgataaccaaaattttaaaatgttaaactcgacaaaagatctaaattttacaaaattgtcgataataatatcgataaaatatcaatgtcaagtgatattttttttaaagaatttatgaaaacaaaaaaagaaaaactcaattatgagtaaatagttttttttatgatttttatttgaataaacatgttaattattcatattgtatctttttttagtataagacttgttttgatttatttatattatatttatgctagtgatatattgttattttttttatatgtttgatggagtttagtaagatataataaaaattttgataataacctatgatttttttttgtagttattagcattgaaaaccaaagactccggcgagac

SEQ ID NO: 7692 - DNA, 1675 bp, Cucumis sativus
  Intron number 1 from transcript Cucsa.283830.2 (locus Cucs a.283830) derived from phytozome v7.0 (chr-ID scaffold0265 3; pos 803527 to 805201 reverse strand)
accgtcgtttcggattacattgaaaagatcgttaggtatttttataacccatcactttttttttttttatcattttcttcctgtttgtttttctaatttcttgttccaatgggaaatgtgtagtaaatttgctttaactgtatgtctttcttatgttattgtttcttttttgggattttctggaatgtctacagcgatttatctgtttcttgattcgtcaataggttctgattgtgatagtgaatggggctattatgtgaacgatcataatcagtgtgttgatttccccccctaatttgaaaatcgcacttaagaacccaaaactctatcatactgttgtagaactcacaatttgttgccatactatccgatctgcgtacacattgattttggtgtcaggaacaacgacttcctacgtttcttggaaatagtgtgatattgtccgctttaggcataaactctcgtggttttgcttttggtttcatttcaaaggcctcatgcttttggtttcatttcaaaggcctcatatagttgtattcacttaccaactttcatccaacatttccaagatttggttggcacaattgttttctctttcaatatttcagaatttgtttacgagtgaggactgaggagtgaagttccattactgaagtttctggagataccacgttgttttagtttattaactgaagcttttttttttttgcataattagggatgcaatttttcttccatatttttagtccataagattatcccttcccttttctattggcagtctctctgtttccctttaatcgaaaatgcatgttatttcttacattttggatacacatagttccaggttcctttttattagcccttcttactttctctctataatcccattgtatattattttctgttcacaaagttgtttactagttgagatatcacttctattaattagtgtcacagatttgtcaatccgtcatactgagagttggtaaacggaaacctagaatcatattcatggtcaggcacaagaactcctcttattgcttgtttcctctcaattagctgttgggttgaagattggaagttttggaaattagttcttttcagctaggtcttctttcaatctgtgcttttcataatgggttaggcaatgttctgcaatgggaggaggcttatttctgtccattttggctgatgtgacatgatacagtagagtaggctactaagtggtggattccaaattgagtaaagtagttacaagtgtagctctccacctctcttgtttgtatttttaggagggtccctcaccacagacagcttagttgatatcaaataaatgaaacaaagagaacacacatttggttcggcaaaagaattcctgtatttcaactctcaaaggtttgcaagtcttcagaatctaaatgagattttcagaaaaaaccaagcaaaatagtacttgagttactttagcattctgtgaaataaacttttgtgtaattcatacaatgatagaaagcatgtaggatgttatagcatacaccatcagacacctaccatctatctaaacagtgcagaaggttttatctttacagtgccatttgaaaatcataaatgcttacatctcatgttaagggtatgataaaatctttctatttgtgcagatctttctgtggaa

SEQ ID NO: 7693 - DNA, 5789 bp, Cucumis sativus
  Intron number 6 from transcript Cucsa.144100.1 (locus Cucs a.144100) derived from phytozome v7.0 (chr-ID scaffold0108 0; pos 533718 to 539506)
aaggtgcagatcaagtattgcagaaggtttggattcttaattattcttcttttcccattaaagtaattatttatgtcataaattttgttaaatttcatctgatttattaccaatgttgaaatttggaatacgcttcattgcttcacactgtagtagcttaaaaaatttacttcttggagaagtagcccctgttctatgacgttatctctgttgtttgtaccaaatgcactctaatttaccgtcacttgcaaaaagaattctatctcaattgcatggtggggataataagatcgctatgtccaaacataatttgaatctatccttgagcttatcactaaaagctttatggtttctttccagctataagcttcatactgcatatgaatttatttgattgcactaacctaccgattatgtgtttccttcgagcatatgaccacatggtaactaaagtaaattttcctccagttaaagatgaagtatgcacgagtactcaaacatttgtaatatggagctccaacacttcttgttatatgaacaaacgaagcattgttgtgtcattctttttctcctttgcaaacttcctcatcctttcttccatgctttgatttggacgaaaacatttcagctgggtttcttctcttcctttttggttttgttttgtttgtttgattgttttcttaattattcttttgtttttcccagaaaggagttgggaatgcgaaattataggttgaacctgtgtttttaaataagaaaattttctctcctttccgttgctctcatacaccaatgcctgaggcttgagggttgtactagtatttcttgaggttttgtgaattgctaaggatccattaattataaaaaaaaaatatacatatacatatacttgtgaggaacttggatacctttatcttgataggtttgttgttagcaatagttttgggattagtcaatgaattgtaatagtgagtttgattggcttcattttcatttcttttttctttcatttttttggagaacaaatgaagatgaagttgataaaaagctgaaattggtttcaattctattgcaatttgtttgatgtttgcatgtgttagaaggtttgaggagttgaaatgctagatgcttttaaatgcaaaaattggtaaagcctttttgtttcaacacgattgcaaaagaggtagtgttataattggattcttagacacacacactgtacacattcaatttttaaaaatggtggaaacttcattgaaaccgccgaaatatgaacaaagtagaagaggctggacgtagaaaagttccctcaaggaactacatgataagcgctttcaatggctaaaaataatcaatagttatgaaagaatttcagtggtaaagaagttcatcaagaagctgtatgttgtttgagttggcaaaacgaatcaaaaatggagaaaattatattgaaaggatgtcttttccttccaaatgtcccataattacaccttagttgcacaactctttgaagttctatctttgcctttcagattccacctcacctgtttagaacttctcaaagagtcaatgcctccactctttttggaatacaagtaatgatccccaaactctcaagattgacattccatgctttagccacaggtgcaatgaaaaagtaaatgatctaaagtctcagccttcctccagcaaagtctacgactggacggggagaggcacctagttttaaactttctttgaagcatgacatcaatcttcaagctttctaagaaccatgtactataggtgttttgaaccttctttggtcgtttactttttcaaaccagccttgtaaaggagcttttaaccatgtggggaccttaacttgacatatgatagcatacttagttgaatactttccagttccttcaagggatcgtatgattcgggcatcctcttcaccattgttagctgaatctaacttgtcaatgaggccatggcttggccacccaactgttttattctttgtcaaagaggcctcaagatgcctaaattcaaagtttggttgtttttgtcccaacaactgaaaatagaaaattttttttacccaaaatcaaatttaaatttgggaaactagatcaaagagaatcttgattgtaccataaattgaaattttggctcatgccagctttggattttaacaagtgaacaaaaaatgggagatttttggcaatgtccacctgtggtctatatcctttctttttaaacatagcaatcatccaaccatgagatctcactccctatatacttgcaataaccttcttccttagaggattttgctcttgagtgaatctccaaatctacctagtgagaaaggaggtatttcaatgggtgaggagccctactcctagcccaccaagtactaaaggcatggctctccaatcctacttcaccgagttgcagctatgtttgtaaatcccaccactccccatgaagtccttataacgattttttatgtagttttaaagaccttttttggggttctaaggagagaggagtcatgtaaaggcatattaggagtcgattgttgggcttttgaggatagtagtagtataaaggaaaactagtaagatccatttgtgctaaggtggctctccctcttgataggaaaccagataaaacatccaactttgctttcaacttttcaatcaaagaatcccaaatgtgcgttcgatgatgatttcctcgccaagataattgatgggaagttataatctatgtatgtttcttttgttatttctctgtgtttgttaatttgttactgaagtttagattatctataattactcttatatgctctttgtcatatcaatgagaagaactttctcacattatgagaaaaaaaatactcatattacaatttacatggtatcaagccttttctttactaacattctctaataaattgatcctgatcgtaaacccttgttcttccccttttgtgatttgttgttaatatagaattaaatatgccttcaaccaccagcttaagcttttgggtgaattggtggtttaatatggtatcagagcaggtggtctagagaggtactatgttcaagctactgaggtactatgttcaagcttctgcattttcatttccattcccaattaaaattgatttccacttgatgggccttgaaatattgctgggcctttcaaatatttcaagcccacgagtgatgtaaaattaattgatttccacttgttgggtctttcaaatatttcaatcacacaagtgagggggagtgttgatgatatataattaaatttgctttcaaccatcaacttaagcttttgggtgaattggcggtttaatatgattttctcttctcgttcttcaagataccgcaaatttccaaggctgaaccttttaaggaattgtcatcacaaatttttcttctctcaaatatttgtgacctagtctcgattagtctcaatgcctcgaattttactctatggatgtttcaaactgttgaagttctcaaagctcacaagttattcgaatttcttgatggaagcactcttgaatcttgattaatggctaaggaacgaaggacaaagccagagtctgaaccacctagacatccctgtttagacttattagttaagtctgcgccaaattcaatttcaaggataaacttgcaccattcaagaagatcaatggagtcaaccaccattgtaactgctttattgaagaagcccccctgaaagatcagaggatggggatcgtaaaccgctctccggcaatcaaataatatttataattactaatatagactactactaccccaaggcatagtaatagccacaaaactaggtcgatctgcagggaagtacaaatgtagtttcaaactagttaagatttcttgctaaagtggtaacctggggggctggagtgatctagaatttaaagtgaggaaaataaatgcaggaatgtaaaagtgcagaaagttaaaaagcaagaaagtaaaacaggcctagcttagagaataagatccacccaattgtttgatttcatcatcagatttccacaaacaaattctcatgaagtaatgtgcctaccctacttgcccctaagtcaagtaaagcaccctaatgcattaattaatttcttaactaaactagattctagaaaaactgggaacaataagcggccataaataccaaacacctgcattaagcctagggaattcactaggatgattaataaccctaaaagcccctaagttagtactcgattatgttcttgaactatactagcaatgcaatgtagcaaaagagctatcctagacctcctcacatttactgacaagcatgtttgggaattgctacttgtaatcatcattgattctatatgcttaggaattgctacttgtaatcatcacaacccattgtttgatgttttgcattaatccttagcttaaaagaagtttaaacacacccaatacttggattcgggacttgagattagaacaataacatgaagcacaacatgcatcaaactctagcctagcaaagaatacacgaatattggccaaatcaaacatacattctaagcaatgaacataaaacaagtccatgaaccacagaaatttcgaaattagaaatttagtattaatactcaaaatcaaacaatgggtttcacctagccctaagctagcatacccaccttagccacaaaatcggtccaagatgagcttgacgattgtgaaatatacccaagaagtaagaattacagaggaaaggagaagaaaatgggattgggggctaaaagtccaaaaagaactgacgtaaaatcggaaaatctggatctgtagcagcagttagtgccatgacgcttatgagtaaccccttggctgtctttgcacttgcacagtggtttcctttgaaaagttcggagcatcgcggcgtgcgcttgccttgtggtagtttagtaatttcgagcatcttttcttcctattgacctggttactttgttagggctccgatttggactgttttagcttctttagctctctgacattcggttctttctcttaggtgcttgatacccacaaaataacatttttagcacattaattaaccaaacaattccaagttaagctaagggaaatgacacttcttgagtgctatcaccccctttctactgtaactatgaggctattttgctgagttgttagagtgaatactccaacgcccctaggtataatctacatacctgcaccacggatcagatactcttttattggtcacttttagctccgatcaagagtataagtatggcaagttttcttcaatgacatggcacttggctatgaaaccattaacttgctgtattttcgcaaacctctgtcacagacaacttttttgcactgacttttgtttcaagaaagtgaatggagggatatttttgtaaagcatattgaactcccttcttctttcactatgatggaaaagatgacagaaacactgcaaagataatcgcctcttagaaggtgcttttcagagcctactgatagcaaactggtgctacccccttaaccctcatccagcattatttctttgaaagaagtggtttatggcggctagaagtctgaatcacttgtggttacctgttttctttaactgtttatttcactgcgattgttccattgttccttgctctgcctttttagctaatcttgcactattttccctgttagcaacaatttcacatatttcgaactttgtttcacctttcagcttctacg

SEQ ID NO: 7694 - DNA, 862 bp, Cucumis sativus
  Intron number 1 from transcript Cucsa.047340.1 (locus Cucs a.047340) derived from phytozome v7.0 (chr-ID scaffold0054 2; pos 2412331 to 2413192)
gggattcttccaggtatgtaaatttagtgtaaaccttcttggtaattgttccctaattttgtgagtcgtgaatgaaggatggtaggttaatggttttgaagttgaactgtggattccccttcaaaaattatataagtgctattgttctagttctttaatatgtaaaataaataactcgaaacctcagtaatccaaccatggttattttatttatgttgaataaatttactgcaaaacattcagaatctttccaatccaacccaaaaataaccattaccatagacatcttgaatggaggacttggaaaacataaaagataaagaatagaaaaaaggacagcaataagagaaaggttattatggtgatttgttataaatagagggagccaggaaggagaaagtgaggtagttatttagtggtttaggctcgaatgacatctcaagaaaggaaaggttccaagtactttctagtcttaggagagttatattttaattttgttatcttttatattccaatgcatctaggattcaatcattatgaagaagaaactctgtataaaagtaatgcgaggacttgcgagtttaggggtgccagaaattttgttgaccaataggtgggaggctttattgtacattaaaaataatctgaaaaaaatgttagagatgaagcttgaacttaggtctggaaggaactagaagacaatattatcaccgggctaactattggtattggttttatttcagttatattatataaagagcataaagttgagggaggcaacctcccttgatctatactaaacccattggtctgtggttggttcaaaaagactgaaataattgttgttggcagattataaacc

SEQ ID NO: 7695 - DNA, 1947 bp, Cucumis sativus
  Intron number 5 from transcript Cucsa.253680.1 (locus Cucs a.253680) derived from phytozome v7.0 (chr-ID scaffold0222 9; pos 2221905 to 2223851 reverse strand)
tcgcgctcaccttcacctgccaggcacgactcaaggttggatcttatttatcatacttgttttacttctagcaagactaacatcattatcgtcctgccgtttccattacttcttacttttgtacatttttttgaaatattggttgttcctgtcttgatgtttacttgtttagtaagctgcacatgccttctttgaattttataattttgtactagcattctttttggatgagaagcattgtataatatttttgaaattttgtacttgtcttatatagagtacccaaacgccaaagccccaaaatggaagtgcttattccttgttttaattttcagtggaaccaaaatgattgtctgtaaattttatgtacaattaagttcatttttggtgaaaatcatttttgtagaaatattccaatatactcaatgtaattatattttcgaccagaacctcaagacttccgttttgttcaaaaaacctcttacaattttaagtaacaaaatccatttctaatggatgagccatctttgttcctttgtcatgttgtgaagtgcatagtcagtaaatataagtagcactctgtggtttctgaaatgattataatctctttcgtcattcgtataatcactcaaaaaatgcttttaatcatttaaaatcaattttgtagtctgaaaaatgcatttaagagtgaaaattaaaaattgaattgattttgtgtgactaaaggtgttgtgtttcaaagtgactgtagtacatgacaagtgattttaacaatttcaaaatcacactcaaacatgcactaaacattggtatcagtctgacaataattttgacacttctaattttcatttccccatcaggtttataacatcaaagctatatattaattctaagcaacagtttcagttttttgttgttttacaggctttagttgtagaatttttatatcatatgcttgaatgttatcatggataagcaaaaacacagaatttaatgtttgatttgatgcacgtggaatattctactcccttcatggtacagagttgcattgcaggacattgtatacaatctacttgattccttgtttatgcagatattaaagtgtaaagggagactttaaagacttgttgattaataaagtttaacaagaaaagcgatcataaagtgatgggcaacttgcttactttacctatcgaaccctctccatgagtacaatctattacttttttaattacattagttgcatggttttttatcgtttgtttacatctgtttttttaggcagaagttgagcattgacgagagttttaaatcaaattttatctctggttcttttttccccattttttcctcccttacaaatctcaaccatttatcagcaagaaagtgatctttaagtttgatatcttcttttgcatatactatccagttaagaaagattagagcttatagttggccaaagaaagaaatcatcttcaaaggagaaaaggccaaagttttactggttgtcgtatggtgacattgtccaagaaaagataatgtgttttttagaaagttggggcaaagagagctatgaacttgtcagaagctgatcaaccagtacagcttaatagagcataattctcagtgtttggatctacttgtcattattttgttcggaaacctgaaaatggtgcaggtaaaagtcatgttttagttgatcagttttgaaaatgatgttgatagaaaattgtgcttataaaagtatgatcaagtatcataagtacctattgaacgtacctcattggggcctttgaagactgcttggacaggttttctttcctgttagagagagagttggttttttgtgtttcaattctgaatgaaaatcgtttctgttttatatgttgattttcgtaatttttttttgttgttgttgtgcatgatgcaggagccgtggggcaaggg

SEQ ID NO: 7696 - DNA, 5236 bp, Cucumis sativus
  Intron number 1 from transcript Cucsa.089570.2 (locus Cucs a.089570) derived from phytozome v7.0 (chr-ID scaffold0089 4; pos 973568 to 978803)
aattgaagccacagtccaaagaatcctcttctctggttagtcctaattaaacatttgtttgtgtccatttcaatgtcttatcttttataaaaagtagttaggattagattagaaattatttcaattattctaagattttgaaacatgaataaatttaaaagcaattgattttggctaggttttacctcacgtgggaaggtaatggattagttataatatgaaaagtagactacacttagtttattttactatagtatgagttgtgggacccaccttaaaatataccggcaaaccatgcaatttaattgtggaatgaaacgggttgtcaataattgaatttcatgtgagactcactatttttatcattacctatattttgttactacactgattatgaatcagtcaaatctattgttacttttacctttatcgatactattggagaaaataataatgataatgataatagtaataataaaatgtgtcacattcataattctaagtaaacgtaattaaaagtaaggttaattttataaatataacaaatgaaaaagtccattagattgatttttttaaaaaaatattatagatttttttatttattttcatggtctttcttctcctcttattttctaagatttttttcttcttttaatcgtgtttttctcttcttcttctaaatatttcttttgtttttttttcaaattgttatttgattgtttttatcgacaaatataaaagatcgtgaaaaataatcttgagatattgaataacgatcatgtacaaaaaatagtcaaatttaaacgatcgtgtaccaaagaagcttaaaaaaatcatttaagatttgactactccaatttaaacgatcaatatctattcaaaatttaaacgattgtgtacaaaaaatattttttagaaaacaatacgacttgggtcattaggtgcaccctgcatcaccactagctaggcggacactagggatgtaagaatatgagttgaacttgaataacccggactatccaactaatattataaaggttgggttgagttaggttaatgggttgggttaaaaaaattaatttttttgggttgggttgggtctcgggttggagagttgaaaaattcgattcaaccaaatccaacccaaattaattatatatatatatatttatttatttatttatttaataaaataaagtctaaaaattaggtcttcctccctcttcaatcttcatcccctcatgccccactcacccttcttcatggtgttcgattattctttccatctcacctcagtcttcggtcttgtccttcacaatctcgtcgtccacctccatttcgttagaaagtagaaaacgaaaaaaaaaaaaaacaacacaaccctacaacccaaccataaaatataggccgaattgggttgggttggaaactaaatttgggttattcaagttgtcagctcatataatttgaaaatctaggttgggttgagaatgtctcccaacccaacccaacccgattacattcttaatgggcacttttttagcaccttcatcatcccttataaggtttcattcattgaagtataaggtacaagatgttaaacaaaaagagagctagaaataagcccaaacaaaggaagttcaagtaaaagtgacaaattagaggaataataatcaaggatataacaacatttataaaaaattacaaatatagcaaaactatcgctgatagacttgtatcactgatagactcgtatgatctattggtgatagaccaatttttaccacatggtctatcagtgataaactctgtcattgatagaatttgacaaattttgctatatttgcaatgtttttaaaatgttgttatatacttaattattttaaatttaattgttaaatttacaattatcccttacaacaataatttcgctccaatcaaatcggccataaagtagccacacccacaaattgaaaaatatgataccttttcttatgacttgtgtctatcgagtggaggtctttacaaaggctttgacagctttggttattatttttccaacacgcatgcttcttgattttatcccaaatttgcaaaattacaatggatgaagagatgatcatcagattcgttactaacctgaaaaaggatacaactactactaggactgatgcaatggtttttcagcctaccttgcagcttatcacaagtgaataatcccttttggaagataggccacaagaagaatttgcatggaatctttgattttcaaacggatttgtatagcacaatatccagagaatcaatagttgtgacatctaaattttgtttaacagaggctgccgaaaacgaatcattaccattgatcgttcaaattggaaagtttgggtctctattttgatttggggaagggagagatgctttgatggagttccacaactcttgttctctatcaagaaaatgtcttctcggcttaaagtctcagtcctgagtggaatcattccaaatgtctctgatgttaattagcattttgagcttgagaaagagctctccattattatgggacttttatgggaccatttctactccacaggttgtgccagaaagataagagctctccattattgatcttccaatcgattattttaaagctataccaggctgaacatttgataattgatctccgcggagctttcgtactattaaattttgctttagaaagaaaaagctcagatggggatttgttatatttgacatcaatgaatttcctacataaagcaagagattcagaatgatacctccaaagtcatttacacacatcagtgcaaatttagtatcagccattttagtaatctcgagccctcctttgttttttgacatcgacacaatgggccatatgatggatgcaatttctttttgttgtttacaaggtaatattgatcaccatggctgcctttccaaagaaaatccctccaatggttttcaatctttttacagacagaagatgggactttgaagatcgacaattggttaatggggaggctagataatgtatagttgacaaaaatgattcttctctcttctgatatgcaagagtactcccaattgtttagcctttaaagtatttctcagcaacattatcccaaaaagccaattgtttagccttttggcagtagcgcgggaatatcatagaggaagacatcttgaattttttacagtcagtagctttcggtagtatctgaaggatgaaaaggatggggttaatatattgaaggggaagatgtaaaggttggttaaagagatttatgaatatgcagagtttgatttgtaatggttggctgaagtaaatgttcctggagagaaattatgaaggtttgttttggctggacaaatgtcaacatgctgagctcgtcggcgtcgaaacgaaattgggaggtgaaggaaggatgggaagttgagaggtttttacttaaaaaaaatattcaaatttaaaccatagtctaccaattttttttgaaaaaaatcctttagatttgcatatagtctaccaaatgtaatcgattctatactaaaatcttgaaaaaatcatttgactactataatttaaaggtccgcatttgcatttagacgattaaatttaaacatcgaaataaccaaatctaaaaccaaagaatattttaaaaaaaaccaaattcgattaaatctaaactatcgtcaacgatcgtttaccaaatatattacgtgttgaatgttcattaatcacgagacattttttgttatatttttcattgacaactagtgtacttacttttttcctttttattctatgatttgtatatggaacattcatacttataatctatatactcatatctttatccatatcagtcataattaaaaaggttaggatttattttcttttatccattataaaaaaattaaaatgtgatctcaaacaattttaaatcagtttcaaattaaagggtgccaaataatttattaattagctccacacttttttacatgtattatattatgaacatgcagacttatcggcaaatggagtttcatatttagattcaaaaggaaagttacacacaacattcattcatgaaaaaggagaaatcattgtaagtgcaggagccattggaagtcctcaacttctccttctaagtgggattggcccaaaatctcatctttcatccttaaaactacctgtcgttcttcaccaaccacatgttggacaatcgatgtctgacaatccccgttttgggacaaacattgttcttccattccaagtggttcctacatcaggaaaagttgttggcattttacaagacaatatctatttccaatctcttgctagcccttcaccattcttagttccaccaactttcagtcttctacctcctcatcccacttcaattaatccaaccttagccactttttttgggaaattctccgaagttcattccaaaggctcacttaaactaaattcctctattgatgtgaagaagagtcccattgttcagttcaattattattcccatcccgatgatcttgctcgatgtgttaaaggtgtaagaaaattgggagatgtgtttaaaactccaacaatggaaaagattaagacccaagatttgaagggtaataaaggatttatgtttttggggcttccattgccgggaaatttgtggaatgatagcgctgttgaagaatattgtaagaaaacggtggctacttattggcattatcatggaggatgtttggtcggaaaagttgtggacggtaattataaagtgatcggaactgaaaatttacgtgtagttgatggatccactttctctatctcgccaggaactaatcctatggccaccgtcatgatgcttggccggtgagtaatagtacatatttatattttagcggattttttttaaaaaattgaattttcaaaaatagcaattttttaaaaaaaaaatctttatggttaggagaaaattaaaatttaattagaattcagtcttaatccgaagaatacaccactaattcaatatttattttctatcggtggttattattgatagaatctgaaattttactatattttgtaaatattttcagtaattttatcatttacaataattttagtatactcttatgtattatttggaaacttaaaaaaaattcttgatcttttgttttcatgaaataacaagttcaaaatggttgtgcaggt

SEQ ID NO: 7697 - DNA, 1641 bp, Cucumis sativus
  Intron number 2 from transcript Cucsa.259730.2 (locus Cucs a.259730) derived from phytozome v7.0 (chr-ID scaffold0222 9; pos 6101222 to 6102862 reverse strand)
gcaagcatttgacgctgtttggcagctttcagtaggtaatagttcgtcctaaactatttcgaattcaattttaggtgtttacaattgtccccaacactaggaagctcttgtttatagatttggagtggcttcggacaaatataaacagtttctagtaaagttttgaacccatttcgtgagtttcggtggctaaagaaaccttttcgtttttgtaagttgaactctctcttgtagtttaaaaccgatttggtgtatttgaaactgaggtttaaggtttttttgggtgagagtattcattctaaacattatttggattttgaataaaggtttcaaactgagttctaactttggaaccttgttttaattgttttagatcagttatttttgttgggtttactggttttgtgtatctgtttttccttctatcgttgaatttggtgtcgtgaatttcttgttatacttctttaaattcagattagaaatttagtggagtgttattttcgttttgaactaagctgtccttagcaatttaatttagttgaatctatcctttaagttaagtttggatcatatcgattatttcaggtagtttgtgtaatgttttgaagttttgaaatttctgaccttgtttaggttctgtgagcaaagattagaatggtagtttttgtaattgtcttgatgttgaacgtagggttaattaggggctaaatttggtatgagagtttagttcagcgtaaaatttggaggtggtacagttgctatcaaagcagagttgtgcttgtagtttgacctagaatctaggttgttaagttagttagtgttaatggtctcagcttctctctatcactcggtatgtgaacttcaaatttcatataatatttgattggattggattggttgcctcgtatgattatgcttgacttgcttgtttgctagtaggcataggatttgcatacggtggttgttgttggttagcagggagacagtgctaccatagttgactagatagcatgtgttttgtcttgtgcttgttgcgtgttagtagaatttggatgtgatataaaatccataggatttgaaaattaggaactcaattggtgaacccctaatatcaaattctaatacgtccaaatcaatttgacaacaacataagggaatggattagatttggattaccctttgatcgaaaaccaagagattaggagaactagttcttcacttcaagttcgaatactccacaagcagcgtgatcaaactcgactgaatattcttggcatgcaaccctaaatcaagaattgcaaaaggaggtgatgaggctatgtcatctactagagaatttctattgatacaaaatatcataaacttgctttaaacaacccaaaggcaagacttaatagcatcccaaaaaaaccctaatgcattgtgaaatactaaattaaccctatttaaatgtttaaaaaggataaaactggaaaatattaaaattacatcacaattggtaaataaaatgtaattaataatttgatacttggtcggttcatatcagaatgtccttgaacatgtgccctcttctttcagcttcctgttgacaggcctgtttgtttaggtttaacaaactaataaattggtccaacaagtcct

SEQ ID NO: 7698 - DNA, 815 bp, Cucumis sativus
  Intron number 8 from transcript Cucsa.258430.1 (locus Cucs a.258430) derived from phytozome v7.0 (chr-ID scaffold0222 9; pos 5398224 to 5399038)
cagtcaggtattcacatgtttttacacagactgcaactgatcttaggctttgattgattaaatattataaagaccatacaattacttaaagctgtcagaattagctacataaaaaagtaacatgaaaaagaaaaaagtaaactgaaacggataaaggattgtttgcaaaaatagtaaaaaaatttatgataatagggttgatgttattacatcttttaaattgcaaaagtaacaaattcaaaagtgaataacccagccctatgatatatctaattacttgtcatatttgtaatatgcaaaaaagacgtgctatgagctatttttcaaagatgcaattttacaaggatgaatccctcacctccccattttccagactctaccaccaaaatgttctatcattcctttagctccaaatccaccaaaatatagataaagcttgatagctcctttatattttggcgtttttcttctaaaggaacaacagccacgatgttacagaaaaatttagtagaaaaagaaatgttttacggagacagaatgaccatcagttgaaaatatgctgacaaaataagatcgagatgagattaagtgcatgtttggactatttttctgtgtgctttagaaacactcttataaggacttagaaagtctaatccaaacatcccctgccattcgtcccctttggattctctgaattttcaatgcagttgatctttccttttttccttattctcgtataacaaaatcatataaaatagattaaaatacactttaaatgcttggtttagttaataaaattttcttacagggatctg

SEQ ID NO: 7699 - DNA, 6926 bp, Cucumis sativus
  Intron number 1 from transcript Cucsa.164340.1 (locus Cucs a.164340) derived from phytozome v7.0 (chr-ID scaffold0114 8; pos 206922 to 213847 reverse strand)
tatagcttcagtggatttttaactgtatgtctcctaggatccctccctattttcatttctcagttaatatgctgctaactaaggacactgtcccgttgaatttggtgagtagccttttgcattcttaaaactatttggacggattagctttttttatttataagaaattgattttgtttatgatatatacaaggggaagttgcaagcaatcctactaaaagaagacaataatacagtattaatttccgatctccaacaatcgagatcaagagaatattctgttatctgctagattgttcagctaatttgaagccttggattctcatatcttaatcatgctatttcttttcttttgttccaaaagaatttcttttcctttcctcacaaaaatgtggtcatgattgcactagtcgggagctttccttttttagcttattttctcaaaaatagatatattccaactcaattttatgtgttattttttcagttggagttaggaactgatagattacaattccctataacatagtgtccttttcctttgtggtaaggaacattttgttcagttatgttgtttttatatcaatgttttttttgtgttaaaagtggatagatgattgtagaaacttgcaaccacactactccattattatcatcgttgcccatttttttggaggaataatcagacctgattggactagatagactttgcattatgcattcccttccaatagacatgtttagaacctgatctgaactttgttttgatatgtctcaaccaaggatatccatagtctcttttcatagtcttggtagtgtaagacctgcattgtgaattcactccttgtttgcaccccttcttgaagatatttgttgatctgcaaacttcccttgtcttccgattatcttgccattgcaaaatccgagccaacattatccaaagatcatgttccttatgtcactcatggctgattctactgaagccaattgggtttccaaggctttggttgatgacaaagttccacttgcattagatttcaatccaaagaagagaatgcgcgttttgatcagaatgtgctgataccaattgatgcaaatgctccaagaagtcaaacgaataattttgtattaatgatctaaaaaggaggggtggaagtaattaatgattggatgatggaaggtttggatggtagaagcttttgtggctgaggaaaaatcttgtggagatgtgctactcgtggcttttggaaatgtggagtgttggaggtgtattgtggagatgtgctacttgtggtgtattggtgtatatgaaaagagaaatagtaggatgtttgaagataagtatgtcttatgattctttttgggcttttgttcagaatacagccggttggtgctgctctaattacaccaaattattttgtaattatagtcttctcatgatcattggcaagtggagggcatgagcattccattttagccaaagtatctgtgttagacacgcttagggcatgtgttcaacacacaaatttctgtcttatttttattttagacacatggggacacgcttgtgaaattttttgtaaacaaagattaagagaaaaaacaaaaacataaggaaaatccattttttctaaccaaagataaagaaaaaacataaaaaggtgaagttacctaaatgttacatttcctatacttcttaattaacttaacattttatatttttcttagtaaagtgcatttagttttttattattttaaatttatatatattttaaaataataataaaaaagagcatacctccaacgtgttcatgtcctagttttttgaaatgggcatattgtcgtgtcatgttgtgtttgtgttaactttttagtgaattaattcttctttcgcttgtttagacttctttatttagttttttgtataattctcttgtacattgagttcttattattaataaagaagtttgtctccgattaaaaaaaaaaacaagaaactaatgcccaaagatattaagtttgcaacaaagtgaaaaaagaaacaaaattaagtcaaaatctaccacaagagaaccactaaacccaaccttaaaagaataagcaaacattaagcaaaaaataaaaaacaaattcctcgtgaatttattggagaaacttcatgcatcttggttggagaaacaaaagacttcatgcatcttgaaaccacaaactttcgtaaaagtagcaaatttacatcgtcataaaagaaaattgtcatgaaaaaaaatctttgtcaccagtatcatcagtataattttcctttgcctagacaagtatgatgcttcacttgattcccatagtagcaaggggccaattgaagtgatgaatgccacatcatgtaatcatgtttcattaagaaacttttcatcatgtttaagaaagaaaaccagccctgttttgaccctttcctgaatagacgtgcacaaaagactaataccttgaggaatctcgagcaatacatctagttattcaacttgaaaggctttgaactttgacaatctcctggttccttttgctattgtttttttttttttttgtttttgaggaagaaactgtgttcaacatcttgggctagcttcgataaagcatcaataggccatttgaacttttccttcgttacttgtagaatttttcgaaaatcaacatcctcaatgttgaagtgctcgttttcgaatcagatgcaatagaaatagatctcaatgctctgtttcagtgcgaggaagagccaagatcggcaaatttgccttttgctaatcgttattgtcctcagtcttgtgaaataacaaatcatttaaaatcaatagttgctgattgtggaactattctaatttgattcttcagccatttaatgcattcctcctcaatgttggaccaacttaagtcgtttttggatttcccttcatgtgggtggcaagtaaatccttcacggcgatgctgaaatagtggaaaactttttcgagattcctttggattttggaataatatcgcaaggcagattcaaggcagcctgatgcatcttcttgcaaatttttagtttcaaattagttctttttttaaacggagacaaccttctttattaataacaactcaaagtacatgagagttataaatgagcgtaataaagaagcctagagagcaataagcgaggggggatcagaaggtgcacccaaacatctcaactaggttgacaccctcttagcaccaaaacatcatatcccctagaaataaaatattccaaaatacaatgcctaatatagagacgtgagacagagaaataaagaaaagtaaagaaagggaaaaggggtgaacaaagcagtacaaaggttgagcctatagacaaaagcaagcaaaagctgctactgtgtaaactagactaaaaagaaaatataagctacgctccaaagaaggttggccagagaggggaaaacaaagttgtcaaaatgcaaaacaaagtcaccaaaacagaacatggcctagtgggctggttaagagataaagactacctagttgagacagatcttgagtggagcaatacaccaactccttgtttagagagcaccaagctgttgtgttgcgttcttttcaaagacacaaattattaaaagagaaatacccaaactcttcaaattagttctttatgagagaaattttcattatgctttgtactgaaagtagagacaaagagcacacaccttacatggaaacccgagtaccggaaggaaaaccatgataattttaattttattatttttctaataaatgaatacaataggtacaaagagggagaataaatagaatataatgagaaaaaggaaaagatttaggaaatagggaaaatcttccatttactttccaaaaatactccaagggtaaagtccactaattctaacactcaccctcaagttgggatgtaaatatcaatgaggcccaacttgctaacaccaaagtcgaagtttgatttgagaagtctcttggtgagaacatcagcaacctgttggctcaaaagaatgtatgaatgcatatgctcccactgtcaagtctttctttgatgaaatgtcgatcaatctcataatgttcaattctatcatgttgaactaggttgttagcaagactaacagtgactttattatcactaaaaagcttcaatggtgtctcacattcctaatgacgatccgacagaactttctgaagccaaatttcctcacattctcaaactcatagctctgtatttggcctcagtgctgctcttggccacaacactttgcttcttactcctccaagttacaagattgccccaagcaaaggtacaataaccggaggtaagctttctgtcaacaacagatcttgcccaatccgagtcaatatgtgcctcaatggtctttctgtctgtttttctaaatattcatccctttaccaggtgttgatttcaagtatctcaaaattcggttgacaactttcatgtgttcttcataaggagcttgcataaactggcttgtaacactcgcagtcaagaagatacaggatgagtatgggataagtaatttaatttacccacaaggcgctgatactgatctttatcaataggaatttgatcatcagagtttcctagtttaataggagtgtcagcaggacgacatcctaacatatttgtcttagttagcaaatcaagggtatgtcttctctgagacacggagatgccttgctgcattcatagatctgctacctcgaggcggatttcagaacatacttccatcagggagggaattggtctctggcctagtatacttccttgaactacatcaaacttaggattaagaccaacaagaaagtcataaatcctgtgaatctcttcaattcttgagtactacaaaccatcactgggattatgccaaactatttctctgcataggttcattttctgccagataagagatagcttattaaaaaaaggatgtgacatccatggttccttgcttgcatacatccatggttccttgcttgcattcatgaatctgctacctcagcatgtataggtgagaggcattctgatgcttggagtaaagtgtctggactgtgtcccaaatatctttggctgttgcagcaaatagtaattgcttgccaatctggggttccatactgttgatcaatatggatcgaagaatagtcctttgcttttcaatattgttcctgtgggtcgtctggtggagggcggaggtatatcccttgtcagaaagctaaatttatgttgtccttcaaggaccatcttcaccgactgaaaccatgagaaataggtattgccattcaacttttcctctgaaagatgatacgtcgtagactgagccactgtattagtcacataaggagaggataaattagggaacgaatttaccgaattctcagaatacatcggtacaaaagtattggatgtcgtccctaaggtagcctcaagtgctgctatctgttgttgaagcccttctagttgttgttgagctattcccgagaaagcttgtacgataaggttggaatgtgtcgaagattcaccaacctcaaatgttgagtgaatttgaggattcttaacattgggatgataaccaagatcagtgggtggtatggcttacagatttgatggcagaagtggtggtggctggccgaaattaggtggtagtacataaatcggggcgtggggagcaatataggctgtggatgaagaaaagggttgcacagctggatggccggtgccgtctgaggaggaaaaaccggctcgtggaggtcccgccgcggcgcatgacgcatttttgatggtgcaaacaattgcagaattgacgggaatgcagcttccagggttctttgaaggcggtggaaccattcgttcatggcactactgattcaaggagcatcaacagccctaacactttgtatttagatttctacggttatggttttgtttaacttgatctcttctgtttggaatttgtgttttagcttttgttgtagttgtagactgaatttttttctttttctcttgcacttagtataatactcgtgactttgagcttaaggctcttttattaataataatttaagaggcctgtcttcgactcaacaattttatagctcttcatttccatgttgccgcttgaaagagtgacagtcagaagggagaaagaggagagaaaaggaagagagaacttactttttcactaccagcatcatcattattattgttatcgtagtattttcttttgtattccattgtccctcgtggatgatagcttgttttgtatttggtcttgctaagggtgctagggaatgtcaaacttgttgagataccccgatggcccggttgatcatctagctctttagaattttatttttgcttatactttgagtatagtctcatctcattaattcaatggagaggcttgtttccatttcagaaacaaaataattttttccagaaattttccttcaagatttatggttaaattagattgcctttgtttttccaacttagtcaatttatcatgatgtagttattggaattatttgtttgttattatttgcttgtattgtaattatttatttgttatttgcttgtatttttagcattagtcttttttccatttttgtttgaaacgaacaatatacacacgcatatgtaatattacacgtgtagtatatatactatatatgtacatgtatatatgtgtatatccatttggtccctaaagtcggtgatttaaattgtatccccttgatgagttcccacttgaaatatttccaaaaaaaaaaaaaaacttaaagagaattgttttttctcttcctttttaatcttataatttactagaatgactgatgccactttatttctgcagcttcagcaagtc

SEQ ID NO: 7700 - DNA, 2300 bp, Cucumis sativus
  Intron number 6 from transcript Cucsa.050020.1 (locus Cucs a.050020) derived from phytozome v7.0 (chr-ID scaffold0055 1; pos 167998 to 170297 reverse strand)
agacgtgggagtgggttaatctctcagaggtatatccatctaatacattttatttgaacttaagatacttgcatcctcatttttataatcctcaccgtgtagccatttgcatcacctggttatatgtttccacatctggatttgtgtgaaaattgttgagaccttcaattctgaattaaaaaattcctccatattaaaaaaatatccacgagtgtttgagcgagcttgtgtgcatatcaactaatcttacgagacactctgtctaaccttacatgatctcttctatggcctgaatggttacaccttagatagctcttgtgatatttattgaagcagcactctagtccttaacattttgctgtcatattaatgtgatataaaaaatgaaattataagaaaaaaaaaatggaatgtaaattaccttaatttcctttcagtgttgggtaattaaattaaaaattttttaaattgattctactcatagcccttaaattgttttgacaatatattctacataattttagtttccgtgtatagaactaatgaaaacaataggttgctgtaggcatgttttttggaaatctcagaaagtcatctcacagtcttcatgttttaaaaaagtttgttaagcactttgttggggatggttgattggtttcatatccttttttagaggatcacttggcagtgacaccttccatatcctctttatgtgcctactgcctatttcgttatgcaaaggtactatagttaatcttgtcctgctgtgctatggcggtcttctgtctctctttcttattacatccattttagtagatctctttctgatttcatgtttttggatcaacttcacttctctctttgttgcatgagtctttattcaaattctagtgactttcatactcgaacccaagatttcttaaagatatccttaaaatctatttctattctttgattgctcaaccctcctttttctatcttcctcttccctcatcttccccagattcaagaagttgaaaatttagagatgtaattctctcttagctggtagcatttgggaagattaacatcatggtttccatccaaactcaaaaaaggttttttagtggtttccttttgtgttggtggttggggttgaaaaatctagatcatattttagggaaagatcaattttctttgggtgctagactgaattgtcaggatatggtggataaggtcatccagtctttgactgagatcttcttttgggcatacagtgttctttgctattgattagtatatttcacttgaccaccttttcaaagatcaacacatatggcaactcagctgtaccgaaaattttctgaataatttagaggaagatcatgattatcattgcccataattctttgtggacctcttcctttacagttaagtttcttactcaggctaagctgctacacagtggcttactaacaatttggattaaatcaagtgttagattagagttaccttagaagattaaatattgctttaaatgttataaagttagaaagtagtcacatttgaacttgatgggatcaagttatctggggttttcgttgctaaaagtatgcatgttggagccaaactttaggaaggtgtcctaacttccatatttctaaggactggaaaaggtaaacaacattgaatttaacgaaatataaaggtcagtgggtttggtggaagtgcttggtcgctggggtttcttttcctagtatcaaatttatagttgtatcaagcatgccttttccccttctttacatatgttagatgatatggtcaggccttatgtgaatatccaaattcaagatggtatagttgcatgcgtacatatattctgtgatttgttggattaatgatttagggtgtgtttggaagacattcacaaatgtttaatttaaaaataagttattttggaaaaaacttgagtgtttggaaactactcaaagtagcttttgaagtatatttaaaccatctttatcaaaagtgtttaaataaaaataagttttttgaaaaatacttttttcttaagtcaatccaagcggacccaaaacatgtttaaggatttttcttcagcatgtttttcacccgttgatatatggttgtgtcaatagtgtctaatagtgatgggatattccctaattttatattttttgaattccatactacctatttgaaatgttactagatttaaagatccagagtttttagaaatggagtacaatggttgctagtgcttatcttaaatattctgcccagatatctcctgaggacatcca

SEQ ID NO: 7701 - DNA, 4451 bp, Cucumis sativus
  Intron number 3 from transcript Cucsa.326660.1 (locus Cucs a.326660) derived from phytozome v7.0 (chr-ID scaffold0313 5; pos 59050 to 63500)
aagctaattcattggctgtgtgaggaagaaatacggtaatgaaactttatgacaaaacttttattgatactatagattcgcttctattagtttccatgtcttttgtttctagcatgttcacttattcttcgtctctgctgaaactactactagtgttatcatgctgccaagcttccgctgttaatgactacatttgaattgttcgttttaacaacatatgaatgaaaagtttgtggggttcttctcttctttattgtaatattcagtttagggatccttctagttgtagaagtcttttactttgagcatttttttaaaatcattcatctgcgaaactaaatcaaattacacttaatcaaccaatattacaactctattccaactccagaatggtgtaatgatagagattcatggtgacattgtatcaaaaagttgcaaacgtacaaaaataaattctcattaccatttgtcaatgaacgtcaaacaaaaactttgtaatgaagctaaaccaatgtacaatattatgctccaacttcctaaaggcaatttcacagtcgtaagatcaaagggctccaaatggcatcagtatctgatgatgatatataatttacacttccaagaacacctagagagggaaaaaaacacagcacactgaatcaagaaagagatgtcttttattttgaacgttgtttttcgaatatgaatgacagtttgttgtaattcttttcatccattgtgggaacagggaagactgatttaaataaagggaattgcatttaaatatagaagtggatgactacgaggttggtcatcagtggaaaagttgattgatgaatctccttcgctgatttgagagtttgcttgttaggaataggaagagggatatcagtggaaatcttcgaagcattaaatcagtaacagtcgatttccaaattttctttggttcaaggctcttaaaatattcaggagcctactattattcttctccatccaactgtctctaggattgtacatcttcaaaccagccgcttggtataatatggggaaactctttgagataattatcccctcaacccccacaaagatttactttattgccattttcttttattacagacaaaaaagataccattaaggggataaaagtacaaatagggtgataggaaattcattcaccagtcaagccggattacagcaagcttctccaatggctgttgacataaaaagaatcaccattacaaaataacttgccttgcacttcaaaaggaagctttattttgaatggattctggaacattcttctgtctcccaagcatcttttgagaaaatttatggtttcttttaagccatgtcttcacaaataaaagctctgaatctttctcccgaagaatcttggctttcctcataaagttatcaaaaagcagttggtgtggagattgcctgaaggtacagcagaaactccaatggacaccaaaactatctactaaagttccaaagatttggtctatatagcaatttttaggtttttgtttctcaagcacataaaaccacacctaagagaaagcccaataatgattttccattctttgaaaatccaagccagattccctctcagtcctagagtaaaatctgcatgaaaaatgttaactcttcgcattggcggtgcctctttgcccagtagatttgagaagtttcaaataaggaaggatttttttgttccttaaatgccaaaaaatacaatgtcacaagtgaaaattctgctcttctctaaagtccaaaaatatttatcttagtggttaattgtgatttgcatgagggcaatcatattattcatctccttattagagagaggccttccgaaatcaggactcccacattggagatgaagctctgatgatctttggcgatagtttttttttacctttagccacatgttctaattttcctaagagaaggtttaaagaagtttttgctgcaaagcgtagttctctaatttttattggctggaaagtttcacgtgccttgctagtgtgcttctctttctttgtgaaccaatacaactcattatttgcttgggcatattgtctgatgggactgaggatggtttttctttttccatcagactgtatttgtcttaaccaaatctggagtagaatcatcatttggctggttttctaggttgagtacttgggttactagggaaacatgaaaacagttgggatgtaagtactcttgtccaccagaaacaagtccgtttttccattattgcgacttttaacttccacgaatgcctggttatatatacataaatattattcttcatattggtcggtgtttgaaatgtggacagttcttcattgatcctttggattttgacttcaactagtacaaatctaagagcattctcttttactctaatgtaagcttctatttcacctagctgagttagctgttcttttgtacattcaataaaactgaactttggttatttcatctaatttttagctgttgatcacgtgagggaacttcaaccatcctttcacatatacccagcattcacttctaagcagtgccaaaggttctaatacaaatcttcttatggatctgtggatttcttgagaactttcagctggttgtcgtggaagcatctactcaaaacaactaacctatgtttccaaacctatttgcaccatttacttcaaactgttcttagtcagacctatttcttacgtagcgcgtcttcatcctgttcattccttctaattggttatttcattgcgaaggatctattcttccctcttgatttgatcccctatcttatcaagttatcatctttcaattaaaatccttctgaaggcgtaggaatgattgcctctcttatcatcgtttgacatttctgattggaaggctctattcatgtaggttcttttatttcctccttttgagcttttaggttaggcttctggcccttaggttgttgccttttttcttttatgaagttctgaatatacctattgttaggtgcaaatgaagtctcacgttggcaaatgtagtctcacgttagctagaaaaaggagagatgcatggtgtataagtgaagacattatctctattagtatgaaaccttttgggtgattttaaaagaaaaggtatgagggtttatgctcaaagtggagtcgtaaaatattatatcattgtagagattgttagaggttccatttgtccttgatgttaaccctgtcgtcgttccttataaaaagagaaacattctgtcgacttcactggggatagatagattgtgcttccttccattgtttcttagtgatggcctgttggcatcagtcccctcttacagccaatcaaggacaaaacgggcttcgctagaagaggatggcaacatgagagaagctaggagatgaagaattggattacaccaattacttcgattgtttttcaaattcattttttgtttactttttatttccccccgtcttaagagaaaataaaaaaaaagcagagtgaagaaacatgctttctagatttccatgctcaaaagcatatcaattgggaggcggcatataaaaggagctctatattaaagtccacaagaacaaatttactgaagagtacttcttttccctttttttcctttgaactgacttggtagttcttctaagcatatctgtcagctcaggaagttcagaattgactttgtagttccctttgttgtaaatttcaagacgagagtctggtaaactgtctatcactagatctaaaatcttcatcactcggagagaatatcatgttcaaccacttcattgtaactgagtcttccccaaacttgaactttagtaggtttggggtatcaagcatacaatgtttttgaaaccaagcctgggcgactggctaatatattcaattttgagaagtgacgaaccgcagatatccctctctaccagttccatgaaaatgtttgggtaatcttgagtccacaatgaaaaaagcacttttagttaaatttttttagactacatgtacatatggtaacgatacatttcactacgtaaaaaaaaaaatttacattgcatctaaacaaatgtttttgccctataacacgtgacagatatttttgttattgtaaataaatctattgccattctcaagaaatatttattatggtgtatgcactcccaaatctatagccttttatacatcatttaattgcttcaatggaatgttccttaaaaataatctgtgaatcaaaggaaatgaaggagcttttacatttatgtatagcatctagttgtgcttatctttcaaccagaattagtgtatatggaagggcactaccttttattattattattttatttttgggggttggcatttcatcggttttgctaactagtcaattggtgagtggccttatagggagagagattcagacaagg

SEQ ID NO: 7702 - DNA, 5883 bp, Cucumis sativus
  Intron number 6 from transcript Cucsa.228070.1 (locus Cucs a.228070) derived from phytozome v7.0 (chr-ID scaffold0193 3; pos 54658 to 60540 reverse strand)
acatttttgatttccgcacaggtactgatattaggttcctaaatttaagtgatcgtttttagcttaaaactatacaaaataccctcaactctagggttggtttcacttactcttgaactttcaaaatttgaattttacccttaaattgcttcaaattaatccttcagttaactttttactaaaatgaagacagaatctactaagcgagttctaaaattagaggttcacatggacgttggtggctagtggctagtttcaattattctggtgaaacgttgggatgtgtttatgcttccatgatttcaaaagttatgtcttcatccttaaccaaattgattcaaaacaatcattcagttagtcttttttttctctttgcatttttttttaattacaaggttttttggaaggcttttctatttaaaatgtgtgaaggcttgtttgattctattttgtagcattgttgtgtcaaactaattaattacttattagaactattgaaagcaataaacacgaaaaactaggcttacgtggaaacccgagtaccagtaggaaaaccacgatactgttactcttattattttctgataatttataaacgtacaatgagggagatgaaatagaatacacaaagacataaaaaagaaaaaaggtttatggtaagtcttttcataaatgattttttccataaacaccctacagccaaatccacaaattctaacactttgcctcaagttggggcgtaaatatcaatgaggcccaacttgctaacacaaaagtcagtttggtttgagaagctccttggtgagaacatcagcaacctgttggctcgaaggaatgcacggaatgcatatgctcctactgtcaagtttttttttgattaaatgtcgatcaatctcaacatgtttagcgcaataatagcggctttattgtcacaaaaaagcttcaatggtgtctcacattcctaatgaagatcagacgtaacttactggagccaaatttcctcacattttcccaaactcatggctcgatattcggcctcagcactgcttctggccacaacactttgcttattactcctttaagttacaagatcatcccaaacaaaggtacaataaccagaggtaggctttctgtcaacaacaaatcttgtccagtccgagttagtatatgcctcaatggactttttgtttgtctttctaaacatcaaacctttaccaggtgtcgttttcaagtatccaagaattttgtagaaaagcattcttaacattcaactggtataaaggtcaatctttgttcacaacaacaaatagcagaaaaagtttttgaatagtcaactccacaggtttgagtaaatccctttgcaactaacattgtcttgtgtctgtcaagagttccatatgctttgtatttgagagagaacacccatttgcatccattgttttgtgtcccttggatagagcacaaatctcccaagttctattcttttttatagccttcatcttttccatgatagcattcttccattcaagacactctaaagtagtatagatatttttggtattatgttagagtcaaggcttgctgtaaaagttctgaactgtggagagaaattatcataggaaacatagttgaaaatgagatgttaagtgcaggatctggtaccttttctcagagcaatgggaatgtcaagagagggatcatactcgttaagtttccctgtatgaccttgtccagcttcattattactggctcctgctctgacctcaatctcatccccactgttcttttcttccatattttcaagaatagcaacatgagacctgtcattctcactcatcttattatcagtacaagattcaataggattttccataccttgatctcgaagagttttggagttttggactggagccagcgactgactagtagaggacccaacttcctttatgagattcctcctatcgttttttagggaacttggtttgtgggtagggctatgggagaggatcgacgtcagacacggtacgaggagtatgttagataaatttgaaggtgctgatagactcttcactcacactctctccctgaagatggctaacaggaaagtagggtcactcctcacagaaagtaacatccatagtgacaaagtatttcttggacgaagggtgaaaacatttataattgctttgatgaaggggatacccaacaaacacatatgcctaagtttgaggggtaaatttggtctaattagggtcaaaattatggacttaagcggtacaaccaaacacacgaaggggaacctcagaaattagataagtagaggggtaggacttcttaagacaatctaagggagtttgaaggtggaggatacaaaaagacattctttgattaaataagctactgtaagaatagcatctccccacaagtatgaaggaagggaaatagatagcataaggaaatgttccagaagctgacgttttttcgctcggccacccctttctgttgaggagtgtagacacacgagttttggtgaacaatcgccttggaggctagaaattcactaaggttatggttttggaatttccgaccattatcactccaaagaatttcagtttttgtatggaattatgtttaatggtgtgatagaagttttgaaaaatagaggaaacctcagatttatcggtgataaggtagacctaggtaagacgggtatgatcatcaatgaagtttacaaaccaccgtttcctagatgaggtggtgaatttggaaggaccccaaacgtcactatggataagggtaaacggttgtgtgggtttacatggttgaggaaaatgaaacccgatgttgttttgcccggatacacatgtcacaagatagaggagacatcaattttagaaaaaagatggggaaacaaatatttcatataattaaagtttgggtggtccaactgaaaatgtcataacatacaatcatgtccagaagtgctaaaataggaagacagtaaactatccctagagatacgactaccggagatatcatcatcaaggatgtaaagtcccctgctatgccgggcagtgccgatcgtctttctcgagctcatgtcctgaaaacaaacaattcaagtaagaagattgttttacaatgaatctcacgagtgctcttgcttctagatagcaaattgtaagacagtttgggcacatgcaaaacattatggagagcagaatcgtcaaagggaactatttttcctttgctagcaatcgaggctatagagtcattagctatccagatttttcattaccggcacaaggagcataaaagataaaatgctctgaagatcacttgatttgtagcccttgaacttaaaatccagggattcttcccatcaacactaataagcccaagggactgaggaatacctgactgagtaatggcagctagagtaggagtcttggtctagcttggagctgctagttgactatgaagtgcgggcaatggtagtcttactaacgtgggcacgtcctgagttctgtttctcgttggagaactgttttcttaccacttgggggatgatcgtggagtttccagtattgatccttggtgtgccattttttcttgtagtgctcacaaacaaggattgattttccattatttttgtcattattctgagtcgaggatcgggcactaacggtagtagagtcaatggcaagggtagtcagtatacccatgacattagtacgaacttgttcaagacagactttaaaacacacttccattagggaaggaaggggtttttgtctaagcatacggccacaaacattatcaaatttgggataagccttgcaaggaaatcataaatacagtcagcctcctcaagtttagtgtactgtatactgttgtttggtgtgtcccaaactgcctccctgcacaaatttgtctcttgctcgaggagagagagcttattgaaataggaagtcacgtccagggtcccttgtttgcaatcacggacctgttttcttagtgtatacaatcgagaggcattttgacgcttcacgtaaagggtttgtgttgtatcccacaaatattttgcagtggctgcatacattagaggcttgctgatctaaggttccatactattaatcaggatgaaccgaatgagtgagtcctccgctttccagagtcgttccaaggtgtcacctggtggaggacgaaccgtctctccagttaagaatccgaactggtggtgaccttcgaggaacatctttactgactgggaccatgaaaaataattttgcccatttaatttctcacatggaaaattccttgtagaggattccaaacaactagttatataattcgaaggcaaattagggaacaaagttactgagttcttggaatacattgacaacttggttggtttggaatgcgctgaagactcgtccgcttcaacctccgatctgttatagggttggccagttttgttaccatagaaaaaaggttgttgtaaagggtcgatggatagcagagccttgctgtacagatttgacagatttgggttgctgtctggagggcataggccgcacgtggggctgcggcttgctggaaggctaacgactgttgggaatgccgatgacgtgtagaggagattgggctgggcggttagttgaaacggcgacggcgtgtgggcccacgcgcctgacaggggcaacgcttgatgtagtttctggtcggacggtggtgggtacggcagtgaggttggtcccattgtgtagatcgatggtttttgaagctgttggagtagtttttacatggtggcggcgatcccgacggctgtagaagcttctggttcagtctgggttttagactattttctagggtttcattattgtttggctctgataccatattaaaagctataaacacgaaaaactaggcttacatggaaacccgagtaccgggaggaaaaccatgatatagttattttattattttctgatgaatgaatacaatagctacaaagcggaagaataaattgaatacaccaaggaataaaaaaggaaaagatataggaaatatggtaaatcttcccgtaatctttccataaattctccgagggccaagcccactaattctaacaagaacttgaatattattgtgacttgtgacgttggatcattagttatcttatcaattgcctttttcatgaattgtatggttgtcattttgatggttttaaagaaaatatttcacaataagcatatgaacaacatatatttatttctataaagaaaaagatatgagtccttgacgttttgtgtcttacttttttgtaaattgacgtgttgctatgtcagtgtgatatcgtattcgtattgcgtgtcagtgcttgtgcttcttagccaagacctatgcctagatagttttgtcaagtttaaaggattccaaattagtacagcaagagaatccaatcgatgagaagatcaattttgtgaggcatggtttgttctaggttagaaaggtcaatgaagtggtttccttggactttaaccatttgttggttgtatccaaattattttcacccaatatatcttttttggaaagttctgcttgaaagtaactaaagaacatttcacaatattaagcttccctttgaagtgtctatttagacacaccaatatacaattttagaattctctctttatttaattattaataatagatcttcaaaagaaaaatactatttagaattatctactcattttcacagaaataaatatattgatacttaggtaatagatttcatttcttctgactgttttgtatgtaaaaataagggatgccggactgccgaactacaatttaagctctatgttcattcttttgcag

SEQ ID NO: 7703 - DNA, 1450 bp, Cucumis sativus
  Intron number 1 from transcript Cucsa.109920.2 (locus Cucs a.109920) derived from phytozome v7.0 (chr-ID scaffold0093 4; pos 814457 to 815906 reverse strand)
agaactcaagctcgacttttaggtcattccctaaggtatttcaattccatcctctcattatccttctggggttttgaatttttagtgtttttgagaaattatatgatctcatcccttgggattctgttttgattattacttgaaatttagggttggattcactctctgcttctatcttgaattttcagttgtttatactgccgagattcggttgattttgttaaattagcctgcttggaagcttctgtgggacggaattcatttgttctcagttaactgcagtgttttattctttccttggctatgtatattgacgactggggtaggcttttgtattaaggacttgggagagaccttaataagtgatatgtcaactaccaagcattggtcatgcttggtagttggttctgctaattgccatattggtcggaatatgacaacaaactggatttgtctctggcacatgtttgagagtgattttaaaatgctttaaattgagggattgaagatgtgcttttgaagttgttttgagtaggacgaaagtaattttaataattgcaaagcaactcccaaacatgcacatgcacttgcactcatccgaaatgcttttcaaagggtcatctcctgtaaccttgagccgttagtcgatactctattaccctatatcaacatacaattttctagatattctgatgaaagtagagactgaggaagattccacgcttgattattgttcggtgcactagaagttgtccgataaaatgcttatatcataaacgtgacaaattttatacgggtatgcaagggaatctgagattgcacggccttccttcttaggacttagaagggtctcctgactacgatggggtgagagctggggaatttaacatctttttagcttgtaggtttgctgcttgaaaatgaaatgaaaatatacagaattgatgtcgtcttctgattaataggaaatataaccatctctttacttcctttttatggaaacctctttacttccttccagtgtgatttatatcaggtttacatggttaagttacaaatttggtctctatgattaggagaaagttaaatttagtccctatgggtttgaaagttaaaatttcatttcttccttatggtttgatgaaaccttacacataatccttatgtgttgataaaatataagggatgaatggtaagttttaaaccatagggactaaattctgactttctctaaactatttgtattgctggtatatatctcactatttgctgactatgactcgaggtagttttgttaatttgcatgatgtttatgtagctcactgtttccactttccaggatgtctggttattgacgacctcatttgtgctgcacgaccatgtgtatttacatttgcagaaattgataactgttagctccttcatttcttatgcagtttttgactcgatc

SEQ ID NO: 7704 - DNA, 6575 bp, Cucumis sativus
  Intron number 3 from transcript Cucsa.149590.1 (locus Cucs a.149590) derived from phytozome v7.0 (chr-ID scaffold0111 0; pos 429142 to 435716 reverse strand)
cgattaaaagaagggtaaactactttgtttttcttctcttacaattcaacatctctgatgttattaaaaacttctatattgtgaattttattcaacttatttagttttgctcgatatttgattttcaaagaggaaaattacatgcagactccttgaataacctcagacttcaataaactcatggttatgccctgtttttttacctaccaccatctttcaacaatagtttgtttttctctcttctataaggttgacccttgctgttcctctatctcttgttattattccaattgagatatattgatttagcatcaactggctgactcagtttagcttcacccaaaagcgttttcccaaagtcagctggtctgtccaacaattttaataactagcaataaaattcaacacccacttttactctttcctttctgaaccgcagaatttcgtctcatactcctgtcaacccatttactttagccccttattccacacatttaaaatgaataagttaaactaccaattggtgttgaattttggtctctatattcctctttgaaccacaaaatattgtttgaggattgtacatgtcttagacagggatggagttattgaaagtagagatgtaggacaaacacaaatttacgtgaaaattctagtacaggaagaaaaaccacgatactgatatttcttattattttctcatgatagtaaaggtacaaaggagaaaatatttataggcaacacgagcctaattaaaataataaaaagttagggtaaagtaaatctcggttacccttgggctttcaacatgacccaagtccactatttctaacacttcctctcaagttaggacgtaaatgtcggaaagacccaacttgctaacacatgaatcaaagttttgtctgaggagctcctttgtgagtatatcagcaatctgttggctcggtggcatgcaagggatgctgatgttaccattgtctggctctctttgataaagtgtctgtcaatcttcacacgattggttctgtcttgttggatcgggttattggcaatgctaatagttgccttgttattgcataatagtttcataggcacctcatagttctgatgaagatcagttaacaccttctggagccagattttctcacaaatttccaaactcatatccctgtattcggcttcgacgctgcttcgagccacaactccttgcttcttacttctccaagtaacaatattgccccacacaaatgtgtagtatcccgaggtggattttctatcaacaataaaccttgcccagttggagttagtataggcctcaatacacatttttgaagtctttctaaacctcaaccctttaccgggagttgcttttaaataccttagaattctgttatctgccttcatgtggccgtcataaggagcttgcttgaattgactgacaatacacacaacatcagagatgtcaggccttgtgtgagacaagtaaattagctttctcacaaggtgcgcatatttctctttatcagtaggaatcttgtcaccagaatttttgagcttgacattgaactcaatgggcatatcagcaagacgacatcccatcatacctatttcatctaataaatcaagagtgtactttctctgagacacggagatgccctctttggacctagcaacctccatccggaagtacttcagattcctcaagtctttaatttcaaactcatcttcttttttagttggatgatctcaacagtatcatccccagatagcacaatgtcatcaacgtagacaatcaaaactgcaattttcctagtataggaaacttttgtgaacaaagtgtgatcgaagtgccttgattgtttccctaagacttgatgaaagtggtaaacctatcaaaccaagctctcggtgactattttaacccttacaaagacttctgaagcttgcaaagctgattatcaaactgagcttcaaatcctagaggacccatatacacttcctcttctaaatctccattcaagaacacattcttaacatcaagttgatataagggctaatctttatttataataattgacaacaagactccaaccatgtttaaactttgcaacaggggaaaatgtctctgaatagtcaacctcataaatctgagtgaactcttttgcaactaactggaccttatgtctgtcaaggataccatatgctttatacttgagtgcaaacacccatttgcatcccatagtcttgtgtcccttggagagtgtgcaaagatcccaggtcttgttcttttccaaggctctcatttttttcattacagtagtctttcactcagggtactctgaggtaaggtggatattcttgggtatcgtagtagagtcaaggttggtagtgaaggctctgaattggggtgagaagttctcgtacgaaacataggtaaaaatggagtgttgtgtagaggatatggtacctttcctcagtgcaataggaagatccagagaaggatcatacttgttgatgtttccctaatggtcttgcttggtttcgtcttcagtagattatgcaacgaactcattctcatcaaccttacctctttatctgtaatgacctcatcaacattgctcttttcaaccatctttaaggacaactatttcatacctgttatttgtagatctgtcattctcacccaccttactgtcgatacatgtgttagtagaatttgtctcgaacttgtcattctcactcattttgttattaatatgtgagtcaatgaaattagttataccttgatctcgtaaaagttcagaatcttggattggagtcggctgaacagcaagagacccaacttcctttatgagatttcatatatagtaagttgtgtagggaacttgtctgtgggtaggactgttgtgtgagaatttgtgtcaagcaaggtaactagagtataatagatagactctaagggaaccacatagttagactcttcgcttatactctccccctgaagtaggctaacgggaaagaaggacgatcctcaagaaagatgatatccatggtgataaagtatttatgtgaggatgggtgaaagcatttatagcctcgttggtgcagagggtatccatcaaacatgcaagcttgagcctgaggggtgaatttagttcggttaggaccatgactgtgaacataggctgtgcacttgaagggagacattagaaatgagatgggtagagggatagagttctttgagacattctaagggggtttggaggtgtaggatatgggaaggtatttggttgatgagatgagctgcagtgagaacatctgcatagatagaaaggaagggaaatagacaacataaaagaacggacaacttccaaaaggtgacggttctttctctcagcaaccccattttgttgaggggttgtaagcacaagaactctggtgcaattcccttagaggacaaaaacttgttaagggtatggttttgaaactcacgaccattactactgcctaggattacagtctttgcattgaattgcgtttctacggtatgatagaagttttgaaatgtggatgcaacttcatatttgtcggagatgaggaaaacccaagtaagacgggtatggtcatcaatgaaggtaacaaaccaccatttgttagaggaggtagtgaccttggatggttcccaaacatcactatggacaagagtgaaaggttgggttgacttatatggttgtgagggaaaggagactcgatgttgtttagtccgaatacacccaccacaagacatggtagaaatatcaactttagaaaaaatatgaggaaataagtatttcatatattgaaaattgggatggcctaaatggaagtgccacaacaaaaagtctttttgaagcagtaaaatatgaagataaaagactagttttagaaatgctactagtggaggcatcatcttcaaacaagtagagtcccctactgtgctaggtagtgccaatcatcctctccaagctcaagtcttgaaacgaaacagaatcaggtaagaatatcgaagtgaagtttaattcacaagtaagcttgcttatatacattagattataggaaattcggggcacatgcaacacatgatgtaaagttaatccttcaaaaggaaaaatcagcctcttcccggcaatggaagccatggaaccatctgctatccatatcttctaattatcagcacatggaatataagacacaaagtgttatgaggattctgtcaaatgatcactggcgctagagttcagaatcaagggattcttcccatcaatactaataagactgaaggatcgaggtatacctagctgggcaatagctcctagcgtagtcggactggaatccccacatagtttcatttgttgttggaaggatgtttcttacctcttgggggacaatcatgtagtttccaacactgctccttggtatgccactgtttcttgcagtgttcacagacagggattggttttccactatgcttctcactgttatgactagaggacctcacgctgaaggcaacaaaatcaatagcggggtttgtcagactactcatagcacttgtacgatcttcctcaaggcgaacctcagaacaaacctccatcagggagggtataggtctttggctcagtatacgcttgtgaacaatatcgaatttagggttgagacttgcaagaaaaacatatatcttatcaacctcctcaatcctggagtattgtatgccatcactgggacaatttcagacaatttctttccatgagtcaatttcctgccagataagggaaagtctgttaaagaaggatgtcacatccattgtcccctgtttgcactcgtgaactagtttttacagagtgtataaacgagagacattctgacgcttggaatacaattgttgagtcgtatcctaaatgtcctagcgattgcaacatacagccttacttgccaatctgtggttccataatgttgatcaatgtggaccgaataagagagtcctcctctttccagtattgttcctgagggtctcctggtgtaggacgaggtatcttccctgtcaagaaaccaaatttgttgcacccttcaagggtcaatttaatagactggaaccacgaaaaataatgttgaccattcaatttctcccttggaaaatatcttgtaaattgtgccactagattagacacataagaagaggacaaagcaaggagcaaggttaccagatttttataatacactggtgaggtcaaacggttgttggacggagcccttagcgttgcctcaatcgctgcaattttctgttgtagtatgtttagttgatgttgagcaatactaggagacgaaccctgctcatgggctcttgactgcgttgaggacttagctacctcaaagtttgagtgggctggatttccaaccttctggcagccactagggtttgtggctaacccaacgagagagctaggtggcacatatgagggaatccagactggcgacgtgtaaagggccgtgcggttgaaggttactggttgttggatggttgcggctgactggtgggttctgaagacgtcagaaccactcatttatggtggtgctaattcaggcatcaactgcggcgacagcgacggctgcactgatgtcgttggctgtcccttctgctgggttctgtcaagtgcttgattgtctagggtttcttcaatatcccactctgataccatattgaaagtaggaatgtagaacaaacgcaaatttacgtgaaaagcctagtactgggagaaaaaccacgatgctgatatttcttattattttctgatgataataaaggtacaaaggagagaatatttaggcaacttgagcctaattaaattaataaaaaattagggcaaagtaaatctcaagggctttcaacatgacctaagcgcactatttctaaccggtatcgtctaaacttgagatgaattgtcattgattggaacatttaggtccgtttgataagtgatagccatgtattttgttttttgttttttaaaatcaagcttacaatcactacttttacctatagttttcttgctttactacctattttgaacacgttttaataaaactacaaaatttagaaggaaaaaactgttttttaaaacttgtttttgttcttagaattttgcttacaattcaattgtgttgttaaagaaagtggataattttttaccaaaagaatgacctggaaacaagcaaaatttcaaaaatagaaattaaagaacaaagtagttatcaaacgaaacatagttattagtaagtaagcaagtttacattgttacaattattatgcatgtggaaatcattgagcgagtatagctgattagtttcacataccctctacatggaattccctaacacagattataatgtccattggatgatgtaacagatttcagttccagtttgatagttttaagtactattgctaaatgtgaaacgatatttaaggatagtgattatttagtgagtgttactgtatattcaaatgcaggtacataaaggagggtagcacggttagtgtt

SEQ ID NO: 7705 - DNA, 5353 bp, Cucumis sativus
  Intron number 6 from transcript Cucsa.067560.1 (locus Cucs a.067560) derived from phytozome v7.0 (chr-ID scaffold0069 9; pos 50877 to 56229)
tagaattggtcgggcaggtcgttttgggcgcaagggtaagtttctgtgtctattatacttgggtacatgtttttctagattattgtaatcttcctgccctaaccttggatatgccttcatgtcttgattattgaagctaagcaactttattggggttagattcaactcttaaaatagctatttaatattgcatcatccttacgaatctatttctttgtttaaataagtgaaaggagtttatgaaaagatacttcttgaatcgaattactcaattcaaaggagccagcttttatactggaccttgaaccaaatgaatgcaaccatgagccacctataggttaaaagaattatcacatggtagttactaaaacttaaatgtcagcctactacaacataactgaacaacaaagaattaaagtaataataagtctcgaacagtccctaacaagaaactatgtaaattcccccaccaagcaaataaaactcctcctcgagttagtcagagagctgaaaagaatctggagccaagtattctgaaacattaaaaacaggactaatcctcaaatcttctggaatatcaattttgtggcgttgtttccatatatcttcaaaatgtgaaaaggtcccaacttcttatgctttgttttctgtaagtactcactggaaattgagattttgttaagtgaatcatggcaagatcatcctcttggaactctttggtgctcaaccttctgtttatgggtagtagtcatcttggaaatttgagtagccacattttatgtaattcaactctccttttcgccacaatacctgcttcttggctaaaatcaatagaggaatgaatattagtcaagtcaatttaatgtagacaatttcaaatagtgacatccctattgtcctattcttcatatgatccctattgtcctattcttcatatgattgtaggcaattttgcttgaggggagagatcccattgttttggtcgatcattgctcaagcatcgaattagattaccaagaactcgattaattacctccctttggccattagtttgaggatggctggttgtgcataattttaacttgcatggaacttcttccacaatgccttccaaaaatagctaagaaatttaatatccctgcctgagacaatggattttgctatgctgtgtaatcaaactattgaaagaagaaaagagaagaaacaaactattttacgtggaaaccctagaacagggaggaaaaccacgatgctattttcttattatttttctatatctcataatgatatagggaacatttatttataggttgtagaacctaaaataaaaataataaaagataattaggacactataaaatcttaacaaactctcgggctttcaacatacaacaagcttgctaattctaacacccccctcaagtcaggtcgtaaatgtcataaaaacctttgtcttagaagcctttttgtgagaatattagcaatttgttggcttgatggtatgtaaggaatgttgatgctactattgtccaatttctctttggtaaagtgtctgtcaatctctacatgtttagttttgtcatgttgggcctggttattagcaatgttgatagccgccttattatcacaaaaaagtttcataggcacctcatagttttggtaaagatcagataacaccttttgaagccaaatttcctcacaaattcccaaactcatggctctgtattcagcttcagcactactccttgcaacaaccccttttcttgcattcatgaacctctttccgtaaagtatataggcgagagacattttgaagtttggaatacagtttctaggctgtgtcctaaatatccttcgtagttgcagcgtagagtaaaggtttgccaatctatggctccatgctattgattaatgtgggtttaagaagagaattcttcccctttcagtaccgttcctaagggttcccaggtggaggactaggtatttcccttatcaagaaactgaatttatgccacccttcaagaactattttcactgactgggaccatgagaaataattattgttcaatttttccctgaaaaatgtcatgtagactgtgccactgtattagtcacgtaaggagaggatagagaggggaacgagactatcggattttcaaaatacataggtcgcctaggagtattggatgttgcccctaaggtcgcctcaagtgccacaatctgctatctaagcttctctagttgctggtgagctatatttgaagaagaagagattggcacgttagggttggaatgtgtcgaagactctccaacttcaaatgttgagtagatttggggatacccaaccccgggatgatagctagggtttggaacaaaatcaatggatggcaaggcatacaacttggtcggcagaagcggcggtggcttgacgaaggtaaatggcagaacatgaagcggtgcgtgggtggcattaatggttgcggatgaaggcaagggtggcagggatgagttggtcggctctttctgaacgagatgggtaggttcagaggtctttggcggtaaggcgtggatcacgtatggtggagaaaatgctgggttcaggattgtcggtgctgtctgaagtcctcgaaaccattcatccatggcagcaccaatacgagcattgacagtggtggcaacgacagtgctaatggcggctgtttcctctggttggtttccagcaaatgtttgaccttctagggtttcttcgacaccttgctttgataccatattgaaagaaaagagaagaaacaaactattttatgcagaaaccctaaaacagagacaaaaaccatgatgctattttcttattatttttctatatcacataatgatatagggaacatttatttataggttgtagaacccaaaataataaaaaaaaaaatagttagggcactctaaagtcttaacaaactcttgggctttcaacataaaacaagcctgctaattctaacacaaacaatttccttaaaagatagattagcattagccatataagttgcatcggatgttttcttgcaaggttaaaaaatgagacatgttgctgaacctatcaaccactacaataatcagctgagaaccccattagacataggataaaatgcatcgataagtcttcccaagtactcttgagaataggtaatgggcaatagagccacgcgttgtgtttctgcccttttgatgtttggcaagcaaagcatattctaacatagttagagacggcttttctcaattgaggctaaaagtatctatcactcataatttggaatgtgttattgacttaagccgcctccagggaattctttgatcaatgaatctcaaagaaatttatgtggaatacacaattgattgttcttaaaaaggtaaccattgactatatggaattcaccacaattgacacgaatattacaattatgccaatgggtaccaaaatcaacatcgtttggatataaagatgtgagatggttgtgcgtgaatcaaacctttggataaatgatgaccaacgagcatgcatttggttgatagactttagtgtctttagacatcacgttgtcctagtcttccttgtctctctccacattaatggtcattggaacctctttcacatcattaatactttctttgaaagtgtccactaagaaccctttatctatcacagtttatttaatgcgaagtatatttaaagaattcgacaaatttacccagaagtgagtacgcactgggtaaagatggtggaataaaacccaaagaggagtgagtttgagataccattggggattcaaaatgtgacttcgctctgacatcttccttataataaacagcagctgtgaaggatctccaacaatttctgttcagaccagcagggctatgattgtttcttcttccacctgtagaaggccatactgctatctccacgtatcatctatcttggatcgaaatttggccagacaaataagtccttactccattttgttcttaatagagaagaaaatgtaagattgatcctgcagaagttcatacaatctttcttcaacccattgcatagtttctggactaacggtagttttctagtattttttcaaatcttccacagaaaaaccaaacactttccaaatgcgaaaaaaaatagttactaatattgcagcttttgatttccatgataacaaaagtggggtttaaatgtctaattgagggaaaaggaagtatggtgataatgtgcaaggaataaccagaaaaattggagcagcccaccagcgttactgctggggaggatagaggaaataggagaggggatagaaggcagcatacgtactggcattactttctctgtatctgtcactgtaggctcttaagaccattgtagagggttgagtattaaagaagtatgttactgaaaggctcttaagaccattggttgatcactagaaggatcgttcgcttgaatttgtttagtgaactcgatgttatttgtttgacaaggggcagatttgttatctaaaaaatttgggcatattgatcttcattttatattctcgttgatgttcttgatcttcgcattgcttacttcttaaaaatttctgtcccaaaagatcaccctcatccgaagaagatttagaatcttgatcttgatcgtgctctaaggcgctatacatctagcttcttggttactcagttgtggttgtgtcattgttcccatcaggaaatgcacattttgtccctaagtgtcaaaatatcatccattgaattcttgactaccagcaagcacagtcattgattataccggaggattaagttgggctttcatatccctaactctattggtagttgcgacgtcctttccagtcatgagctccgcagaatcttggagctatctgataccagcttgatgatgtaaacaacttgagggagagagattattcataagtacctcttaaattgaaaggtgccagcttttatgagaaaattactactaccttgattatttgacacatcattaaatatttaatgtgtagacctacaattcttaataccttcttaggtggcaagaaataaatagaggtaaaaaaaaatttcctcacactggaccttcaaccaaattaggacaactaaaacataacaacaaacaatattatgcaagtctcaaacaagaaactacaaggttgctctttttttattgatttgcaaactcttctgtagtttgaatttgcttagaaagatccttaattgaacttttcttttgatattttgttaactgaaaactcacgactgttgtgttattctacaggagctgtgtttaacttgctgtgtggcg

SEQ ID NO: 7706 - DNA, 907 bp, Cucumis sativus
  Intron number 6 from transcript Cucsa.123230.1 (locus Cucs a.123230) derived from phytozome v7.0 (chr-ID scaffold0100 0; pos 505483 to 506389 reverse strand)
atcctttaaccaggaatagctttcttatctgggtaagcatttgaacttgttttcatttagacaatgccgcatgactgcatctattcatagacccaccactattttggttatatctactcttatttcagccgtgtatatctgcaagggctacttagtaaaaatactgggtgttttcagaccaagtatacgctttaatgagcgtacgtaattgatggagaatggggaacgggcaaacagcaacccctcttttaattatcttatgtttttgtatatataatagagaacaatgagaagttattgacatactttaaattttgatgctaaaaactacatatcaactgaatttggtatacatatgatctgttcttactgaaccccaatataccctttttaccctattctgaacctctgattcaaatgatgtgttttatattcctggttaattagtttggagttaccaacaaattgttgactatccagtgagagcaattgaaattgtgaattagatttcttgaagtgatggtcaatgactatggtcaattgtcagtccagtgatcaaagaacaagttgtgacgtcgaatgctttttgaagttatgatttcatgttttctttaaaaattaaatattaatgtctaatgtgatttctaatcttaaatgtcttagaatctgttggtagttccttaagattatgtctgcctcctaatctggtggaaaccctctgtcatttgaaaaagaaagtgttttcctttgaacttggccttcatatacacctgatgtattttagtccttttcttcctgtttaattgaagttatactgctattcacataaatatcgacattaactcttctttgacatgattatatgagtgtagacctgtttctttaggcaatttgggcgttctgttgt

SEQ ID NO: 7707 - DNA, 4559 bp, Cucumis sativus
  Intron number 13 from transcript Cucsa.114410.1 (locus Cuc sa.114410) derived from phytozome v7.0 (chr-ID scaffold009 62; pos 258360 to 262918 reverse strand)
caaattctccatcggttttccatccttatatcaaggtaacaagaaaacaagtgacctggctaaaatacattgtagaatttggaaatttgtactttttctgggttaaaagtaccattttggttcttgcatttgggggcttatttattttttaggactcttcaatacgtttctactaacgaaacctaaaatgcaggtttcaaaatgttattttaactttttttctttcccagtgagtatagtttcttttccctagttaaacttgcatttctgcgagtagtgtaggagtgttactatcaagattaggtgcaatgaaaacaaattacagagctggtagtcattttcagctgttatggaggagatccctacagcaaacttaagaagcattattgagtacactgtcttccaaacttgtctacatcttgataattacaatgaattgaaagagatcatacaaaacaaggagagatgagatatctacatggctcaagggctacagaaaggactttcaattatccgtaatatgtacaagatcataattacaaaaataattggaaagagaataccagatggaagcatggagtattatggaatcccaaagtccttctggttgtcttatcttttaatacatttcgaagtatgtccaactgaatgttcatttgcccatcttgtgatgttaaagtcactcccacacgccaaggctcatgaattggaaagagaacaccaaagttaggttgtcctatattacaccttttttaggtattcaacgacgagaattctggcctcaaatagagttcaaccaccccataagagtgcaatggtattagcaacattgaaaccaagcatgaaagcatgaacaatatctacatacttttgcaagctatgtcaggtgtgcttgcttttgttttctactcgacttttcgcactttgaggttcattctgatgttgattttaatctggccataaattgggggtgtaaattgcatccatgctttcttgagaggggaataacggtacgaaggaacgaagaccttttagaacttgaagggatagacctcacttccttatttgatgaagccgtcaccaatcctctcaaagtacccttggaatttcaacctccgtttttggcaaggtttcttttgttgcaattggaaataccttggttggcagcttaaccttaaaaaaaaagggtagggagataatgtaaagataggagaagagttttgggtattcctcttttggtggaagttccgtaatttgtgtctttgaaaagaatgcaacatacggcttggtgctctctaaacagtcagtttgtgaattactccactcaagttctttgtctcaactgggcaatctttgtctctcaactcgcccccaggccctgttctattttggtgactttgttttgcattttgacagcttcgttttcacttctcttgccagccttcattggagcatagtttatattttcttttggtttaatttacacaggagcagcttttgtctttaggctcagcctttgtactgctttgtttgccccatttccctttctttattttctttatttctctgtctcagctgtctttattaggctggactatgtctccattgtatttgacatattttattttctaatttttattgggatatgttgttttattgctaaggggtgtcaatctggttgagatgttcgagtgcaccttcccttcacttattgctctctaggcttctttattacactaattgtataactctcttgtactttgaggagttattattaataaagtagtttgtctccgtttaaaaaagaagattaacggggtagcatgatagaccaaactagttctattggagtgtcgacctagttgagatggccctgtgtacctgctgatccttaggttctttttctttttgtttacatattgtactttgagcttttgtctcatttcattatcttaattaatagaatgtttctctttaaaaaaaaatctctacattctacttaggcaaccaagtgtagattgttctctaatgagagtagtcgaggaatgataccctctccttatggtctctctttctgttgactattgatagaggatgagattaccgaatttcagaattttctgtctgatttcagacacaaggagttttggaagctcaaattgacaaatttggtctttagaagcttctgggatgttcttggttaagtctctttctgaacacttgactgcttgtcctttggataaggtgttgtttaaatctttatggaagacaaaattcccgaggcgtgtttatttacttgcttaaataatgatttttggttatttgaattgttcttcaggaatgcaatggaaacttcacttttattacttgtcttcttatattttaatctttgtatggccaaaaatcaagatttgcaacttcttttctttcgttgcttttatgtaaaacattgctggaggcatttattctctttcttcaacatcggttgggtgtttggtggtaattttcgggaaaatgtggtgcagattttggtcggtccagctttgaagcctggctctcagctgaattgatctaatgcgcttaaagccttgcttactgaaatctggtttgaaagaaacaaaagggtctttcacaataaatcgatctcttggatggatcgttttgaaatttgtaggacatgcttcttcctggtgtagtcttttctagtcttttacagacttttccatttaagatctatatgcttaaattggagttctttttttatccagcttaatgttttctttgtgttgtattttctctttatgaacaatttatttctggattggtatggttgatttagtagttagattttgttgaacgcaacgacctctatttcttcgattctattaacttgaaaatcttcattgtttgtttctttcatttccacaaagtcggcaactttgaaggcaatgaggtcctctcacttcaaatcaagttgctgagctgttgtgtcgaactcatctttcacactttttttttccgatcgtgtcttcttcattcaaatcatgatcttttctcctcacatgcaacttcctcttcctcatttaggttagggtttgaagtgctgtcagcttttcttctttcgtgcttctatcttcatcttaaacacacgccttttcttctttatctctactcgttttttcttcaccaaatatttttgtatttcactcgagaatttcgaccatgtacctttcaatttttttgaatgatttttttaattttgtcgatttatttcctttttgagctcttgccattggtacaaaagtctgccacccaaagatacgaattttgggatcaatgcttattttcttctatgttaccgttgtgtcaagccaattgtgaagacttgcaacacctactgtttgagtgttcatacacaagcaaatggtgatggaagttattttccttcaatttatcatgggtttttgagaagctaactagagataatatttctcaaattttgattggtcttctactctctccgaaagcttagattctttggtctaatgcagttaaagctttaatttcagaaattttgtctgaacaaaatcagagtttttcttgataagcccttggactggacgtatcttctttgttctaccaatcttctagcttcttcatggagtacccaatcgaaaccttttgctaattactctatttaagatatttgtctttattggagcacttttgttttttctgtgtgcattcagaagttattttaagttgatatcttttgtataggaatgtgtcgagggtgctatggatgtgtcaacctaattgaaatgttcggtgcacctcctgatcttcactctatgttttgctgtatttttgtccttttgtctttgtgtactttgagcattagcctctttcatttcattaatgaagagttgtgtttacgtttaaaaaagttatgaatttgatcgggttttgagccattttttcaaatatttgctggatattggccgcttcttccgttattccctccaaccatttagtgttggttgcttcttcccttattccctccaaccattcagtgttggtgtagaaattataaatgtttttgaatagacttctgcaaagatcaaagaacattaaaatttgacacatgaacaaatttctagatggtagtgaaagagaggctgtttgtgctgcaagagaacctcctagaaggatggtgtccacaactttaaatctcctccccatgggaacacctgtggattttggaggacagataggagacaagcaatatctaaagactctatcagacagataacaagtgaaggaggatagcaattgttatcctgttctttttttgaaataaaaagatggatcacctttaacgctgtgtagatgcagccgtcaatagttgggccagggtgtatatgaaacttaaccgttaaatatataaacatattttcccatttgtaagcaattgagattggatgtgattactgcattaatagcttaatctttgtgttgatctaggatctctctagtcctgttttgtctgctgttggaga

SEQ ID NO: 7708 - DNA, 1636 bp, Cucumis sativus
  Intron number 1 from transcript Cucsa.119550.1 (locus Cucs a.119550) derived from phytozome v7.0 (chr-ID scaffold0099 8; pos 1470106 to 1471741)
atctcgttgacgctcgaactaatcttccactccaggttcactccctttaacattcttgtttctgatcatcactctcaacacatcctccttaacactttttctcttaattctcgttaattcatgttggtgtcttcaactaatcgtttctttttctcaaattatttaatagttacttagttttatatacatacacacacttgcatgcaagttttgagattgaaaaatttaaagaatagaataaaacaactacaacgtcaaatctataatatctattcgtttatgtgtacgtttcttaagctcatacatgttttctaaaacttcttttttaattgaattttttatattcttggtttaaatacacaccaccacataacatacaaataataatatttatatgctatagatcctacttttgtttctaaacttttaaaaggactcgaacatattttggtttccattaactatttaacaaaatgttaaatgacttctagatttgaatgacttgggctaccaaaaaagataatcacccttaaaaatctaaaattttataattttttctcttcgtttcaattctttttttagttatgcaattcattgtggaaatatttatttggagttttgtagattttattttatagtattgtacttattttattttttcagtttattttaccatgcatagatgttaacactaagatgtccgttctattcttttatttgttttattctactcaatgttttttcatgtggttgaagattccattttatggtaaataaatgaataatgggtgggaaacgagtgaggggatgggagagatttgggttttagaaaaaaatagtttttaatttggatttatttgattcatggtgcgaatatgcctgaaggctctcataaaaaaatttatagaataaattagcaagattttttggttatttatcaatttattaatatgataaatctaaagtctaatcctccgaatatagaactcatcctcattttgttaaagtttatgaaaccctaatagcacggacaaaaataagtttttttaggactaaaacatacatttttcttttttcttctttaaagtttggagacaaaaaaaaatagaatagtaaaagttaaaatagaataacgaaagttaggaactaaaataggatttagactgagtaaaagttaaaagttatatgagaagtttgataagaaataaaaggctatatatttgtatcacatcttgactcttaagctccttaaaaaataactattcagtttatcaatctcacataaaataataaaaacataaaatattttcaaatcaataaaggtttcccttcaccttcaccttcacctagagggtagaggggaaaaaggttagtttagaagttaggaaaaaggggaataaaggtccataaaagaaaaattgcaagaaggatacggagagacttgcaaaatgaaaatgaaatgatatgatatatatacccactctgggtaataggtaggtatacgtgtaaaatagtttgtttatgaataatgaaaggagtaagtttagttgcacctgcgtttctgcccttctatgtcttttcataacggcggtgacttccaggaggaggtggtggatttcgtagtactctgcacagg

SEQ ID NO: 7709 - DNA, 1486 bp, Cucumis sativus
  Intron number 1 from transcript Cucsa.250230.1 (locus Cucs a.250230) derived from phytozome v7.0 (chr-ID scaffold0221 9; pos 349578 to 351063 reverse strand)
ggtctgttttctcattgatagatgagtgctttacttgcgttatatctattttctatgatgtaaatgctttatgttctcgaattatgtgtttttggcatttaagcatgttgtattgttgcattaatattcatgttgatgtgctattatctgaccctatgttaatgagtgagcataacccgttgctatgcatatgatttatggtgagagcgtgttatgatatataattaaatttacctttatccatcagtttaagcttttgggttgaattggtgatttaagatgggatcagagcaggggtctaggtaggtcctgtgttcaagccaatgcatttttgtattctccctatttaatgttcatttcctcttgttgggccttcttcatattttgagctcacaagtaagagggagtgttatgatgtatttaccttcacccatcatcaacttaagcttttgggttgaattggtgattcaaactatcattctacatgattttgacttgagcattgcttagaaaagcatgcattctgaagagtttgtatgagaaaaatgttagagttccttgtgtatttatgaaggaaagttgggtgaatataagtttttcttgaataaaaatgatcaaggggttgcatgttgcatcttactgttggatttagaggagcatcaatgctttggataaaaatggccaaggattggtgggataagtctagaatgagtatgtaggttagccatcaaatgtcttaaataaaaatgatctagaggcattgttgagtttaaggacttggacaaaaatggtcaagagtcaagcatttagttttgttgagaactttgaagtccagaataaacaaggtgaaaggtaaacatatcttgaaggaatcagtctcaaatagtcttagtgtgtcctaaatatgaatgttgagtgagcttttcaagcttaaatagagaatgcattacatgatatgttgattcgtgtgttagcatgttatagctgttgtttatttttcatgttaaacgagcatgtataagtgttgtggataacatgatgtgtagataagttaccaattatcttgttgatggtctgattctcacacctgcaatagttgaactaaaaaaggcagtgttttgtttagaaagaaaaatataaattgacaacaaaaagggcatctttgtaagttgtccgtttaaaggtccctcttgtaaatgttgcatgtcaataatttttgcatggtagctttcaacttgtgatgaaattgggatgtttttggaaccaagcggaaactactctccttgttaaattggtagccggcccattgaattttaaattttcatttcattccctgtatcaatttgtagttttgtcactgtacttccatttttttggcagagttaattcctggtttaggtccataggattctagattttgatttcgtctcccctcgttattggctatattttgtagtttagtcactgtaattccatttttccagcc

SEQ ID NO: 7710 - DNA, 2884 bp, Cucumis sativus
  Intron number 3 from transcript Cucsa.135300.1 (locus Cucs a.135300) derived from phytozome v7.0 (chr-ID scaffold0104 4; pos 148903 to 151786 reverse strand)
agtacatttagtgaagggagaacttgtacaaagtctgacagttagcagcttaagtgaaccaattttctgttatttaatatgtcaatggggattaccaaatcataaactaaagtgtggattgatttgtaaaatttatgcataatgtttcctcaaattcattgttataagatgcacttttcgtcaacaagagcttagctcaactgacacttgtatgtacctaagaataataagtcttgggttcaaatcccctcactcccacctggtactaaaacagatgcacttttcaatcttctttcataggttatttgactcaagattcatagggtaactagatgcttgagaacattagacgtgtgtatgcattggaactgtctagaggaaaattcattgatttcgataagtttgttaaaagaactgataggtatcaggtttattatttatgtatagagaagggcaaatattggaacagcagtgtacacagttatctaggcaatggaacaaggctgattctctcctgttaacaagtacctacccaataaatatttttatacgaaatatattttatgcccaaatatgcaaaatttgtagaaagttgaaatgcctagattgtttgttcttgaactactccttgccaagtttagttgagagaatgagaatctttggaaaatcatcaattttatatcagagttgccctccggctgcgatgggactcaaagcattacaatttggctgattgctttctgcatttttttgtttcgtgagattaggaaatctaggagtgggattatttatttgtgaacaagaggtaatatagagaaattgagggatgcctcttatcttcctcaaatacaattttcttttcgcgagtcatttgtttctgttgacattgcttgcagttcaattttagaattaaatgattctaataatttctcattcaaaatggacatttgaatggaggcatcatacattgcctataatcatgagcattgagaggatggagagttgtggggctgtatttatgaatacactaaagtatacatttctaattgctctttgagttacatatatcacttgttgagactgttttaaaaatttctcattgaaaacctgtatttacagtggtttagaattttaattgattttgtacttatatcaatattttcatttgtagatcaaagaactgaattcatttgttgcattgaggaaaacgtaagtcctcctttcttttcttttttccttttccttctttctcttgtgtaggagcaaatgagttctgagccctaaaaaaaagaaaagggggttattcttgcctgagaatgaaagtaatagtttttcttaatcattatttgtttaataagaaacaaatttcattgatataataaaatttacaaaacaacagatgagttacaaaggagaaaggtgtacatttgcaccacgacatagctagaaagataatatgttaaaaaaagaaaccgtgaaaagtgcttccctttttgttgaagaggtggtaaaatattccagtttcagtttctagggtgtgtgaagaagtatatatcacctgccttttgattcagattcttcccattttatatttgttggataatcaatttttttttctttctttaattaccctagtagaaattcattcaaaagccaataaagccagacagaagaacgtaagggacaaagatttaagttatccctttttccctaagaaagggtgacaaaaagaccctcaaactcaaatattatatattttccaaaggcttataatatgttaggacgtggagagtcatacatgttttgagatgtaaatcaaaaccaagttttccattttctaaccaggagggtagaacctttaagaaatttgggtaaattttggtgatttactaaacagattgaggaagtgaatggtgattatggatttcctaacgaagcaaatagttagctcattaaagtataataacattgtggcaataaagaggggtcataaaaagttatattgccgaggtatatggaaagggtagtgccgggagtaagtaaaattctgcctgatttagtgtacgactgcaaacaaaattgaagcaagggcaactatatttacaaaaggatgacaagggttgttcacctagccttttcatgtaaaagagggagaggtagtgaagagggtatgtgattcaaggtcttgatagagatggcatgaaacatattttgactgagtcgaaaatacggctttagactactttgaggtttatgactgaaaagaaacaatagaacatataaagtgagtggaacatagaaaggagtatacatacaagtatatttctccttaaagtttatagataagcacttccattctccttgtttttcctgccaaatgctttctttcaaattttcttgggaagatgggggcagaaaggtttatgtacaaatatacgcatacttaaagtgaacaaataagcactcagatcctagttgattgttatacatggctttataatcaattttcccttgtaatttacttattggaaatcttctttgtttttctcaaatagaggagtgggagaatcattacttgggtcaaacattgtcactgtattaatgactagtttttcttattcgaaaaaggataaaaacgtgtaactgaagttggttgggcttcaatcttgtgtgaatgtatgttgtaatgtatcatgaaaacatggtttctcatattaaaaaaaatgttatcaagccgctggaaacgttagttccctttcctcaataattgaatgtggttcacatgattagcagtcagtagtttactccatcagcacattggaatcaaattgcttggggtgtgagttccctaattctttttaattgttgaatgaattacaggtac

SEQ ID NO: 7711 - DNA, 1971 bp, Cucumis sativus
  Intron number 1 from transcript Cucsa.242740.2 (locus Cucs a.242740) derived from phytozome v7.0 (chr-ID scaffold0204 7; pos 2408144 to 2410114 reverse strand)
gcggcttgaagaaaaataagcaaggtttcttcctccttcccttccttcttttacttctcaatttcactacttttttaaacttcttgagctctactgtatgtattactttgtcctgtttctgtccagatttttgtatcaacaataggttcgtagttcaatgttaagcaatcgatggcggtcattctatttcgtttacttttgttatttttggtggtgggttttttttttttttttggggggggggggggttgcggtttctgaattctgatttagaattacagatttgtgggtttgagtttgctgaaactttgcttgtgaacttcctacgtgggaaagatttaagaagctataaagggtttaaactattttgtgatgccagctaaagaataaaaaactttgtgaaaggtcaaagatactgttctaacaaacaggataatttgttaaagaaactaatgagtattgattgataattgatcataatatgactttttgaacaatttcaaacatttaggtgcataaattgttggttttcccataaatttgttaactgcaggaggtactataactgtgaaagccaccccacctaattgagaccacctgaatatacatacagagacattaaaatcttatacgggcatattaaatcttaagttatttgttggttagcagttcataaactctcaggcattttagagtaattacattaaactctaggaaaattgactaagaaaacaataataaattttttgtaacagacatggagtacttatcaactggtgtagcaagcaaatcgaagccatgcaccaaattttacaggttcaaatcttcactcatctaaataaatacatagaaacttatccttttctgaatctttataaattattgtaagaatctaattttctgaatctctataattttgctcatgaaagagacaaattgcatacgtgtaaaatctatttattgtctaactatataaatatctctttaagtataaaagacttaaccactatttagagtgtaacttctatggagatcaacagtgatacttattcctgtgaaaaggaaaattgaactgggaagtggtgatattttctccagcttatactgatcattacgatttttctctaaaatctttctggcaagtctatgtcttgttaatagatgtcacaaatacttggttcgcagggtttctttttacgtgattatttttgtgtcaagtgttatttatgggtagtgctcgttaattactcaaacactgtccttattggcactttacagaggatgcctttgaactgtacattctgaaagtgctttaatgtacttgtttgtgtatgaatcttctcaaatttattggaaccagtttttacagactctgtgagatatataatgaatattcttctctcttatctaaattattcttggtgaaccctacttttgatatttcagaatctctgtttgcaaattcttttctgctgctcataaggttgtgaattagcacctccattacagccttacctgaataggatttactcacatgttttataactgtcttttgaattatttttcactgaatcaagctgctgtaatttcaggatctccattatatgttttatttttctccctatttatgctatctttcactaatgagtggaggaataataaaatatcaacatttattttccgttgcttatgattttgaatatcatttttgtttcttttgcaaaataccgagcataattattttaaatctgaatctaaacaatggaagtgtgtctgatattcatctttttgtgcaattgatgtcaaaagctttcaatttgtcatgcatatgaaatgagttcgtcttacatatgtggagaatatctgtagactgattgtttctattttgttttcagcactactggctgcccatttggtgaagcatgtcatttcctgcattatgtccctggcggttataacgcggttgcgcaa

SEQ ID NO: 7712 - DNA, 1388 bp, Cucumis sativus
  Intron number 7 from transcript Cucsa.106980.1 (locus Cucs a.106980) derived from phytozome v7.0 (chr-ID scaffold0093 0; pos 418744 to 420131 reverse strand)
gcgaggtatgttgttccattggaaaactcatgatcttctagagatttgatttcattgtggaaaataaaatttattccagttaattaatcgactgtatttttctttaattgatccttgatatcattttggactcgagaattttcttctggtagttacacacgcgaagtgtttatactttgcaaatctgaattataaatttatatcttttaactggttccttttgattgaagggttaagtaaaagttaaccaggctaaagcaaacccttcttatttcaattatagaatctgagtaagatcctgatcccggattaggaaattcaatctttgttatgactttagtttacagaagaaattatggacagcgactacgactagtttctcttctatcttttctggaagacttaacttttggtgttgatgaccccacaaattaaaatttgattagaagttttcagactttgtttttatttagaatcaccggtaattcttgatgaacgaacacatcctaaagattttggattatgtccgacatacacagaagttatttagtttcatatcgcagatattttttttaggagtatagaagccttttttgcaaaagaactagaagaaattgacacagagatttacgtggtttagtaatagtctgttaactacattcatggtagaggaaatgagcaattttattattagaggagaatatcaaatgatatagatacaaatatgccaatgggatttgagggtttatatatagcacccctctaatccctatgcccaaattcataaataacatattatgtatatggaacctgagtttggtcatttagagtatcagataacgtattcaggagaatccaacaagcttgagcacaatttactagttattatttatatttatgagaaattatattttcatttagataaaagacgaaagaatagaagagaggtaaaataaagaactaacccaaacatgccgccaattaaagctgaaaaaagctttagtcaatcaagataagacctaataaatagtaaaaattcttaattagtagattacatcacaaaataactgtcatatgtttgaggctttcgtgactgtgaggttaactgaagagagcagcaagttgacgaagcccgcctgctcaacttgcctgcctgctcttaattggccgagtaaatcaatcatgttcttattttgtatccatgcctttatgggtggtcacaatacggtcttctatatttaattttaaagaatgtagaattaatgcatggtgtattttcctattttaccagaatttactcttattatgacatcttgtgttctattgttggagtgtgcttaaagttgcacggctggataatttacagggggtagttgccttttctgaac

SEQ ID NO: 7713 - DNA, 812 bp, Cucumis sativus
  Intron number 5 from transcript Cucsa.011800.1 (locus Cucs a.011800) derived from phytozome v7.0 (chr-ID scaffold0015 4; pos 1140010 to 1140821)
ctgttctatcttggtgccagcagttatcaattgaggtaatgaattgttttctttccctatgatcttgtaacaagttgagttatttcataatctgctaatctatagcgaatcaaatgttggcgtttgctttcgtatttgtttgattaagcttatttcaattttgggggattagaatgtagatgttaaatcttaataatttttttctaaaactttaaattcatctaggagttttattaattcccagcttaaatgaaaagcatctcacttgaagcagatgaatggttactctatgtatgggtcagttcaaaaccatctgaatgcaaggaatccttatattatatgtatgggtcaacattaattgacatcttcctacctaatctcagacttttccatatttcacgtcaaggttactgataactaaaaagatcatggttttgcgctggaataagagttgttataattggaaattttcatttattaaggagcaggatacatcattttctctgacgaatagagtgaaactgttcttgttttccttccagtttttattctataaaattgaagacattcgttacatttcagtagtttcttactattcaaacaatatatgatagttagcactgttagttctctctttctcttgactcataggacttggattttgaaatgttttttccacaatttaattctaccaaaacccttttggtaggaaaaatgtcgagttacggtgcctctctcctagccatattctaattagtatgcatgtaatgcacatagtggcttacagcggtagagcttggactattgaaagg

SEQ ID NO: 7714 - DNA, 1668 bp, Cucumis sativus
  Intron number 2 from transcript Cucsa.338930.1 (locus Cucs a.338930) derived from phytozome v7.0 (chr-ID scaffold0335 6; pos 1629490 to 1631157)
gagacaggtcctcttcttcttcctcctctgtttttctccccaatttttatgccaatttaccatattatcctttcgctttttcatttgttatttttatgttttctacagatattttctattttgagaaaagccgtgccaaatatttaattcacttttttgcctttttttttcttctttttttaagttttgatatttagtttaagagtggaaacctatacttaaaaaagtttcgaaatattacatttgtaccatttaattttttatcatgttatttatttttaattcttttattttaaatttagttttcatttactccctacatttcaatatttagtttcaatttttgtttgttaatagcactgcttgttttgttattcatacttcaataattaagttcaaatgattctatcataattttttttacttataattaattaattaatttttagatattaaaattgatgttgagtatttaaaccatataaaattcaaaaatcatgctacattttcatgacttaaaatacaggaattaaaaagttccttttttttttctaaatgtaaaaagaaaaaaaaaagtttttctttctttcttttcaacattaaaagcatgcttagatattggtggttgagttgataagtgtactgagaatagatgtgtattaggtaatataataaaaatgtccaataaaaagacaaaacaatgtctcctttcttttaacatttagaaaacaaaatcaaatttatcattatttttttcaagtttactaaattaaaattagtagaattcttattttaactttggtacaaaatatttgaacaattatacaccgacaaataatcaccctgaatctagagctttggatttctagtgcactctctcattttcgaaaaataaaataaaattatcaatatattctctctctcttcttttttttttcttttcagaatacatactcttttttgctctatttcactcttttttaaaaaatttaaaaattaagaatatatactctttttctttttcttttttagattatatactatcttaatctctcttttttttctgaaactgtattaaaaattaagattatatatactctcttactttttttttatttaagaattataatctcttacttaagaattaagaaaaaggaacccccaatcaaatcaacagtgatggtgatatatattataaatgtctattttattggacgggcggaaattaattataatttttttaaaattggaaatttagtggtaatgatgtatgagctgcgccacttcatcaaaaagaacagtaaaaaattataaaaaaagggatggaaaagtgcaatttatgccacctgagaagtgacgtggatgaagtgtacggaagatatttcgataagtgtccccaccagtttggcagatattatatataaaaagactattggcagatactttctaaggaaagcagccttaattgctttttaattcaccaaaagtcatcttaattgagaatatgcttttccatcttttccagtttagacctttcaaaccttttttctttttaactctttttctattttattttcatatatattttttacatgacttagtaataattgatgtatactcttatggttcgtgaattgaattttatgcggttgatgcaggttccacttt

SEQ ID NO: 7715 - DNA, 650 bp, Cucumis sativus
  Intron number 2 from transcript Cucsa.386850.1 (locus Cucs a.386850) derived from phytozome v7.0 (chr-ID scaffold0391 8; pos 366794 to 367443)
cttttccgttggaatatcttgtgcattcaccaaaggtaattctttttctctttaattcttaattttttaatctctttttttcttacaaatatactaattaggttcaaagtataaaatttgttagagatatcgcaaaatttggtctcttcagttggttaactttgctattcattataattatttgtttttctcataattagtctatcggtttagcggtttctttgctaaatctgtcgaagtatgatcgatttagccttttttgcgtttttcttttacaatttttgaatggtagattacgtttcaaaataattaaaatcgaagttttcatttttctaaaatcattggatttggtttattaacatctagggctttgttcttagaaaaaagggttttaccaagattccttttgttgaatgcttgaattaattaatatggtttttagttgtaggaattggaatttttcatctctaaacttttaatcagtgcggattattttctccaatttgggcgagccaatagattgaagttggttatagagtttgtgttctatattgttgaattcatagttttaattaattaaaaatccaaaaactttctgtcacaaatataaaacaggggagataatactagaggcagcgggtctaacatcc

SEQ ID NO: 7716 - DNA, 2834 bp, Cucumis sativus
  Intron number 4 from transcript Cucsa.259680.1 (locus Cucs a.259680) derived from phytozome v7.0 (chr-ID scaffold0222 9; pos 6058890 to 6061723 reverse strand)
tctttggaagatacttttcttaaattaggtaagtggagtggatagtaatatttattttggttgatttcgataaattgtacatatgtcatgggtaaataggaatttgctgcagagtaataatagccaccaaagtgaaagctattaaaagcggtaaaagaaaatagacaccgagttatgtggaaacccgagtactggggaaaaaactatgacttaacatttttattattatctcttattcacgaaagatacaaagggggaaattaaatagacaacaagctaatgataaaaaagggaagataattagggtaaatctttcctttgcccaagcccactaattctaacaaaagctattttaaatctttggctgttgaatgaatcagttctatatttgatattttacgattaaaagctaacaattttgctttttttagtgttgtgatcatgttattcctttgtttttcctccatgtgggtttgacattgttgatcctcatcatgaatagatcaacagcccttatggagattcttccaggagaatataacaaaaactgtgcctcccaattatttccacaatatctcttgacccttaaaaagttcatgcatttcactgagatgatagttttaacagtattgtgccataaaatcatcatcttcttcttcctttcttttccttctgggatggccgcgaagaatcttctcaatacataaattttttggagttctaagagtgttaggaaggacaaggttaaatttgaggcagagtagtggtaagaatattggtagggaaatatttagaatatcaataggatacttctaaatcaccatagaaagatctatgaagcaaaaattcacagttcccatgaaagagagattactgatcaattgttttttaatcattaggatttcgacgaagttgctagtcgtaagcctttgttacatcaatcgtcatatcaaccacaaagcattaggaactgaagtaagacgataaagcctcgggaatgcaaacctaatagggccacaactaagccttgagtcaattcagaaagaagtataggacatatgaccaactaccaagagaatattgcactctagaaatcaatttaatggtttggctaataaattgccaaggaaacttaaaaggtctagaatgataggcattagcaaacctctgccagttctatctgtgtaattctagacgataacaagtttctgccatacagcagactcttcatgaagaaaatgccaaatccatttggccagtaatgccatattacaatgtcgcaaattgtcaatagcaaggtcactcatcaattttggaagccaaattaacattataaacatcacttcaccatgagaaccttcccttaaaaaatctcaaatcaacttatcgcaaatctttacaactttagttggaacaggaaacgaggatcaagtaatatgttggtgagctggcaagagaatccttgataagagtatagtaaccaccatttcaggtgatagcataccaactttgcagcttgtgttgaattcattcaatcctaggttgccagaaggaaacggtcccaaaactaccactgaaaggaagaccaaggtaagtagacaaccagtgaccgtgattacaaccaaaattgggtaacatccaatccatagtagagccagcaatatgaattccaagccgttcactttttggaaaggtcgatcttcaaaccaaaggcctgttaaaaatgtgagcgaaagggtgtcatcatcaaattgaggattcagaataaaaagaggatgcacgagcagggtgagttgcaacattaccaagaacagcactgtgggccagtagatgattaaggcaattagcaactacaataaataaaaatgtgaagccctttctaaacacctttaattgcttttttggaatcaaatccacagaatagtcaaggtcatcctttggtccctacttttgagggtgataaacattatgggcatggtgcaattaaaacagtctgacgtacaataactccctaatccctggcaggtattatctccaacagcagaaattttggagacttaagccatcttgttgcttccaactactggttttctggcatatagaatgtatgtagtctatcctgatgctttacccaagaatgttaatgattttgttcaaaacttggattaatgagaatgtcaaaccatctcaaactgtgagctatgattcccgcccaacacccccaccaccaccaccattccttttgtgactcctcatgatctattcagaagttgcttggtccctattaggagtagttcagatgcatttttcccaatcatctgctgttggtggaaatatagttcaggtgctgcacttgcctcgtgtcattttttgagatttatctaaacttcattcttctactttgtgttttctccatggggagttcatggagatatgtaactatgtttgactcatatttctgcccattgagagtcttcattaaaatcctcttggctttttagaagcatctcatcttctttttggacatgccaacatgggcaataataccgttttgtttcctataaaaaataaagagaagaaaaaagaagaaaatagatctagtgtttgtaacaaccttaaggatcctattcaacttttttgtgcttcacactatacacttttgaactcttcggtaatgatgcgttctttatttatgttaaatagggttaagattcatgagtcaatgtctattacattttctccaactctttttttgaagtagtcactagctagtgtactaggttattgattctcttccctgatatctacagacaaaacaaggaatataaaacgtg

SEQ ID NO: 7717 - DNA, 8440 bp, Cucumis sativus
  Intron number 3 from transcript Cucsa.345790.1 (locus Cucs a.345790) derived from phytozome v7.0 (chr-ID scaffold0344 3; pos 69187 to 77626)
ttgttgggagtgctggaagcagagagaaggtgagccacaatgttgttaactgttaaaagcttgcttccatatcctctttctctcaaccatctttttctttgacgaaattcagtttcatgcaattagaaaattgttcaatctttcgtctttcctaagcatccaagtttaggaactactgtaagatttaaatcgagtagcacggttgtacttttgattttcgaaaaggccttgtattgttaacatcgttctaattttccaacctatattttctgatctgtcagctctgctcattaacatccattaataatggattcttattttccctagacattctaatgaaatatccatatcatgtcttatatgtatgcctgacatagattgagctgctgaaaaacaagtttggatttgatgacgttttcaactacaaagaagaacctgatttaaatgcagcgctaaagcggttagtatctctcagactcttacatgatctacaacttagaaagatttatgaaccgatggactattgtctgaataataggaaactatagcgccttcctaatcaagattcaaatgtatagtttaggtccttttttataaccatttgatttttttttgcattcgaaaaatgaacttattgacactacttcctttcatgggtttcaatgtttagttatccactttttactcatgttcttggaaaccaagcgaagtttcagaaactaaagaacgttttcaaaaactttgtatttgtttttagaatttaactaggaactcgagtgcttcttttacaaagataagaaccataattgaaaatttgtggaaaaactaaacgggaaatcgaacaggactaaagtatctagcttcacatccaattcatattcttgaaaatggaacccaatcttttcatgttattttggtggcagatgcttccctcaaggtatagacatttacttcgaaaacgtaggagggaaaacacttgatgcagtgcttttaaacatgaggcctcatggtcggattgcagtatgtggaatgatatctcaatacaatctcgatcagtcggaaggggtgcataatctcatgcttcttgtacgtcagcggatccgcatggaaggtttcagagctccagattatttccacctcaatgcgaagttcttagaagcaatgttgccatatatcagagaaggtaagataagctatgtcgaggacacggttcatggccttgagagcggcccggcagctttgattggactcttcagtggtcgcaatattgggaaacaaatagttgccatctctacagaatgattcatatgtaattgtttctctcatccgttcgggtcttgggtgctgccgtattgaaatgtataagaaataagcagtttccatcaccacagagaagcctagatacttcattactatcatgttgtagcatatcctaaaaataaggtagatggttggattgtacgatttagctgggtgcatgagataattttaagtcgtatgcttttcgatgtgtacttgcctgttgcttttctctcaagttatcttacatttactataaattgtgtttgttgttgaattacagttcacctaatctttatctcatacattgcatattctattgtgttatggccatctttcatggttgatgtcttatacattagtcaaggattcaataaaatacagtgtaaatatgagattagcgttgtttagttctcgaatcctattcactagttcttgttttctttcttctcttctctttcactatgcattgttcaccatccaactcatttgagaaagcacatcagttgaagttaaatatatccaactcatttgagaaagcacatcagttgaagttaaatgacattgaatttagatgtgattgtagtaactttataatatttaaaaattattcaaatttaatttagtaaagataattgaaaagaaaattatttggattattttgttatatttgaaaatagtcataattgaaaccaaaggagaatggacatttgggacatttttcaaaaagaagaagggacatttttcaaaaagaagaaggaacatttttcaaaaagaaaaagatcaaaagtgagatccgtacaacttggccagtctcttttccctccttcagttatctttcttttagccatttcctcaatttcaccggtagtttccataccgattgtcatcgccagttttagttgcaatggcgcacatcggagaagaaatgaagaacaagcaggtgattttccgggactatgttcgtggttttcctaaggaatccgatttcatcattacaagtgctaccatccgcttgaagcttcctcaaggttcaaatggcgttttgctcaaaactctctatctttcttgcgatccctacatgcgaatgctcatgcaatctcaatccgccaccaattcctattctcctggctctgtaatttacctctctctcgttaattactttacatttcaaatcaacgcatgcataaatcattttgcccccttccatacatttttttcatggttatgatgatattgaaggaaaaatgtgtttgtgtcgacagaagggtaaattaagaagtggaaacttcagatgcaggaaaattaaatttatagttatggtgaatgttgaattcttatgtttttcgtttatttctctgatggaaaggaaacgtttgcagttgatatatgggtttggagttgctaaagtgttggagtctgctcactcgggcttcagtgaaggtgacctagtttggggaatattgaaatgggaagaatactctgtcgtggaggagcctggaaaacttatcaaaatccagcacactgatgtgcctctctcatactatactggaattcttggtataatttctgtgtaatgacctggagtttcaatttactaaggccagtttgatgttcttttgatatttggtctttattttttaaaatgaagctattcttggtataatttatgtgtaattggctgaatttttcattttctaagacgccatttgataaccatttggttttagtgttttgtttgaataattcaccagctactacatgcattgttgttttcttgagcttaatatggactcttggaggatgtggcatttctgtatagatgatgttggagcttgcttggatttataactctaaaggatgcaagtaaaacataatattttccatacacaacttggcattattctttcctattttgcagcactgtgaattccataaggtcataaccataaagtaatggatgggttgtctgcatgttttcgtggtgaagcatgattctttgcctgcatcgtactttctatttgtgaaagtgataaatgtcaataatttactgaatcgttgaacattatatttgatatacaattaatcttaacaggtatgcctgggataactgcatattttggatttcatgatatatgctctcccaagaaaggagaatatgtgtacgtatcagcagcttctggtgcagttggtcaacttgttggccaattagcaaagttgatgggttgttatgttgttgggagtgctggaagcaaagagaaggtgagccactatgttgttaattgttaaagctttattccatatcctctttctctcaaccatctgtttctttgacgaaattcagtttcatgcagttagaaattttttcaatcttttgccttttcttaatgaaagtagttatttctatggaacaaaaaagagaagattttctgatatttattcatctatgcaattttgctttttattagtttcttttttatcggtatttgatttgtagatatacgtcttttttgtctaatttggtttcctagtataatacttgttttgttttggttcataaacttttaacgtttttattttaattcctttcttttcaaatggcgtgttttagttttagttcatgaactttgcatttaaattgttaaactataaatttagtcaattacttatttcaaggttagtgggctaaaccaagataagcatccaagtttaggaactactataagatttaaatcgagtagcagagttgtaattttgatttttgaaaagggcattgtatttttaacatcgttctaattttccaacctatattttctgatttgtcagctcaactcattaacatccattaataatggatccttattctcgctagacattctactgaaatatccatatcatgtcttataagttatatgtatgcctgacatagattgagctgctgaaaaacaagtttggatttgatgacgttttcaactacaaggaagaacctgatctaaatgcagcgctcaagcggttagtatctctcactcttacatgatctacaacttagaaagattgatgaaccgatggacaattgtctgaatgataggaaactatagccccttcctaatcaagattcgaatgtatggtttaggtcctatttgaaaaccatttgattttttttttttttgtatttgataaatgaaattattgacactgccctccataggtttcaatgcttagttatccactttttactcatgttttcggaaaccaagcaaagtttcataaactaaaaaatgtagttttcaataactttgtatttgtttttagaatttaactagaaactcaagtgcttcttttacaaagataagcaccataattaaaaaatttatgggaaaacagacataaattttagaaacaaaaaactaaaaatgagatcaaacagaggtaaagtatctaacttcacatccaattcatattcttgaaattgcaatcttttcatgttgttttggtggcagatgcttccctgaaggtatagacatttacttcgaaaacgtaggagggaaaacacttgatgcagtgcttttaaacatgagacctcatggtcgaattgcagtgtgtggaatgatatctcaatacaacatcgatcagtcggagggggtgcataatctcatgcttcttgtagttcagcggatccgcatggaaggtttcagtgctccggattatttccacctcaacgccaagttcttagaagcaatgttgccctatatcagagaaggtaagataagctatgtcgaggacacagttcatggccttgagagcggcccgacagctttgattggactcttcagtggtcgcaatattgggaaacaagtagttgccatctctacagaatgattcatatgtaattatttctcccatccgttggggtctgtcttgaaattgagcatgtatgagaaataagcagtttccatcaccaaagagcagccgaggtacttcattactatcatgttgtagcacatactaaaaataagagatagatggttggattgtacgatgtagctgggtgcatactgcatgagataattttaagtcgtatgtttttcgacgtgtacttgccctttgccttttcttacaatcacagcgtacctaatcttcatttcacacattgcatattctactgtattatttcctttcatatttgatggcttatacgttagtcaaggattcaataaaatacaatgtaaatatgagattagcatcgtttagttctcgaatcctattcacttgttcttgttttctttcttctcttctcttatctctttcactatgcattgttcaccgtccaattcatttgagaaagcacatcattaaggttaaatgacttcaaattagatgtgatcgtaataggttttgaattccttcaatatccaagactacttatttactttcttttaatatttaaaacttattcaaatttacaaatgtaaaaaactatccataattaaccttcatatcacgagggacggacgacgtggagattaaccttttcttttatgataatagaacctatgccaattacattttcaaaattaaaaaaataacaaatttaaaggtagattatcgtcatatttgtcaaatttacaatatacaaaatgaggtattataagccgtttttttaaaaaaatagtttgttatttaatgcaatttttataattaaaaaaaatattttaattattttattatatttaaaaataagtgttttatcagataatagaaaaaaaaaataaatggtcgttatttaaagtagaagaagggacattttttaaaaaagaaaaagatcaaatgtgtcatccgtacaactttccttcctacagttatatttcttttggccatttccccaatttctccggttagtttccatagcggttgtcatcatcagtttgagtcagtggcggaaagttgcaatggcgcacatcggagaagaagtgaagaacaagcaggtgattttccgggactatgttcgtggtttccctaaggaatctgatttcatcattactagtgctaccatccgcttgaagcttcctcaaggttcaaatggccttttgctaaaaactctttatctttcttgcgatccctacatgcgctggctcatggaatttcaacccgcccagaattccttttctcctggctctgtaatttacctctctctctcgttaattgctttacgtttcaaatcagcgcatacataaatcattttgcccccttccatacatttttttcatggttatgatgatattgaaggaaaaatgtgtttgtgtcgtagcttacaaaagggtaaattaagaagtggaaacttcagatgcagggaaatgaaatttatagttatggtaaacgttgaattcttatgtttttcgtttatttctctgatggaaaggaaacgtttacagttgatatatgggtttggagttgctaaagtgttggagtctgctcactctggcttcagtgaaggtgaccttgtttggggaatattgaaatgggaagaatactcagtcatggaggagcctggaaagcttatcaaaatccagcacactgatgtgcctctctcatactatactggaattcttggtataatttctgtgtgtaatgacctggagtttcaatttaccaaggccagtttgatattcttttgatatttggtttttatttttgaaaatgaagctattcttggtatagtttatgtgtaattggctgaattttccattttctcaggtgccttttgataaccgtttgtttttagtgtttcgatttaaataattcaccagctaccatatgcattgttgttttcttgagctcaatatggactcatggaggatgcggtatttctgtatagatgatgttggacattacttggatttatagctaaagcatgcaagtaaaacataatattttccatacacaacttggattgttctttcctatcttgcagcactgtgaatcccataaggccataaccgaaaagtaaaggatgggttgtttgcatgttttcatggtgaaacatgaatctttgcttgcatcatactttctatttgtgaaagtgataaatgtcaatagtttactgaatcgttaaacattatatttgatatacgatttatcttaacaggtatgcctgggataactgcatattttgggtttcatgatatatgctctcccaagaagggagaatatgtgtatgtttcagcagcttctggtgcagttggtcaacttgttggccaattagcaaagttgatgggttgttatgttgttgggagtgctggaagcagagagaaggtgagccactgttttaaagcttgttcccatatcctttttctcccaagcatccacttctttggtgaaatcaagtttcatgcaatgagaaaaccatccttctctgtttaggattttgcaaaatttattcatttatgcaaatgttctgtttattattttttctttatcagtttttgcttgatagatatacattttttgtagaaccttaatttggtttcttaatcttaatacttgttttgatttggtccataaacttttaagtcttaaaccttgttttattttggttccttaagtttcaaattgtttattttagttttagtccatcatctttgcataaaaattattagttatactgtaaatttagtgaatcttatttccaggttaggggcacaagataagcatcaaagtttaggaactacaataagatttaagtcaggtcagaccacagttgtagttttgagtttcggaaagagccttatacttttaagattgttttaattttgcaatggatgtattgtactgaaatatcaaggaaaattgcatcagatgacaaaaaaatttagaaaaaaaaccacccatagctcttcttttttgcatattgcaaatatgacaaataattagatatatcaaatgactatcagagggctatcaaaaggctattagatggctattcacttttaaatttgctgcttttgtaattttgaaaacgtagtgacatgggccctattatcattaaacttttgctatttttgcaaacgccctaaatatcaatatcacgtcttatatatatgcccaacatagattgagctgctgaaaaacaagttcggatttg

SEQ ID NO: 7718 - DNA, 1759 bp, Cucumis sativus
  Intron number 1 from transcript Cucsa.034760.1 (locus Cucs a.034760) derived from phytozome v7.0 (chr-ID scaffold0044 4; pos 644026 to 645784)
acattatatacaaacttccagcagcgcgacagaaggttagtgtagcttgtcgaatatccaaatatttatggtttttgtaattctaattgtaactttccgtgggttatccaagttattagactgtatttgttaattatgttatattaaataaactaggtaaaatagtttttaatcttaatttccgtacattattctgtgaactttagtaactcatttatagtagggtgcatattgtaccaaataattaaatctatagtaaatctagaataaatcgaaactaaatccaatacacccctcaaacttaggacgattgaggagtcacaagttcgctccaacagtaagtaaaaagataacgtagagagggctttagtgaataaatctgcaatttggtcctgactcctgggaagtgatgagatgaacagaaagattcttccttgcaaactacattttctcaaacaaaatgatagtctatcttaatgtgcttggtacaaacatgaaagacgagattacttggaatatagataagatagacattatcgaaccataacataggaggaccatgaaggaagagacggagataacataacaattgtcgaagccagtgaacaacagtaagattttgcatgaactaactaacacgatcaacaatagagagaatgtctggacgatcaacagtagtgatgggcataggtgtcaaacaagacttcacttcaaatatttggaaagaatggagtaaattaagaagtacgaccgggatgattctaaatgtcaagcccaagaaataacttagattgcctaggtcaaatatttgaaatttagacgagaaatggggcttcaaatgatgcacatattcagaattagaaccaacaatgagaatatcatcaatatagagtagaagataagtgacaatcaagcttggtatattgtgacaattaggatttttgtatcctccaaccctttgttttactagtgcacaaagcatgtagagattgattgtcactttgtgcgagatttggttcctcatatagttttttatgcttgatgctcattcattcaaatgcacaattgactgatatgttcacagaggtgctatcttcttctgccttacaacattgtatgttgaagttggttgttttaaatcttcaatagtctatcttgaggaggggtattagagttagagtatactagagtatttgttatttctgttatattgacagctgttctgaacaattagttatactaacttctcttgtattatactggacttgggtcctcatttaataataagaaaagtattatttactttcctctgttgtaatgtatgttaacgaatctatgcattgtgacatttccttccatgttctcgcctatgcctatcatttgatagttggaaggctcacaagaattattcttattcttatttcttatttgttggcttcatatgcatacattggatttaaaaagcccattacaaatctgtaggtaaatattccccattcgtttgtcattgaagtgtttgtagttgctgaaggaattgctctagtatgtgtttacaaaattgaaatttattattctataaacgctaaaatttctctagtaaatcgaatccttcaatagctgtcggatttatatgctcatttaacttcatgaaatcatcttattatcctttgagttcgggtcttacatgttatggtaatatgatggttcccactcttgtatcttaggagactcaccacattgcagtccaactatacaactg

SEQ ID NO: 7719 - DNA, 2458 bp, Cucumis sativus
  Intron number 1 from transcript Cucsa.034550.1 (locus Cucs a.034550) derived from phytozome v7.0 (chr-ID scaffold0044 4; pos 355305 to 357762)
cagaggctcaattcctatcctggaagcgccggaaggtattttcccttcttcttcttgttcttcatcaatctctctcaggctctaaatttattgtttcttttgattgctgctctttaatgtgtcattactccgcttgaattctttaaggtgccgatcaatcgtatttccatgccataacctgaaaaattagagaatctagggtttcgttgaatcacttttgggaatttggaaacctctaggattcattcaattttgagaggtaattaggaataaattcctctgttctttgcagaataatgggtctaaattttgtctaacctcaattcggcttaagttttggaaaggagaaaaacaaatttagaataaacaaccaaacaggcaacaaactcgaagaaactacgatatcacattactagacacaaacaaggtacacctccaaactttatgcacttaaagggtgcgctagtgtatttttggttgtggcaaatatctgatgagaaagagacaattctcaattcactatcattacaagcttatgccttatcaataaaaaagagacttctgaaatgtcgaccacatcatcattttggagcttaacaatctcaaaacagtgagattcagctaggatatattaggtgaggaaaaggaattaggcgatgagaaactatcgtgtgggttggtttgacctagtggtaaaaatggaaatagtctcaataactctcaataactaactaaaaggacatgagttcaatccatgatagccacctacctaaattaatttcttatgaattttgttgacacccaaatgttgtagggtaaggtgaattgtcggtgagattactcgaagtgcatgtaagctgactcaacagttacaaatatcagaaaaagaaaagaaatgtttgaatgtataaaattacagagataatcctagccttctgtccttctgtgagggactaggattattttgttttgttttcatttatttttattaagaaaccagctttagggcccataaaaaaagataacaactattaacggagcaaagtagaagtgaagaaaaaatttataatagaacaagattactagagattgggtctacagtctcaactattaagaataaaaaaatgaggatagttatattgaaatttgctgcattctaaatctcttcccaagattctttttgactgctgaaaggttctcttgattctctcaagccataaatttcacaatgtaatgaagaatctcgcatcccacggccagataataaatatttttcgtactgaaaggaggaatttaccaatacccctacaacatctgggaggaacagtgactccaaacttattcaagaaatttctccatagtgtcaaatatcaatcaatgcaaagcagcaacttcaaaacagatgaataatttcctctgtagatctttttcacacatcatatcccacacgccactctcaatgggacataaaaccatggatgtagatctttgaatgaagttacaatgtttaaccttcccaaagaaaccgataaagcaaagaacctaacctttggatttttccaaattatggtgaagaaagaggagacaaggattggattcagacacctaatgggcaacaagagaattcctagagaacactctgttagatatctggatttagatagggctaagggtagttagttatataggcagttagatggttataaatagaaagttggggagggaagaaaggcacgaagaatttggtgaagataatggactgcaacattccttgaaaggaaggaagggtagagggttagagttcttttacttgtttgttcttttatattgtaatttatgtttgagatatcaataaaatggaaacactatatcagcgttttatcacactcctgaaggatcaagagtccatttgaagtttgacataggcacatcccttgtagcagaaaggagattggcctaatatgagattcatgatcattagtagtcttccaaaatgaaaagtcatgatctaggatggtcgatgtagaagaactgtaattgagaggattaagacagaactgacaagcacctcatttccaagtcaaaataaagagttaggtaagaataacttgggaagaactattagcgttcctaaagtccaccgagaatcaaacatgagttccattttccatggaaattttaatgaaattgttaaagaagatcagtgaaattctactagaaaatacctactatatgtaagtggctatctttgaatttggtggctattaacgttctaaatcacatgtttcaacaattgatagaccacatgaactgcaggttcatttttgttcgagttaactaaccactaaaacaaacctaagccattccaccagtcttttaagagtgatttgtgtcagtagagttaatgagtagttgatgtttgacatcctattcctaaccattttctcttatttgcagg

SEQ ID NO: 7720 - DNA, 4388 bp, Cucumis sativus; identical to SEQ ID NO: 7559
  Intron number 7 from transcript Cucsa.051380.1 (locus Cucs a.051380) derived from phytozome v7.0 (chr-ID scaffold0055 7; pos 537210 to 541597 reverse strand)

SEQ ID NO: 7721 - DNA, 1659 bp, Cucumis sativus
  Intron number 8 from transcript Cucsa.179450.1 (locus Cucs a.179450) derived from phytozome v7.0 (chr-ID scaffold0123 2; pos 58111 to 59769)
tactctctcgcatctttgtctcaaatccatcaagggtattttctacgataaactaatatgtcttggtcatttccttatttggagttctaatacaaaactatcttccctttgtcagttttgtttgatattctgaacttttaaacttttaaaatgattggccttaataggaccaacccaacgcaattctattgaaatctaatgccgaaatataaaatcttcttcactatgtaatttgttttctttatttgaagtgattttgtagtttcatgatctagagataaataatgaatagattaagacccatctctatactgggaaacttggacaaatattcaagctttagttagtttgttcaaaggcttatacatgagactctctctctctcttaattttgtgatacttcttgaaatatctgagaacttttgcatttcctagttcagtgggtaattaatcccaactcagtcttttaggaaaccaaccaagaaatatttctagcaactagtttttagtcttcaacgtagagagagaacaagacactttaattcatcctcaaactttgacacccatacaaattatcttactgtccctaataagctctaactaaagcctgctcttccggattggtttcccattgatggcttggtatgtaggtagcccagtacttgggtatttcttcattaaaatcctctttgagaccagaccaccttgcaatagaacttaggtatttattcactgaaattctttttgagaccaccttgcaatagagcttggcagatatttctgaatcctactcttagttcaacacctaaatatgaaaattgtcctcttggattctctatatttggaagacactccacccttgttctctttatttttctttattttaagggagagttgcgaatatagtaaatagacccaaagtactagcatataataatattatgaaaaataaaaattagataaatatccaattcttggagtctattattgatagattttgctattagtagtaagagatttttttctcatatattcatatttgtagacttctataaatgatagagtccatcagtgataaacttttatcacaaaaaatttatcattgatgaagtatatcattgattgcaaaatttatcactgatgaagtatattgttgatagggtggtatcgactagagtcaccactgatgctgtatcataggtagacttcattggatgatcgaaagactatctgtaattcaagtctatgacttgtaggcttaatatcttttgaaatctatatcaacatatcattgatagatttcacatagcttacagaaatctatcactttatagaaaacggcttttggacttttatgcttcattgatagatagtttagttagagttcagttatatagacttttattatgtacctaaaagtactgcctactataatcaacccttatttagtttgattctaaaatgaaaacttatgccacttagttaaaaagaaagatagagtgagaaaactttagtttgtaacgcgtagctaagccacctcctttctattcgacttttacattcattaagatgctgggttatatcccttatcttcgatgtaattcttacactcaacataatatgacagagaatttcactaaaagagataaaaagtcatcc

SEQ ID NO: 7722 - DNA, 5603 bp, Cucumis sativus
  Intron number 2 from transcript Cucsa.178480.1 (locus Cucs a.178480) derived from phytozome v7.0 (chr-ID scaffold0122 7; pos 707673 to 713275 reverse strand)
ttgggaggatccaactcttgctgagtggcctgaaagtatgcattttctactttcttttacttcacttgtttgcaatcattggacttattgaaaaaaaaatgtttggctaggaatagttatatttgttccggatctttaatatcagcttgaatcgatagatgttgtttttaattactgcatctctcacatcttttaacctcggatagttggttttggatttgagatccccattgaaatttcttagtcaagtcctcaatgcatgattttattttaaaagggaaaggtaagaaccctccatttgagtctttatggaaattggaagagggatcatccgaagaaaactaaagcctttatttggggctcagttatggtggtttgaatacaggaaagatattgcaaacaaggcaaaccttttcattgaaataatgaaatgagcctaatactcaaagtacaaaagatgatacaaaatgtaaacttgccagtacaaaagaagtaatacgagactagttcaagatttaactaattgtagaagagaggatagcacattccagtttagaaaaagtcttgaattgaggaaaaagtctgcaattgagaaaactgcaatttttttttgaaagtgagcactgggagtttcccaaatcataacccaaatgaagaccttgacttctcctttgacagcttaagttccgttgaatccaaataaccagcttcttgaggctcacctagcaaccatccattgacccactaaatatgcaaataaccactggaattcccacacttcatgtttgggattagaagcaattctgagtagacttggaaaaagagaactcaaaccaaatgaaattagccgaaataatgccgagaagaaatcttgctggtataaccaagttaaaacttaaaagaagcaagatgatctacatctacttgtaaccaatctcaagaaaatgaaaaactgctaatcttatcaagtgaaggaggagatactatttttgacttgtctgttggacttccacaattttttctttgcctgagagtgaccgttggtttccatgtgaactgaagcgaaaggataaatctggtttcctttccaaaattggacttccacaattggtttattgcttgtcaaggagtctctaaatctcaaattcacttatttgttcaatgcaaacttgcccaaagatctcgcaatttaatattggaggcatttgattgcccctgagccatgtcggactacatctaagttttttttttttgatgaaatcaaccactttaatcaagaaagaaaatgaaagaatacactagcatacaaaaaacaaacctaacaaaaagaactcgcttcacaagaagggactccaactatgtgaaatcacatctgtagaatagttacacaatgtcttcaagattgaaatccaaagagaaacatgaaaataaacaaggtaccataactcccaaggatccttctccaccccctaaagtctaaacaccttactgttctgctcaccccacaagatccatataggtaggtcactttttaaaccatctaaggaactacaatgggaggatatcatcatttcatcagaggatttcgatagtgtatctttctcctttggtcgatttttggatttcttctttttcaatcctttttactgatgtaaatgtattgatccatttaaagattgtagcgttacttcgtaagtcacttcttgaacattatttttgtaacccaccattagtggttggattttacctctttgtaatttcattaattaatgaattagttaactttttttctgtccaaaaaatgtaaaacaatacaaaaagaaaaaccaaaagtaagaggtccttcgctaaatgacttttaatatttcttgaggtggtaaggagccatgaaggaataaggatgttgctaacattatggaaagaaaggaaatgtatggtttttcaaggaaacctaagaagtcaatggaaagtctcattgctttccgaagggagttatctttttgttatcttcttggtgttaaatggtttgcctctatacttctttctctctcttcttgaagcttctaaaggggccattaatggtaaggagaggtcgatcggagattttttttgggatgagttggctgtaatctggggaagcatttggtgaattggaagaccaaccacctctctcccccttattcaggaaggccttgggattgatttagctctccttacaaaagaacagtgttgtagattcactttggaaaaggtgctttggtggaaggtgttggacaacatatcggggaagacctggtctttgttttgatgtcacgaagactgtgcctttgtttcagaaattttatcgatataagtagggtaatgggcggcatattagatctcttttagatgtttgggttgactcaaatgctcttcaggatcatagatctgtggtatttctctgaataaaaacacttctgtgtctggttgttaggatgatgagacagacatctggaaccctaacttcagaagtgggattggctaactgagaggttgcagggttttaaattgggccttgatgctaataaagtaagttggttactccttggatccctcaggatctttctccatgaggtctcttttacttaatctgattgcctcaagacacctattcttaagtgtattcttgtaaatcagatttatgagtaaggttcctaagaacctgccattttcattttcgttcttgctttcattttcaagcattctttgtagtttgagaatagtctctttttatttccatccatgacgagtgttgtttttgttaacaaaagaaaggaatgttcctaagaaggtgaagatcttcttatactccaggccacaggagcctagctacctaagagaggattcaaagtgaagctccattactcttagccccgctacttgtgtgctctgtctgcactgtgacgaattggatcacattctgttgctttgttcctttgcaataatttgtttggccaggttgataagcttttttgagatgcaactttgtcttcctagaaaggtggatttttggctctgccgctctgggagtctcttagaggatgcaatttgaagaacaaagctagaatcttgtggtagtttgcttcgagagatccttggaacttgtggctggaacggtctagttcttttgggattcctaaaactcactgcatcttggtgctgccattgttttagcaaaatctttacttttcctatgattctatggaagactgtttgtatgggtagtgggggctttcttatctccggctcttaggttgttgacctgttgctcttttatggtttgaagaattctcctctatggtaaggtgatggggagaaacctcaaattgcaaagctagcaaattttatgtttattcctagtataaacacttcattttttcaagtctatgctccaacactcacccgacatgtgaagaaagtcttactgctttgataatttttaacttctagacacactttgaaaaaacaaagttaaacatttgctagatttgaaagtgcactacccaatacccactacccaatacccactagaaagcaattgcacttgtactcccctcaaaggagtccttttggatatttcgttcattgatgaaattgtttcttgactaaattgtttctattttcaactttgttttgtcaaccttattgaaactcaattgtttttcgctccaatagagaagcaaaagatagcctcaatacttataaaagtgagggaatctcctatgccctaagggtagggggacttcctctcacaaatgaagtcatttctagcatcccattcgtcatctctttactttttaatgccttagaaagtgctaaagagcttggaaagatttatttgtaatgtcttttggggaggagtatgttaggatacttcctaaaaagaatcaagatctaaaatatattgagaattaaagaagaaactacaatataatccaagtataaaggaactcaggacttccctcttgatagccctcacccaagccctagatcgctccacaaaatacctcactaatcctctttctatttatacaacatccagtaagagtaactaactttccatctaatgaccaatagattccttaatactaacatactaattttcatatctcagtacctaatactaaattggaagacatatcccccctcctcgccaccacgtaggtccttggaaatccatctccaaggcttgctctgtagctgaaaaatggtctaaaaacttggaaaggacagtaaaatttggttttgggaggttatgtggattgttcattggcccttagatgttccttaccaagaatttacagtagtatttcttgcatagacaactttatttatcaatgttggtctgcatcctcaaatagttgggttagcctttaggattttgattgtcgattaaactcgagagtggatcgagctctacagcctcgtgtagtcaaaatgtcctttgaatattgaagattctaagttttggagcctcaaaagatatggtcgatttttttgttagttccttacttactcagttagctcatcacccattaggtccccgacgatattaatacctcaaaggaaatttgggtggccatagtcccaaagaaagtggaagcctttcaataggtcttcattcaaggcaagttaaacacaaaggatgttctacaaagaagataaacaaattctcacatgctccaaattggtgcattatctgcaggattgaataaagaaagtcagcacaattattcttcctttgctcttgggcaaactccttggacgagattatcgagttttttggggtttgctggtgttagctaaaagaaatgatggggctctttttcttctatttttggaacttttgtgaaaattgtggtaaggtttggggactagaagttctacaatgagaagacaactagccttgacatgctttggactcttatcaaactctttgcatccatctggtgttgtctaagtcttttttgtaattatggttgtttgttggtctttttttgtgaccctttggcctgacaaggataattcatctacacttttgtcatcaatatattctgtctcttattagaaaatagaacaaaggacgtaaaaagacaccctcattggacaatgaatattattgattgttcatcactgttttaatttatttaatttgttttgatgttgaaatttagatattatagttacttttacattattaagaattttgaatgtttgcgcccacatgatcgcatgtgcacacagataacattttttgaagggaaaaaaaccatatccccaatgtttaatacccaactgttttattaattcatattactgtgttagtgtcgtactttatcgatggcacatttcacatttcttatatttttccactgattttgatggatttcctttcccttttggctttgtaaaaatcatgactactgtagactgtagagtatgaattgaattgaagccttgaatggtatcatgttacagtttccttaacttttgagctttgtatctattgctatcatctttagctggaagtatctcttaagaaaaatgtcaattgttgtttgcag

SEQ ID NO: 7723 - DNA, 1144 bp, Cucumis sativus
  Intron number 1 from transcript Cucsa.107950.2 (locus Cucs a.107950) derived from phytozome v7.0 (chr-ID scaffold0093 1; pos 207602 to 208745 reverse strand)
gattctactggaatttgcagtttccaaaatttgaggtaccacttcttcatttcagtattctaatctaattttagtaaaattactgattatctggttttagttacgttagacactgtgggttagtttgtctatattagattcttggtagatctgtattgttgagtagagtcttgagggatatggacgtgtagctcgttgtttgatttcttgaacagtcgtggggaagaaaaggagtaaatttggaagtgaatggttaagttcattttgttgcagtgggaatttgggtttctatcgaatgatataagtgattagagcttggatttgattatgtggtatgtatgttgactatttatcgtttttacttgttcggccggtgtacattaatgatctcaagctctcattatccattaatttttcctttattgtgaggattctttatttgtttatattttgttttttccttcttatatccatccatggaacttctcttttaatgccgatcatggactatattttatatcaatagaagtaattacgtgagaaatgggacaaaatgttataaccccaattaagaagtagatttggggattgtgaaagcatctcaaatttatcaatgataagataatagaaatctgactgtctccaattaagaaatagatttggggattattaacgagagtcaaatagtgcttgaaatctgtccactattctcttaatttaaatgttcaaaggtattttgttattgtagaccatatcaaccaagaaatgctctaattgtccaatagccttacctctacttttcaactttcaacctcagactcgaactgtaagattgtgattgtcggttattcatgtgatgtggaagatttccaaaggttaagagaaacttacccagtttttgcagtattccagctgaagaatataaatttaatggatacagagtctgcttgaaacatgtttgttttacctgaagtggtgaaatcctgaatttcctgcatgcacaagcttacttttcgttctggctatcaggacatttcttcttagaagtgtgtgtgtgtaatatgtttgtatatatagatacatcatcttcatgatatcttaagtactcaaacttccacttccttttcatgcaggattttgttac

SEQ ID NO: 7724 - DNA, 6210 bp, Cucumis sativus
  Intron number 9 from transcript Cucsa.088600.1 (locus Cucs a.088600) derived from phytozome v7.0 (chr-ID scaffold0088 8; pos 871353 to 877562 reverse strand)
tgagccccatatattgtcaggacatcatcaactcggtagtgcacggtttatttagattgctaactttcattttatctatacttgttctcccctattgatgggttaactgacatgtgatttgttagttctgttatttctttacagtatgtattatttttctgcaattgatacatatgatcaaaggagggtgaaaccttctttgtgaactctgtcctcttattgtgcactaatatgttagcgttgatgaaatctatagccgccatgttataaaaaggatggtgctaaaagagttagtatctcattgcataactcattagctgccactctattaatcttattacatggctttataaaattctgatcagacaccaaggttagttggattacaaggtttcatcgcctccaattactgcacaggaatcaacttttggtggtggaaggaaaatcataaattcttgcgttataagcagcgaagtcactgtgataagtggaactggaaaaataaagggtgtttctattaatcttggtctggaaaagaccttcggcctccatgatactgttcttgaaactggctagggtgttttggttctcgccagagaaggggttcatgtttttatctctatgtccaattacgcaaatctcataaatggtaagcctaaacccaaatttcgagctcgtagatgtattattcaaggagtatgtctctcctttctctttactcattctagtggattgccttacagacttctccttcgacggtttgatctggagtgagttggaagttctaaaatgaagtgaacaatcatttttagtttttagatgacactaagaaattttggaaatggcaaatttatttgtctccttaacaacgtagattgcttaataaagtagaggtattgattctgatgccatgatttgggttgttaatcttaagtggatgttttccctctaatactacctttgccttcatctcgttcgaaagtctaagatccaatccttttgtccctattattcacataatatccctgtgtaaacgtaaacaatgaggttggaaaaactccattttctatacggttggaagattttaaacgttcaagtctctctctcttaccttcttataaaaaaaaagtctctctctcttacctcctcacataatctatgcatacttttctcatgctaaagaaagtggctctctccgttgaagtcattagtaggtgattctattggggaagatatagaaatgaagcagcatctaatttagtttgttggggaaaagtaatctttctactctcacaggactcctggacattggtaacattggatcacaaagttgttctgttcttccatctggtcctggatatgcgtagaggggcaactagcctctcctccatacttttggttgggaatccgaagatgttgatgtggaaaaagtgtgccatgtggctggtgaagatgagagtccttagttgaggcacttcaggaagagggggcagcgttgtaagttgtgcccccctccccctccccctccctcctcacaattgttgatcccttgtgcattttggtgatactcttcaaatttgttgttctttactctacagaagagagcagtcccctttcacttctatgctgttagtcaaaagaaggggtttcttaatatggggagtatgatggtggacgctcatgtggcttaatggctctgagctgataatatctgatttctatgtagtctatcgtgaagaagcagcttaagaaaaataactcaaacctgagaaaagaaggaaattcctctgtaggcagaaggttgatttaattttctacgaagctccgtaaataattcttttcggaagtagaaacatttcattgatagaatgatttagatggcagagcccaaacaccaaaagggagaatacagaaaataatgccaatgagagacgagataagaaagacttaaaagcttaaagaggtgcttatttatgcactagaacaaagcagtagaaatagcccaattccatagtcgcattttatatttaatggagtggtggtgaatccccccagttttatttgtagttaaaaaaaataacccaagtccataaagttgtcaaaactagaaaaatggtctcggaagaggtgcttgttcgatcaccccaaagaatccctgaaaaagcgcgtataatagccatccaaagggtcttcttgtgtccggtaatggagtgtctagtcaacaaagaagacaggctattaaacatattctgagagaagaccttcacccagccaaaaccatgcagaatttggactgatcttccttccctcctggcattcggaaaagcatacgaggctttgttggatgttattggggagtcttatggtatttgttagaattagtgggcttgactcaaggaaagatttaccttggttttctttccttttttatcttaagcttgttttctgtttatttttcccctttgtatcttttgttcataagagaaaataataagaaagtcagattgtggtttttcatctggtaattgggttttcatgtaactcggtgtctattttcttttaccgcttttaatatggtattagagcagggtaaagatgaaaccctagacatcaatcttgatgaaatgcaaactgaccatgagacagccgccgctgtcacctccgggctccgccattgaaaaactactccaacagcttcagaagccgctggtgagtggttctgtcttacccttggagccagctgcatgcacccaacctttttgcacatgtgctgccgctgcctagtgcgtatgcccacgcatcaccttccaactcctctaccgttcagctggcctactcccatttgatttcccaagtccaactgcagtacccttttggttagctgcacatccacacctgctacttccctcgtttcacacaccgctgccctctgattctttacaccagctgcacatccgtggtaccaggatcgataaactccataataaataaggatttgaagtcagtgaatcttcagcagaatccaaatcaaccaatttgccaatgaattccagaaattttcatcttttcttggctgcaaagaagagaaaatttgatagcagaattgattgatgatcatggtaatcccacaaaacccttcaaggcaatcgaggatcttatattggggttctatagttcattatatactaatgcctcgggaatcagagcaatcctgcttaacctgcaatggccctaggtggacagaaatcagaatagttttctgacagccaagttcagaacagagaaaatcagaaaatctttaaaattgttggggaaaaataaagctccaggacctgacggcttcacagcgaaatttttattaaaattctgggactactttaagggtagctttgagaaattgtttgaggattttttctcaaataggaagctgaactcttgcgtacagtttgccttattcagaaaaaagaagatgctgtctgtattcaagactttagaccaatcagcttaaccacgttaacatataagcttgttgctaaggtgctagctgaatgcctcaaaaaatcatgcctagtgtaattgcccccacacaaagcacttttatcaaaggaaggcaaatcttggatccaattcttatagcaaatgaagttctttgagaagaaaggatggattctaaaattggatttagaaaaggcctttgatagagtagattgggagttccttgaaaaaattctcatgggaaagaactttgatcctagatggatcacatggatcatgggctgtatttctaacccaaaataatcaatattcatttgggagacagagggagaatcaaagccacaagaggaattaggcaaggaggcccactttcacccttcattttcttattaaccagcaaattgtcaagtgccttgttaaataggctatatgaaaaaggaaagattgaaggtttcaagttggggcaagagtttcatcatctatgttagtaccgctacttgggcttctctatcaagatgtagtccctttctcagccggaaaaaaacagcattcatgtctactgctttcaattcgctgatgacacattaattttttgtaaatatgaagatggaatgctggaatctcttaagaaaagaattgaattctttgagtggagttccgggcagaagatcaattgggaaaaatctaagctttgtggtttaaacataaaagaaagtgagctgtttgaagaggcatcaaagctgaactgaaagcctctcatctcccactctcttacctagggctgccccttggtggttatcctaagcaagctgttttttggcagccggtaattgacaaaattcaaggaaaattggagaaatggaaaagatacaatctatcaagaggaggttgcaccactttatgcaagtcagttctttcccatattcccacatattatatgtcaatctttttaatttccggtaaaggtgtctcaaacagtagagcgtttattaagaaacttctgttgggaaggacattcagggaggaaaattgaatcatctagctaaatgggacatggtgtcccgaatgcaagaggatggggggcttggtttaggaggcttagaaaacaaaaaacttgctcttctagccagatggggatggagatttttaatgaagaaaactccctttgggtgcaagttataaagagcattcatggagaaagtcaattcctttatcacaccaaaggaagaaatgcttgtagcctttgcagcccgtagattagcatttcgaggagctggaataaagtggattcgctggccaggtttaaactcggcagtggcacgagaatagccttttggcatgatccttgggctctgatttgattccattcaaagactcatttccaaggctgtttagactctatgaatccaaatggggcggttcatgatttttgggattcttttaacagcatcttggttcttaaatctcagaaggcaattaaaggaggaaggaattgatgatttcctagctcttaacggcattatctcaaaaaatcaaaccacggcaagtccaaataaaagagtttggaagttagagtctaacggaaaattttcagttaaaccgttggttaagcattgatccttagcttcccccattggaaagcatctatacttggctatttgaagaccaaaagtacaagaagagttaacatcacaatttggataatgctgaatgggttattgaattgtgcttcggtcatgcattcaaaacttccatctcacattttatctccaagtgcttgctctttatgtttgcaagattctgaagatttacagcacctgttttttaggtgtccctgtgcagaaaaatgttggtttgacctattaggatccttcaacattgattgggtctttgatgccaactttaagaagaacgttttgcagctcctaatcggcaccaatctaaaggagaaatcaagattgatatggataaatgctataaaggccatactttcagaaatatggtttgagcggaaccaaagaatatttcacattaaagaatccaattcatcaaatcatctggagatagctagaatcaatgcttcctcatggtgttccttatctagagcatttgaagcatactcaattcaagacattagccttaattgccaagcgttacacgggtagttgttttcttgagcttgtagttttatttgttttgggggattttgttatattatcactctttaagattgttgtgttgtcgttaggtagttttgtttgtccttggtgtgtatcttgcttttatatgtatggacccagttgtaggagcatggggtttggtttttcgttttgatcaaattcgggatgtaataagagtgctaagagggtggcaacctacgtgagatgtctaggtgcacttactcatcttgtaggctttgttcttgtctcctcattgtactcaaacattgctttgtctattcatttacttaatgaagagtcttgtttcctttttacaaaaaaaaaaaagaaagaaaaatacgacaattgctgtgactgcaagaaaccctgtgagtacatttgaatatgaggcatactgtttacaactagaaagtgatataatactggctatgtagcactgacagattttcatgatatgaagctctgcacttggaactaggactaaacgggtatattgatttctctttaggtgtctaaccaattaaatcgactttac

SEQ ID NO: 7725 - DNA, 2343 bp, Cucumis sativus
  Intron number 1 from transcript Cucsa.152720.1 (locus Cucs a.152720) derived from phytozome v7.0 (chr-ID scaffold0112 4; pos 103570 to 105912)
cttccgattgattctctctggtaatttcccctcctttctgcttctgggttttcatcttttccttttccggaggaccatgccactgctttgtattagaatgaatacacttatcactgctctttctctccttcaattcactatttcaacaactacttgcaacgaaattcaatatatttataattgttgatccgaaaactttgactagtgctatgagattcgacaatttctgaaaataaccatgcgtccctgaccacgggtgatatttgtgtcagagttcttttactatgatagtaactcaaagcaaccgtgtagttaagacaacgccatttgttacttgaattgaaagatctcttactagctcataatttaaacagacaccgttttctttaactttgatggttgaggtttctgctccatgttgtatctcctacatttcaaattgtcgcgttctttgtgggtttccagctaccacttaattttattagattttttttttcttttttttatcgtgggcaatggatacctcttgtcttgcgatttatcataagtgtcgcagatatgcttaatttttgaggtggagatatgctccttttactctctagctaacgggttgcacttttatcctcttcaaagaattgcatagttgtaacgtggatgattttatcgatagatatctttgtcatctttgtaggctaagttgttggaggagtgtagaatttagtcataaggaaagccttcttttttagttttcccatattcttgtccccatcactgtagaacgtgatcaattggcatttcacctaaaagcttaagttggtagatcatatccaaaatatggataattgatatgaagagaggaagggaataactcttgagggatttgaacttagggtctcatcggtcaatgccatttcaatcaaatgcttagttcttatggattgtgtaaaactgtaattgacttagcttgactacctctaggttcattcatactcttagataaatggttttcataagtgatctggtgttatttataacaggatgtcttctgttcttagaagatctttttttttatgaatctgttctttgatgatctaaaactcttaagttttgctaggtctactaattaagccacatttgcatactcagcttctttggcattccttttatttgttgttgtctgtgctttcctttgttttattatctctcacacatttcttttttctgtctccaattcttctgcttatacttttgtctacctgtttctctctttccatgtccaagttggattaagcacaattttattatgtatttgatctttcaagatcttaacatcaagaagcatatccatcagatataggacatcagatataggactgctgtttcctatcccaacacttgagacctcttatccgcaggttaaatatgtggacctaatgagaagacaaatcacaaatagtgttataatacaatatgaatcaacattttgcagtctgtgagttacaaaaagatttgttctcggaatgtgagtttcagggtacttcgggcctaatggagcttggggaatacatcggctttgcaaaatggggatttgggttcaaatataatgcaagcaggaatggaccacatgagctttgaagactgttgaagcaaaattctaaatttgtttaaaattctctccgactcttcaccatctaaatacaacacttgggtgttatagaaatggatattacaaggacgtgtcatctttgcttgatgatttcaacagttgagtttaatggatttccttgttgctaaccaaactgattcagtaatgcggttggtattatgcatcatgagagtaccaaccaactagaaaagcttgttcttacctacaatcggtaggcagatgtcccctaattgagattcagtgagtgcttattctgttcatgtttatcctttcatagaaaaatactgctagggttgtgattaagcttctcattagttataacttagaagtgaaaaagtttagtatttctgttagtaaaaccaacatttttcatattatgtggtcttttaggtaaattttagaaacaaattcacgtaagcttgagtcaaaagtggctaataaataagaaatttgggatattgtctaaggtttgtgtggcagcttcgagccatcattctttttgctgtttaaatgcttttctgatgctaacttgtgtcattttctacctcttactattatctaccaatctttaacatgattttgatctctttgctggcattttgttcaaattttaaaacattaagtttagggtaacatttgatgcaatttaatggtggcttcactctttgacatgaagg

SEQ ID NO: 7726 - DNA, 1208 bp, Cucumis sativus
  Intron number 1 from transcript Cucsa.321560.1 (locus Cucs a.321560) derived from phytozome v7.0 (chr-ID scaffold0308 0; pos 1358779 to 1359986 reverse strand)
aacgagagaatttcttcacgaatccccatcagaaggtaacctttttttttcgtaatttctttgcttcttaatcgcgttttctgggagaatattccggatagcattcgtctgcaaaagcacttgattttactgttacgaaaccctagtgctgaaatttggatatactttctctgccactgcttaaaattattgacgtttgttagaaaaaagggttgagattgagaatcctccaccccgtacggttgagaagtaacagtatttgttcttatgggagaagttatttcgaatttcgttgttcacgcacgtaatcttttagattgctaagagtaccaatctcttatttactttgttgttttttaacaatgctagcaattcacttatgaatgttcatacatcgcattcatctttaccatattggttttggtgatttttaggattcaatttgaagttggaaatgttttttcatattggttattggtgaaagttatcccattttttactccattttgctagttttacaatgtcacttaaatatgggtgttcgagcaacaatttatctcaatgaagaatcctacaggaattctgtggcatcattgtgttaagtttaaggatattgtttcatgatggcacctgcttatttgttaatatcttaccggttttcttgacacctaaatgttgtaggataaagtatgttttcttgtgagtttattcgagatgtgcgtaagctagcttggactctcacgtgtatgaaaaataaaagattaatgatagtgcagttgagttgaattcttatgggaggagttaactcaaaagttcatgaagcattttagatttctaagaatatcaatatattctttcctttattattatttaagaaaacgcaggtttttttgttgtaaatgttcacaaaccatatttatattcactagattggtctggtgattttggtgttgcatttgaagctggaaacttttgccacattgggcgtaaatataaaaaatttcaagtcccttctgctaattttatcttgtccttttgtagatgggtgtttgtgtaacaatgccactcattgaagaattatataactcaaaagtaccaatttatttataaaacagatttacttcggatgaacaactttggtttttgcctacctctcatcctcctgtagatttctcacgtggagttcttttttgtagcctttgacctgc

SEQ ID NO: 7727 - DNA, 4474 bp, Cucumis sativus
  Intron number 4 from transcript Cucsa.264000.1 (locus Cucs a.264000) derived from phytozome v7.0 (chr-ID scaffold0233 0; pos 123362 to 127835 reverse strand)
ctgatactaccattgttcttggagcagttggaaaggtaataattagtagtttcgtattaatttcattgtgccattgaattctgtttgttgattgtgtatgtataatattaggtggagagctatatcattgttttcattaagggaacatattgctagcatactttgttggtttggatttgattatgcactagtaatgtgattgtgtcattcaatctctatttagagtgagtttggcatgcttgtcactgaggacaagagaacccacaaatattcccacaatggcatgacattgtccactttgagtagaagctcttgtggcttatttttaattcatctgaaaggctttgtatcaatggagataactacccttcttttattctatggatgtcttactttctcaggcaagagggattttgttcgcacttttaacaattatctctctagttctactcaaatatctccttgaatagtgattcattcactctctctcaatgggttattagagctagatattatccaagctaatggcagccataggtagaacacaactatgaatatcattgtgagacatatttggtagtggttacttttgcgctcttcatcccactcccttgaacaaagatatatcctttcatatcagtctaccaaacttgttcggattactcttcatctttctgtcaattttatcttctttgatattaattgacttgtctttgatattactttacttgcatgccacttgggcatgttctttataaaattgtccactttgagtaggagctctcaagataattgtctttcacttatgttccatagttctcttcattggccaatatagagatttgtttgtcctcctaacacctattagtttaaaaaaatggtttaaataaaacaattatacggcatattgtcttcactatagccaaaataatcaaagtttgttaaagtcattcatccttaatggtgtatcttcactaaggagaatgagaagtatatagaactgtctcatggttggtcacttggccatatgacgtaaaatttcattcattttgctcaatatctcaagtcttgagcattgtttcctctagaataccttaaaggcgtgttaggtatccttctccttgcaaacaggatatcccaacaagacacaaatatccaacaaaattcacgatgaaacacccttttgttatatatttacttcaaggaaatcaacaacagtaatgtcaagctaagaacaattacaagaaaggaaagatgaaccaaaacttcttggcacattctagagggttgagtagcctccctcaagagatcaaatgctcaccaaattcttcactcccagtagcattcaaatccctactccttgacagtggttctcttatcaggctccaactcatcattctttctctaatagttttgcttttgtcccatggccaccctcgctggtaatccctttcttactcgttctcttatatacagtaattgttagaggccttataaagtgattgatgactaacttcttttcacctcctttggaagaatgctaaaattatgtgtcttaactctatttcacaaaatgttttgaaagcttgggttggaaatgtatccttggagattctctctattcctcccttttctctttttgataagaaacaatttcatcaatgtatgaattttacgagataatctatgatacaaaaggctttcccaagagatagcattgccgtcagcaaaatcaaagaactcttcgaaattgtactctttattcaataaagctcttgatccaaaagaagcccctgttgatgcggacctgtacatagctttgactttttcaaaggagtggcccgataagacaaaagtgaggatattctcaacatctctagaggaagccataggccaaccagaagtgttgacaattctgtcccagtattggtagtgaaggagcattgaatggaaaatgtggaacaaaattgtcttctgattttcggagagagcaccagcttggtgtaatggtggcatgtgcctttggaggaaatcattaaggaacaatttgatatttttgagatcttcctgattcctttacctaatgtctgatccaagtgccgttgttagctaacaaagatttggtggtgaaggacccgctaggatgtggcatccatattcaaaagtcctcccattatgagagaagaattggtgcaagttcaatgcgaagacctgtccatttcacttgctgcataatcggaggatcttttcaagagaattttgagttattggatgctgtaaaattcaatagctctaattctctctctattcttttgaaatcatgtttctcatttgattcatgccaactagggcaattcttagtaatttgtggaggctaacattagtggaaaacatctttcgtctaaagagatcctacaaaagaaaacataaattgaccttaatcataacgggacatttatacacacttgggagagtaatttaaaagccaaatgaatgtggatgggtatggagatgggatcttctagttctctgtgaggatttgatttggttttatgtgtttttttaaaaggataaattataaagaatgcccctcaaccttgtggtttgtataaaaaatgcccttaaaatttttgaaaggactttcaaaatttccaagatgcctgtaaagttttgaaaagaattaaaaaatactcttaccgttggtttttcaaacatacccctaaactattgaaaagtctcataaatacccttaagcttaaaaaaaattcaaaaatactttagttaatccaatttttacatcaaatttcttagcacctaaaataaaaaccaaaattttaagttaaaaccataattcaactttacatcgatatgtcgatatttctattgatactttcacatttccatgggtttttgatatcgacagaagtggtgaattattattttcattacattgaagaaaaatccacaaatcactagaaataaatatcaaaataacactaatataaatataatataaatgatagacatgtttacttatttgaaagttataaaatatttatttacactaacttaaatttatttttgattttttttataatttttccataaatatccattttaatcaaactttcgataaaattaagacttcgatatatccatcaacatcgatattttagaccttggttaaaacataaaattcatcaaaatttcacaaaattccaaaataaaaatttcttcttaaaagaatactgaaacatttagtcaactaaaaaagatctcacactgatagatctatcagaccatcactgtgcgttaatagtaaaatacatttttctatttgacaattagttgtatgttaattaccacaataactatggagattgtttgtgtacatgatctatgattctgtgttaatagtcaaataaactatggttttaacttaaaattttagttggtgagaaaattcgtgtaaaatttggatcaatgagagcattttttaaaactttttttaagctcaatggtatctataaaacttttcaatagtttagggtctttttgaaacaaaaatttaacggtttccatccaaaactaactctaagggtattcttgaacccttttttgaaagtttaagggcatttttgaaaattttgaaagtttaggggtgtttttgacccaaactacaaagtctatgagcatcttttgtaatttatcttttccaaaatatatgtgagagtctgggctagcttgtgcaacttttgattaatctcacggtacaacttgccagaccccacggcatttgagtgtcaaagaaactcgttgaaaattagttccttggtagggggccacaatgaattggacccgtgacctcttagccatttattgagactttgtctcctttttaccactaggccaacccatgatggttgggtttgagtgtctatccatcatttttattaatctttttgagccgtagttccaggacagggtctttgagggacgcttttggattacactctttgtgcttttgacagaaatgatatggtatagctggtcctcttcctgtagtgggaccctgttttttgtgggcttgattttttgtgtgcttgattttttgtgtgcccgtgtattcttccaatttttctcaatgaaagccatttatttcaataaaaaaaatgatatggtattattatttttattctagacgcctttcaaattagaaatgtcttttgaaatctatttgttggggcttccatttcttttgatttcatataatcaatgagtttataaaaaaagctattattattttttaaaattttgcatcagatataagggttggtctcttggtcctcttttcttgttcatgctacaggtgactatatatctcccacaagataaattatctaacctttcttaataaatatattatttttctttttcaggccgttagagttgaacattgcgagcgagttcagtt

SEQ ID NO: 7728 - DNA, 7050 bp, Cucumis sativus
  Intron number 1 from transcript Cucsa.388640.1 (locus Cucs a.388640) derived from phytozome v7.0 (chr-ID scaffold0396 7; pos 1047629 to 1054678)
gagcggttgtcctcctcgcctcctgaaaaggtttgttaatgctgctgccccattaacgttatcatttcaatgaattgcggtttgtgtggatgaggattttagctgatgtttggtttgtagttttgtagtcttgctaacatttagtttgactcatttttttaatgttattttgagtttacatgaattcgagtgtctaactttaactgaatttgatgggcaatttgtgtgaggttattgctttttttcttaattgtataaggtatttacggacgtgagaattttaaattataattgtgaaaaggaaaaaactgatgtgatggattataacttctatggatctctacttgttgctgaaaattcttgcattctgttaattccaagccatcctctgaaacctctattgaggtgtcgttatagtaaggaaaatgttaaacaaatgttattgtaatttcatgtatattgatgatgcagggatattgtttttagcttgttcttgtgttcttgtacttctctgtggtgtttcttgtttaagttggatagttctttgctctgacgttttgcccttcttagttgtatctaacagctttattataagccgatactcagttaggctaggtttacaaggagcccctgttttccccccatgttgttttgacagcctatataaatggatgctggtgtactttttggcacttagataatttcacttgtgttattattcaatacatcaattgaagtgctggatcattatttaaggcttgtagagactggagactggagagggaagactttttcttagtgcacgatggtgatgggcatcctttattttcttagagttctctagtgagaatttacaacctataaaccatgatcaattggagagggtcacatcctatctccagtctccgcgcttgtagagactggagagtgtagaatttttcttagtgcacgatggtgatgggagtcctttatttacttatagttctctagtgagaatgtacaacctatcaaccatgaccaattggagagggtcacaatctctccatactaaattcacaaaaacacacacgctgtttttcaaaacaactcatacatgtataaccacaaagctgagaaaggaagataaaaactcataactccctaacacacaatatagaattgaaataaaataactgctaaaataactacttttccttgcccttgtctttcttgccccttttagcatatacatttgcaattggaggtttaacagatgggttttaaactgattgtgtaaacaattcagtgaattaaggttgaatcttttcataccatagacaatgttgctgtgacaatgttgaaaagagagtggtcagatgtaattcctcaggactctagaccaaacctttttaccttttgtagttgatagggatagctatctatttcgctagaatagcagtcctatttgctgcctagggttttgtaaccctttctttaccaagcgaaaagagaggaccattgcatgctatcatcgaaaaaggaaaccccactcaagaagctctttgaccacgacttcataggttagaataaaaaaagctgaggaggctttcctgtaaaagggtaggccttctctctagtgccactttcttgtaatgactcactttagctgtagccttattgtccttcaacatctcccttcctgatgaggaattcagtttagtgaatctatggtgaaagtacatgtgtcagagaagctgtggctagttctactagtgatgctcttggtttaaagccatatactatgtctctactcctacatctagttacggcgttaaggctaccttcaaagctatttcaaactgagtaaagtctctcacgttaaacatggagaaattttccaaataataagtcttcaactcactcttgacctgcgtgggttagctttttctttcttctttagttttcttttttagttgggaacacgaaatgcaggggttagcttttttgaaagtttctttcgatgaaccaaaattccaagtttgaagataaacaacagagtcattttaaaagggatttggttgcaggtttctctgacgcaatcctaggatggttcttgaactgaaatagaaccaatggttttaaattttagataactctatttaatgtagaacatcctcctttcttgatgtttctttaagttctttagctaattcttgagtatcttgaattatctttcttgtatcttaagattagttattctttagttaaatcctgtgtatcttgagttagtcataaaaatctaactcatcacttctaaccactttggtaaacttccagtctataaaaagacttctcttctcattaataaaatcatcatcatcagaagtattattcataaaaattcctacgctttgcaattactgcatcactattacaaattactgcatcactattctctctacttctgatcatatatctcttcattgtttcatcaatattgtttaaaaattttctttatacaacatacaagctttaccttaaactattgtctactgcatatttctttatgttccttgctatgcttcttcaatagttacaaaatggtttcccatccatttcatgcattttctatctggaaatattgtacataatcctaattctaccaggtattggctcggtacgaaggttggttttcaaagactcggtattgacccgtcataaactaattattggatatagcacatctaacctacaggacaccagaatccataaaaacagaaaaagtgggaatagcagattatacttgcaatgatgtatgggttgctcaatgaactttgcaaattctgatttaatcaggcaggcatggtctatgagatacgaaggcaaagtgtaggggcaattggaaaatttctttgggtcaaagaaaagttcatgtaaagttgacacagtttaacatgatcatacttgaccaatagccaatttaattggaaagagtaataaatgtttcccaagggctgtgagctgacttttatagatgaggcttaaaatagctactaatatgtttcacagtcgccaacatgagcttagctcaactgacacttgtatattcctgtggacaagagttcccgggttcaaatctccaccccagcatttattacaatacctttgcaaaaaaataaaaatatgtttcacagtctcaatttcaagtttttcttggccaagcacacacgttttttgctatttagtgttgtgttctggttagatttggtgggttggcccctgaggtaattatggaaaatttatttatgaaaagcttaccataaatctttttttccttttttttatgctcttgtgtattctatttaagttcccaaattgtacatttgtaaatcatcagaaaataataaaactaaaaatatcgttgtttttctcctggttttcgagtttccacgtaagccttgtgttggtgtcaattgctttcaatgtagttcagagctaagcaataactaaaccctagaaaccaacctaggagaaacctagatcaaacctgaatctgccaccgccgccaccgttgtcgccgccatggaaaaattgctccaaaaccttcagaccgtctatctacccaatgggagtagcctcgtagtcgtacatgccaccgtctgactagaaattgcctcacacgctgcctctgtttgacgcatgggcccacgtgccaacgtcgtttcatctcaccgtccagcctagtcccttctacacgtcgtcagctttctaatcgttagacccttccagtcagctgcagcctctccgaacagcaaccctctatcataaatttgtccaatctgacagcaaggacccactctttacagcaaccgtttttctatggtaacgggaatggccaaccccataacaaatcagacattgaagcaggcaagtctacggtgcattccaaaccaattgagttgctgatgtattccaagaacctagtaacttcgttccttaattttccttcgaattacataattggctctttgggatcctctacaaggaattttctaggtgagaaattaaatgggcaaaattactcttcatctaagaagcacggacacttcatattagaggtggtatcggtgtcggacacttggaggacacagattcgtccggacacgacaggacacagacacgtactcattgtgagcactgctagaaacaatggcacaccatggatcaatgttggaaactccacggtcgtccccaggaggtaagaaacgatcctccaacgagaaacataactcaggacgtgcccacgttagagaaacataaccttagtgaattcttggcctctgagaggattgttcactaaaactcgtgcgcctacacttctcaacaaaatagggtggctgagaaccgtcatcttctggaagtagcccacttctttatgctatctacttctcttccttcatacctgtggggagatgcgattcatatagtagcttatttaatcaatagaatgtcttctcgtatcctccaccttcagactcccttagattgtcttaaagagtcatatcctactactcgtctaatctatgaggttccctttcgtgtgtttgggtgtactgcttatatccacactttcggctctaatcaaaccaaatttacccctcaggctcaggcttgtgtatttgtttggtatccccttcatagtgcggttattaatgttttcatccatcgtctaggaaaatactttgttactatggatgttactttccgtgagggctaaccctactttcctgttagccatcttcagaggagagtgtaagtgaagagtcttaacagcaccttagaacttctcgaacctactcctagtaccatgtttgatttcgaccttaatcctatagttctacccataaaccaagttccttggaaacgtattacataaggaatcttagaaaggaagtttagtcccccctaccagtctacctcgggttattaaagtggagcggctgactagtaggggggactaataataaggtatggaaaaccctattgtactaataataagatgagtgagaataacaagtttgatgttgttcttgaaaatgtggaagaaaagaacaatggtgatgagattgaggtaagagcaggaaccagtaataatgaagttgaataggtccatacagggaaaattgatgagtatgatccctcacttgacatttctttgctctgagaaaaggtaccaagtcttgcactaaacatcctatttgcaactatgtttcctatgataatctctctccacattttctagcttttatagcaagcctggactctaccattataccaaaaactatctacactgctttggagtgttctaaatggaagaatgttgtcatggaagagctcttgaaaataattgaacttgagagatttgtgctctacccgagggacacaaaactgtgggatgcaaatgggtgttctctctcaaatacaaagctaatggaactcttgacagacacaatgcaaggttagttgcaaagggattttattcacacctatggtgttgattgttcagaaacttttctcctgttgctaagatgaatactgttagagtcctgctatatgttgttgtgaacaaagattggcctctatactagctggatgttaagaatgcatttctaaactgagacctagtggagaaaatctacatgagcccccgcctagattcgaagctcagtttggtcagcaggtttgtgaactccaaaaatccctatatggcctgaaacagtcacccagagcatggtttgacagattcactacccttgtcaagttccaagagtacaattagggacactctgagcacactttatttacaaaagtgtttggagatgatcaggcaggaatcaatcaactcaagcagagaatgggtgatgaatttgaaatcaaggatttgggaaatctgaaatatttccttgatctgctaattgagacaggtacgttgggatgttgttctgctaacactcctattgaattcaactgtaaactaggaaactctgatgatcaagtttcagttaataaagaacaacattagcgtctcgtgggtaatttgatttacttaccccatactcgtcctgatttttcttttgttgtgagtgttgtcagctagtttatgtaggcttccaatgaggagcacatgaaatctgtcaacaaaattatgagattcttgaaaatgacacctagtaaagcgttgatgtttagaaagacagatagaaagaccattgaggtatatactgactccgaataggtaggatctgttgacaaaaagtctacctccggttattgtacctttgtttggggcaatcttgtaacttggaggagtaagaagcaaaagtgtcatgggcaggagcagtgttgaggttaaatacaaagctatgagtttgggaatgtgaggaaatttgacttcaaaaagtcccgtttgatcttcatcaggaatgtgagactccattaaagctcttttatgattataaagctgctattagtattcctaacaacctagttcaacgtgataaaactaaacatttcatcaaagaaagacttgacagtgggagcatatcattctgtacgtccctccgagtcaataggttgccgatgttctcaccaaggggcttctcagataaaatttgactttggtgttagcaagttgggcttcattgatgtttacgtcctaacttgagggggagtgttagatttggtgggcttggcctttagggtaattgtgaaaattttatttatggaaagcttaccataaatctttttttcctttttttcttatgcccttgtgtattctatttaagctctctcattgtacctttctaaatcatcataaaataataaaactaaatatattgtggtttttctcccaattctcgggtttccatgtaagcttgtgttggtgttaattgctttcaatagttctaaaaaaatacattattatagtcttcattacttatattaatcaacttaacttgagtatatggttctgtatgccagtgttactgggaagctggcggcaactgcaat

SEQ ID NO: 7729 - DNA, 2705 bp, Cucumis sativus
  Intron number 27 from transcript Cucsa.307810.1 (locus Cuc sa.307810) derived from phytozome v7.0 (chr-ID scaffold029 78; pos 91997 to 94701)
gttttgaggttagttttttttctcaattttgcatcaagtgttgatataacactaagggcttctttggattgactagagagaaatatttttcaaaaagctcattatttaaactcattaaaatagactttaaaagtgaaaaggagaaacaagctcagggtacaagagagttatacaagagctgtcaaaaatactaggaatcaacattcgcactcgaacatctgaggttgacacccccttggtgatctcatcttttgtagatgaacaaaagtaaacaggaaaaataaaactcaatactaagccatgataatgaatctttactaggtcatgactagtaaggagtttagtacaatgaaaagtaagcaagagaaggaaaagagacttaaaaacagaaaagtagcaacagaatcaggatagaaagaagataaaagcttcttcaattttgttgatgtcttgaatgctgtagcttccaaacagatttgagaggatgcacctggaggcatttctgtgtgctatttcaaaacgatcaaagcaacccattgatttatcataaaagactatttggttcctttcagaccaaatttctgccaaggtagctttcaccttattttcccaaagtagtgtagcttctttattcaagctgaaaccttttgacaaagtcctcacattttctctaaaatctgctccaaagacccaagacataaactctttaaacagtacttcccaacacttggtcgaatacttgcagaagagaataaatgttgggagtcttcttttttctgtcaacattgcggacaaattgatggagagacacagctattaggtagtttatgttgcataactgaggacacattcaaatttcccaccatcaggatccaaataaggatattcacccttctcgggctgctagacttccaaacggctttatagagtgctttgtccaaaggggagaagaggataagtgatgattaagggactttactgtgaacttcccgctgtcatttaaagaccaaagccagctgtcatgatccttgaaaagacttttatctgcaattctctaatttcctcatcccttagcaacggtgtaaaatgattgacctgcccaatgaaaagtcccaatgatcggcaaccgagcagttggggagtatggcaatcctaaacagtcttgggaagacaattaaaaggtgtctcactcacccatgagtctagccaaaaggctatccttccatttcccaatttaaaggttgttgatgcatctactttcaaccatgatctgcagatcctaacccaaagacttctcaaacattttccatttccatttcaaaaaaaaagaaaaaagaatagacttcagaaaagtttcaaacggtatattgagtggttgccaaacattcaaatttgttccaaaatgacttatttttttacttactttttaaagagattatttcaaatagtaaaactgtcgaaaatatttacaaatacaacaaaatttcaaaatcaataatagatactgaaagacactctattcgtgtctattattaataaaatctgaaattttgctatattttgtaattattttggttcattgtgctatatttgaaaacaacaattttttaaaattacagttaaaaatgtttttcaaactcaccataagtttactttcactcattagcctaagctttttgatcaatcaatgtttttcatggtatcagagtatgaggtccaggtgatattgtgtttaaatccatgcaatgttattttctccccaattaatattgattttgacttgttagtttttctgcaaattttcaatctcataagtgaagggagtgttaaagttttgatataatattaaatttaccttcactcatttgattttttagatcaattggtgaattgatctaaaataagtagtgtcttaaatgctgctaggccctagtcttgtttctgtttaaagaaaaaacacctaggtgatgcacgacatgcaatcctcattttcagatataaagcctgcactctattttataattaaatttttatttacatttttcgattgggcgtctaatgcctaaaggagcacggaaggctggctggtgaaatgatacaaccccttagtgtgcctcaaagcttttaaaaacacttgttccaaattctgttgccataaaaagctgaaaaggcttcatattttttttcgattcttcatgtgtgaccctcacttatgataatttcctcttttattgacatgttgattcatggattaactggattgatgatggaaaaaatgatctataaatcacctcagttaataaacccacacaccatggacttaacaaaaacatcctcaaaactttaccttttgtttaataaatatacctataattttaaaagttgtaatactattcacctttcataaaggtttcaatttctaccaagctaccaaagctggtaaaatgatacaacccttgagctaacaatttctatatttgcgttatctatatcctactcgtacgtattttttctttgtttaggtttttttatttcacaatgctttaaatctcaataaattaaatgaaagaaaagtagcgctctgtttagctacttcttcacaattcaacagcaattattttgcaatgatttcaaagtgcgcaaacccaatgaacccttgttgttttgcagaccagagaattaattgaggatttgagaagtgctag

SEQ ID NO: 7730 - DNA, 791 bp, Cucumis sativus
  Intron number 2 from transcript Cucsa.161880.2 (locus Cucs a.161880) derived from phytozome v7.0 (chr-ID scaffold0114 4; pos 1662398 to 1663188)
tcctctcatatttggaggtaaaacttaaacagttttgctgttttttgtttgatatatttgaatatttcatctactcatcttccttatggagcctatattcgagttttgtatccgcataaagaaagttcaaggaatgatttcatatcaccttatttgaaataccagaaatgatttgaattctttatctagatgtttgctgaaaaggaaatgggggaaaaaccgatacagtccttcactcctgatttatgagaaggttaaactagctgtttacttgaaaatctacgaaatcataagaaatcaaccacttttgtctgaatttcttacgaagaaaaattatgctttaaatttagcatgttttaaaaccatattggttaacttacatgcttagtctctaaactttgagattttcatacacctagtttcaaactttctccattacaattcaatgtagctttcataattttctaaatcgatgaatctacaagacacaagtcagaaagcttagagcttcgtttgatatcatattcaattttgtatttaatagatcaattcattcttaaaaattgtaaatttgtcgtagatgctcaagaaacaaatagacgaaaacctaaagttgataattgaaccaattatattatttgaatggataacaaatatttgaattgatttgcaagtccatccgaatctaaaatcatttagaccccaaaaagataatatttcatccaagttgtttctcattttccagcaatagtttggctaacatgattaaatgcttggtatctcagcttggg

SEQ ID NO: 7731 - DNA, 1812 bp, Cucumis sativus
  Intron number 2 from transcript Cucsa.295060.1 (locus Cucs a.295060) derived from phytozome v7.0 (chr-ID scaffold0285 2; pos 34672 to 36483 reverse strand)
cttcatctgcaaattcactactttcaacaattaaggtatgaaagtttgtttaattatgagccaaagagaattttcattctgcaatgacattattcaacatagacacagaagtttatctacatttggcttgttaacaacccaagaaacacgaacactttagtttgactagcatgtttgtgtctggcacgtatcagacacttcgttagacacattgatacttgtgttagacatgtagtagacgctgttagtgtaataaatgagttggatgctagatgtacgaagtcaaagatagaaccatcatttattaagcttgcaacatatgcgaaatagacacatatgaaaaagtaacaatttgatagcaaaatacattaaactaatttttatgtatatggtataaactcattgtatgttttaataaacgtgtcctttccttggccatatcctaatttttctctttagaaaagacgtgacatcatgttcgtgttgtgttttatttgtattcaagcttcttagttgacagctctctcacctgacctgattgattgtccctcgagaaagattaatgattaaaggcttttatggttactgaagagggattaagataatctactgaaattagtgaattgattagattggaacagttagatgaagatcttctttttcttctctcccttagatcatttcttgagtatataattttctgtttcctttgtgaatgagggaagataaaagcatagaatctgccttcgtaactggaacgcaacatgtcctggaagtacattttttacttgttaaaagttgatatagatttattggaggcaaataacagggaagaaagaattatggcatgtaagaaatgggtattgatccttttgcatattgtctattgcttcctcaattactactaccatccacagaaaaagttcaataatttacttttgcagcacaaaattatctcaaccactaatatgcacatttgattgtaacaacgaaatgatacgaatctcacttcacattgatttttagtgtcccaaattcaactcttattggatttgagatcttagctttgatgagaaggccaacctaaacaacagcggattttactgggaaaaaacatcccattagtagataaattcaaataaagcaataaaactgggagtaagtgaaaattttcaaattggagaaaaaactccatactaaaaaaattccactgcatgaaaagttattaccatcacgcaaaatccctcatcaaccatatgcctttttattttgttttgaaccattactttcttgaatctttaaatgtgggagaatcaatcttctaatatttagtcaaaacccaacggatgttatagttgatccaactttgtcgtattcgaaccgtttatattcatctaagaagcatattttaaaaatctatggcaccaagaacacgtgtattaaaaaaaaaagtaaaggaattgatgcatttatagtgtataaaaacttagtttgatgtatttcacactccgaagttattcttattgtcatctgtgtgcctttttagtctactcgacaattgttctatacatgctgatgagtgtgtctaacacggacaagctagccagtaaagtgtccgtgattattagatattcatacagtttttgttcttgaaacgtctgcttaattaatatcaccagaatatttgatcggaaattgagagtctcttgaatttggttatttgagaaagatgagtttcaattgagtagaatacaaatttgtctgatgttgtaaatattctatttatgcaggaacagggaggtagaggttgct

SEQ ID NO: 7732 - DNA, 3359 bp, Cucumis sativus
  Intron number 3 from transcript Cucsa.151340.1 (locus Cucs a.151340) derived from phytozome v7.0 (chr-ID scaffold0111 6; pos 222800 to 226158)
tgactctactgcgtggcttcttctattggttgcaggtagtttttatattaatttagcacaaatttttatttcagtagacatttttaaagaatgtctcaatggttaagcagcatttcctctcttaaaaggtcggaaatattattgttgaacttgaaaaaatagtcatttttagcaatgagtagggatgacacgaaagtgaaatgaagttttctcaccagccagttctttgttttttttttcaaactgaaacaagtagttttattagagatcaggaagaggcacaagctcaagctcagtgtacaagagagttatacaagagcttactagataactagaacaagaggcaaaataaaaactaaacaaaggaggtaagctaaattacacaagacagtaaaatcataagtgcaaaactcattggggcagaatcaagctggagaaatgaaagcgttccaattaagttaagatgttgaatgctgtagctgctgaaaatctttgagttcgaacaccaggaggaggcattacaatgagctatatcaaagcggttcgtccaatcacctgatttgtcatggaacaccttttgattcctttcaaaccaaatttctgccaataaagcattcaccgggtttacccatagtaaaggagcttctttatttagctggagaccgctttgttaaagcatcacattatcacaaaaagatgctccaagcgcccatgacaaattaaagattttaaacagccttttccaaaagttggccaaaaacttacagaggaagaacaagtgttgggaatcttctgcatggtgtagacagtgggcaaatggagggagagaggcaactattaggtagcttacgttgtaaaactgagaagacattcaattgctctatcaatgttatccaaacaatgatacttgataatgcagagccccagtgatcagtaaccgaaccattgtgaaataatgttattcggaacaaccgtggaaatgttaaaatgaagagttgacacacccttccatggatctaaccaaaaagctatccttctccatttctcaatctaaaggtggccaaagcttctattttcaaccaggttctggctatactcatccaagggcatctcgagcaaatgccttcttttccgacaatgtgctaattaaaagagcctttgtcgtggatgctcctgataaacctttcacccccatttggctagagagccaagttttttattttaggggaccgaggcctccatccaaagaagatttattgaccattttccaattgacaaggtggcttaatttactgcccttatgaccctcccaaaagaaattcctcagaattctttccaattttgaagagactccttctggcaatagaaatgtagacgtgtagtaagtgggaatatttaaaagggcagatttatagagggtagctcgaccccctctcgaaaggttaaacctcttccatttatctaactttatttggactttatcaagcactggttgccaaaaagaggaaagtttggtgtacccccctaacggcaatctgaggtagatcaaagggaggtgatctaccttgtaccccaaagaggatgcggtggacaacaaatccatttcttacacattgatcccacataatgtcaactcgtcccagttcactttttggccggagcaccattcaaaaagctttattgtctgtttcaaattttctaacatgttgtcatatttgcaaaatagaagggtatcatccttaaattggaggataggaacgtgaatcttatccattcccactacaaaaccttcataaaagccattctggtgtagattttcaattagtgtaccaaggacttcacctacaagtagaaaaaggaaaggtgaaagagggttgccttgtctaattcccctgatggccaacactcttcctcttggcctgtcattgatagaaactgaatatctcgggctcttgacacaaccctggatcctctcaatccacttgtggtcgaactttttgcttctcatgattttttcgaggaaatccagtcaatcctatcaaatgctttttccagatcaatcttgagaagccaacctttctttttctttgcccggtacttctcaacaatttcattagctacaaggattggcttgagtatttgccttccttctatgaatgcacttagcgtggggtaaggatacttggcattacctttttaagtctttcagctagcagtagcactttggcgattaccttgtaggttaaggttgtaagactgattgacctggatttgatggctactgcatttcttttaccctaaaccctccctagaccctagaccctagacccggatcaaccagatgaattctcctacaagcaaacattcaatttccattcctataaaaaccctcaaaaaccgagatgaagtttaatttaatttgactaaattccaatgcctaattaagaattcagccggaaagctgtcgggacgaggtttgaggggatacatcttgggccagggctttcggagaaaagcgtagcataaaactccagaatcaggctttcaatttctctgaaggaattggtaggctccccaagatcattatctcagcaatcgggtttttccttttttaactgtgagaaatctgtggaagaagctggtgttttcatcccctaagcggatccaattcaactttcttttctgaattagattcatctcctcaattttgtgtaaggacatcaattccgccttcaatgaagatctggattctagttcaaattcagaaagaagaaatgagtctgccatagcatcccgcatttcaatttcccgagtcagttcttcttctcttgtctgttttttctgaactccagctaggccgcccttctcaacttgtcactaagtacaaaatctgtccagccttcagaaccactgttagtccatgctccttcaactgccaaattacactcgtagttgcatgatccgaagagggagggcccccaagtaaatgatccggcctcaagcagaatgggtaagtggtctgagaataaacgagcttgcctagaagctcttgtgtttcgaattcatcatcacaagctctattagtaaaaaatctgtccagaactgatattgcaactgaagccccttctcgagaccaagtgaacttaccatttccaaggggaatttccagcagcatagctttgtcaatgaagctattaaacagctacattgttgaaagtatctataatgaatttaaattcttaggtttttcttttccccctagtactattctgtaaaactatactcattttgtaagaagtgttgcaatctgagaggatattttgtgattatttctttctttattttccagaatttatcac

SEQ ID NO: 7733 - DNA, 2428 bp, Cucumis sativus
  Intron number 1 from transcript Cucsa.397860.2 (locus Cucs a.397860) derived from phytozome v7.0 (chr-ID scaffold0415 8; pos 398892 to 401319)
gtagtcaaaggaaacgacaattagtgctttaacgtgtgagtattcaggcctattttatggtttttattaaacttttggttgttttgaaatttggtgagattttagccaaatacagtgtatttgtgtgaatattcgtgtttgttcaagtcttttaggtgagtgtgggatggaggttttatcccaatgattgtgaaggggtaatttcggtatttgctaattagttatttaaaaaatcagtttactatttttaaaattttaaatctttttgttatttttcaaaagaaactttaacgtttttctctaatatttactgttttttacttataatttctttcactatctttttctgtttactattttctatcaaaaacaaaattaatttaaacactatcaaatataattaaaattaaaataggatggatgcttagttcaagactgcgaatacgtatcttggttaatatggttggagaaagggtaggtatcaaagtcaaaggtagagaaaaaagaaaaattaataattgagagaagtgaaattatatttttgttaattttaatatttaaatatattgccccgctctcgttgctttgctgtctaaaacagttaacagctagccacttggcttccctactctctccttactccttcatattcttctcttcacgttttcattttctccaacttcttttatcctctctcaacattttttctcatctgcttcatttctttcttcctcagttctcttctgcttcatttctttcttggtcagttctcactttcacttcttttcttctcattttcttctctctaatcttgtttcttttctaagaaaacccaccttctcttcttgacgttgttagtttttgtctttttttttttcgctttttactgctttttttcattatcgatacatgtatatagatttttaggagcttgttctcttcgtttcttgctcttggagtgaaaaataaataaaataaaaataaacggaatgggaactttggaggttatttatttatttttttcctttgatgttgggtttaatttaattttctgggaaaatgttttgagatttccatgtgacgaagttttggagagtgaactttgttcattgcacactaaaattttcttttactctaatcagtttcttattgattgtttcgctgcttgtgttttgtctttattctcaatttgagctgaaaatgtcgttttgctcaataatcgatatgggtttggcttttaatgcgttttacttgatctgcacatgtcttcaaaataagttgtggctgtttccagctatttttgaccattttttgtctgttgtctgagccatagatgtttttttatgtttggttgtttcagttagtttttataggttggcttttgggttcttgctactactggaaggttttgccccttttgccagtacctttgtttttactttggtgtttttcaagtaaagtgtaacagaacttacatgcactaatctttctcttccttgatatcgtgaaccagcttttgatgttttcgctttttgtgtttcatcagataatttgttcttttagatccttttatctgtgaccctcgaagattaattctaagcagcatctttatgatcccataaatgctcgcgtgattctgagttaattgggaactgcttgttatgttatggttcagaaattatataccagccttcattgtattattcttcaactgaagagactaaatctttcgtatttggagcgacgaactgagaaaagatgtagttgttctttgtacatctaatctcattcagtagtttgattagtatgtttttagtttgtacccttttagattttgtttcaccatttgccttatcagagaaatattatgactaattgctattagctttagaatcattttgtaaaaaggaaaaagtggagagaatcatttttggaagattggtctttttttcccccataaagtaagcctctcaaagtgagaatttatctaaaatatattattctattaccttgagtttgaaaataagcagtaatgttgtaatgctttgattaactacagaaggttaaattccacttttcttctttgctttttctttttcaactgtcgaaactttcgtgccaactactttttgatctcgctagggtatccatcttgtatttccaagaatacctttgtgaaaaaagtcatgtcaattaaagttgaatagttatgagcaattttattaataattttttttggcattacgatgccatgttttctggtttgcatgaaataattttcatttttttccttgaagttcaagttggggtttctgaaacggataattctggaaaataatgaagatctagtgagaactaattcactagttatggatttatgacttttacctgtctttattgccgcagataagcatcttgattccccata

SEQ ID NO: 7734 - DNA, 893 bp, Cucumis sativus
  Intron number 4 from transcript Cucsa.086420.1 (locus Cucs a.086420) derived from phytozome v7.0 (chr-ID scaffold0087 0; pos 570147 to 571039 reverse strand)
gttggaatcccattcacttcttacataaagaggtatggttttacattaatttatcattttgtttagttaaattaacgagtttagtaacttctaaagttttaagggtatatcttggatatcttgatacacacttgattccactgttctttaatatcatgttaaaaacaaaagaaactttattaataaaaatatcattgactaaatttataacttaaacattttattttaatttaagttcacatccaattttattgtacaatcaacaaattagatcttttggtgattagggttgaagatcttgcattaaaaatatacacgacctcagaaaatttaaggaagcatttggagtaaggagtagagttgtgaaattgggagatcaatagcaataaaagttaattaaacataaaattgatgtctttttttatagtaaaatgaatctatttttggttttgggttttggaatatatgttatagatgtgtgatgtttgaggacacttcttaatctttttaaagtttacttgctcaaatgaaaaagaaaagatgagctcacaaattcttggaacaaatatcccaaaagtaaatgagatattctcctgcaaccaattaattttgaaatagaagttcgtgctcatctaatgtaatatcagaggctatgaaactacaacaaagatttcttagttaaaaaaagattaaaatccgatacaagatggtcaagagacatcacaatttttaaaagacacgagttacttctatcaatatggtttcaaaattgaattctatgtattctctgctacatgtgttgatataacattaaaatccactctaattcatcagcttaaaatgatttaggaactaaatatcagtatacaataacttttgcagtgggctaaatt

SEQ ID NO: 7735 - DNA, 2234 bp, Cucumis sativus
  Intron number 1 from transcript Cucsa.059850.1 (locus Cucs a.059850) derived from phytozome v7.0 (chr-ID scaffold0062 1; pos 436727 to 438960)
ttcttgaaggtcagtctcctagtctcaatctgatatttcctttgagtagaaaattttcgaccggattttctgcttttgggttttgatcttactggtttggctaatttttgggttcattccgtctgagattgtttcttttggccacgaattgactggactgtgctgatacaagtactgtcaagaaattagtgaaagttatgtgtattgtgaacggtttagctttgtttgcaaatgaaatcaagtaaagccttacatgtattgaaagtgctggcctccatttctggtgttttcttatgcaaattcgcgagaggaaagatgttgaatcctctgcgtagctgactatgccgtcttatgaaaaaaaagcaataatatgggtgacaacgactaaattacatgaggcttttcctggaatttttttttgaataaattcacttctaaacgaaaaggatctagaatgatggaaaattaactcagtgattccgttttagcagtcaatggataaacatgatatgctcaaaataaaactcctaaaccataccactacacgagaacccctgcaccatgtcaggaccatggtctctgcatgactgcatccattgctaaatttctatttcatattttcatttatactttttcactctgtcatcactcgtcactgatttccatgggacttttttattttgctgaatttgtggatcttacccctttttttccactacttttggaaatgcttagacatggagtacttttgtgatggatattaataatagtttctccacctgcttattgttttcatgttttggtttgttcatcataatttgattatttagctggatagttgtcacgaaaattgtttccttcttatgataactcccagtttcaatttctatgtttgctgtagctgttgtagcaatcaatgcctattgcgtgatactaatgtgcaattactgagtcatcctttagccgtgaaattcaaacccattttatgtttataggataagaattaagaatcaattgaacatagggaagcctgggcgtagctcagatggttaaggcatacgtcctcaaacaaaaggtaggttccaatccttcaatctcaagaagaattaatagagcatataatttatcgcctgatctcacaaacttttcaaaagaaaatataagttttattttgtcaatgaaactgtactggatatcattaccactaagaaaatgtagaatctagtgctgttttttttactacttagcccaaaagcttgagctgatgaataatagtaagtttgaatatatttctacttcaacactttcctccacttgtatcaagatttaggtaaggaatttatttttattgaattgatgaatatagaactcaagcctcattatatagagagcttaggaggtagtttacaattaactgcttttaactattttgtaacaaactaactaattcttatttagtcaataacttgtgagtttgaaaaaaaattcatgttaaataaccattagcttttgggtcgagtagttatttaactttgtattgcaacatgatgttctatgttctaactcctatagtgtcatttcctctccaaattaatattgagtttcacttgttgggtttttctacaaattttcatacccatgcccacgtgtgcaggagatcaatgttgaagtattgaagtaattaagtttactgcaacctatcaccttaagcttctaagttggttgttgatttaacatcttttatgagacaaattgatgagaaacaagcagcaaaacgtgatcgtgccttttctttttttgttaaatactaattttattgtgttgctttggcacactctacgaaaggtatcacttgcatttgagctgcactagtcctagtaggttaaatgaatattcatcttattctttatcacttgcatttgtgctgagtaaatattcgtagtttaaatgaaattattctcatctgcattgagctgcataaatcccagtagtttaaacgaatcttcatcttcatagaatcataccattgttgctgttttgcacttcgtttttctgttttgtttctgacctcatatttaccttaaatcaagatgaaaagtaaccattgggcaaaaccttttgctctttctcacaactctgatctgtcaaaaaatagtcatataagatatatataggtgtgacctattctctcattttcaggtgctgaagtagcagttctttgcattacaagatcg

SEQ ID NO: 7736 - DNA, 2587 bp, Cucumis sativus
  Intron number 2 from transcript Cucsa.244190.2 (locus Cucs a.244190) derived from phytozome v7.0 (chr-ID scaffold0213 5; pos 26706 to 29292)
ttgtgagaggaagtgtacaatcaagtgcggtccaggtatttcttttaaccatcatcttatttacattttgtttttcttctttttaatttaaataattatgtgatatgaaattagatacttagacctcttttctggcaatcctataatacattaatgccacctcccacttccattttcattcttttcttttcatccatttcatattctttcttatctaattatgatcattattattctcttaattctcaaataaataagcttatctttttctttttattttacaattttatctcatcatctttttaacaaatctcaccttatgatatttctattgttccgttttcataatgaaccatttcttttcttttcattcattaaccagttaattgtttttaaatttgatcttcataacctaaaatttatagaacccaaatcaataatagttgagcaaaggaaaagttttcacacacactcaaaaaaacaaccaaaattgttattacatataagagagataggtgtagtaaagaatataatataatgtttacctatatagggtacagtataagtgtacaatttacatgtagcttccaagacatcaaattttcctacaatataattaagttgtggtattaagtaacaattagtaacaatgcaggcatgtatcacaacaaatattaagaatatatatatcaaaggaaactctaaactaaaaaaagttaaacaactacaaatgaagattattccaaaggttatgatctttgttagaattagtccaaatctagtttggatctaagagttcacaaatgctagggacaacatgtaaacactcaaatttaattcaaaaagaatttagatcaacgttatattaccgtctaaatctcgaccaaaagaacatccaaggtgtttaaatccttttaatatgtgaaattttgttaggtaattgatgtaattttagaaattaatatgaaatttattcactaaaggagaaaaaagatcataataatctctcttgccacgtaattaattcaatcaaagatcacaactacaagcaataaaatgcaactctaaactacatatatataattgaagctaactacaaaatttaacaattacattactattcaatgaaagcaagaatccttcactttactaacattgatgagttgcttgaactttgtaatttctcatttgctcaattcgtaccaagttcgatcaaaatctaaagaaaggagataaacacttcagttcaacaaaagaatttaagaattaaagtatataaaaaaaaagcttttataacattcaaattcagattaagaataaaaaacctaaacatctcacgatggtttctcaaagcaaaaggccacaaaaaacctttacaatgattaagcccttcatcgttaagtccttttgctcaaaaaaccatatttgaatttaagctttttgtataaatttcaaatatgaacacgaaagcaagtagcatctgaggaaaaactataaacacacaaacctaaaatggaaataaacaaaattatcgtgaaaaaggaaattacaattagaataaatttgaaaatcaagtcatgaaagtgcacaaaagagaagaaataatgtacaaatgaaataggtaaaggaaaacaatggagggagtggcggtggtgggtgaagtagtgttgagagaggaagaggcggagcaacccaaggtgggaagggggctgtgcgagcaaacgcgttggcgttgtgaggaagatggagagtgaaaaattagagtttaaatagtaggaaggaaatgagatctgaaagttctatataaaataggaaaactctaaacaaaggcgttgggagtttctctacaaaaacattctttctcaatttactcccgacgtacaacgttccgggttatggctaacttccaatgcttgccatagcttgtaaggagatatcattttttctgacttattatctcttgatgattgtcttgtgtgtcgaaaaattaactttttcttgtagtgagaagagttaccgatgttgttgaacttagttatttatgtttttcgtaaccacattctagattttaaaattatatatattacttaaatttttttttctaaaccaagttaagttaagacccttttagattttacatgtttggtaggacacaccttttatcattatgattatgattattattaattattttgtttaacatgtgatagaaaaatttgggaaaatctgtctaaagcctttttagattgtatgtgtgttagatagatataggttatctagaaatatttttaaatttatttttttaaagaattaaaaagaaaaattggaagaaaacatgtgttttttttaatgattttaatgtgaaattacatagaataatcatatcatcaatcagtaagaggcgtaaatggggagaaacattctttttccccttagcctcctttagatagtatatattattgttatatatagttaaatctatcatatagtgtataaaatgtcacttttttttgtttttgtttgtaaaattctgcaacatattacacaatgtaattgcagataacaaagttgaggaaaatactgcacg

SEQ ID NO: 7737 - DNA, 4064 bp, Cucumis sativus
  Intron number 6 from transcript Cucsa.229230.1 (locus Cucs a.229230) derived from phytozome v7.0 (chr-ID scaffold0193 9; pos 21425 to 25488 reverse strand)
ggggaaggtaatattagcatctgttttgttttctctgttttaatgatttatatatatttaaataatccttttttatggatatttggttcgtttacacacacacacacgcacacacacatatgttgctgtgagcatcatgcacttctaaccatggtttttgtttcttaaattgaggagtaattttatcagtagctgctgtaaggtagatgtgccaaataccatatttagcatagggaagctgcatgtctgagtaaatatccatttgcctatggatttaataaaggtggaagttaaagtgtctggtcagtgtcacccagagaagttaattctttgttttgtcgaagaatttcagttcttttaatgttgcttaatactgattgttgagatttgaaagcgggagatggatcagttgagacaacccttatcctttctgcaaatgacttttgaacttggtttttcttttctgggtggcatgtgtgggagagagattagaagctactttaatgaagaaaattgaaagaatactccggtagattataggtcaaaggaacaagggaaccacaacaaagttgagacaaaaggctcctgtcatttagatcttaatccagaaagcatttataaaattcaaaaccaaaatcgtggatggaggggttgaaggtgagttattattcaatccggtgaaggcttatgccaaagtggaagctatcatacttggagataggtggaggttcttatgtctttagcaattggtatttgagttaggtttgattcaaaacaggaatgttaggctcccaacctaacaagaaaatactcaagaacacaaagaacaaacaagagcactacaagatagaattatatgaaaatatattgaaaatatgctataatataataagaacaattaacaaggtaatcactaacctttctagaggactaatctcatccaaatttcctcgcaagaaaatcccacaaaattcttcacccctctcctactatttatagcaaacgatgtttttaaatgcccaaggtgcactaaggtgcaacgaccctctagagcctaggtgcacaaaaggtgcggtttttttcttcaagcgattacatataaaaatatttcattaaaaagagaatgcatagttgaagcgaaaatatggaaaaaaaacttcaaacataaaatttattgcatttaggcttagtagacttgattcttctagtgaataattaaggaaaatccttaattattactatttctttaaaaaaaaaacgaaaatgccccaaagcgcatatctttgagccttggggcttcacaaaagttacacgcatgaggcgtgccttattttgtgagactcgcctaaaggtgaggcgctaaacctgcgcctttccacgcgaggtgctagacctgcgccttgagtctaggtgcacacttaagagggctttttaagacagcaaagaaaccgagcaaacctactatcaaattactaatatgccccttctataaccacataattttcctactatttctataactacgggtcttacaaggaatctcacactcattttcacaaggcattcttagagtccgcttgagatgatattatcacagaagactcggattggaagctagattcttatcactgaagactcggtttggaatatagattcttatgattgaaggaacgagtgggtgtttcaacggggctattcacgcgagaactcctaagtctctaaagagagacttctatgcttcatccatgattacactagaataccatcatggtcgtgtagttgcaatgaagcatccatttgaactttgggagaacatgtggaggcacaagtaagcatggcttgtgacaatgcagttcacagtgctgccgatgtctatctccagttaatcaaagaggatcttgacacacttagagaggatcttgacacgcttactcttccctggattaagatcaattgtgaaagacataggaaaagtcacaggagaaaaaaaggtaactccatggtttggttctcttacggcctccctattccttgagggccaaaggggttggatcatcacaaagatctcccttctgtctccttctgtagtctcatacctgcattggaagtaaagtaccctcctgatctgcaaaattgttttcctttcttctgaacacacctttgaatttggaaaatctcacacagttatcactcatcttctttatttttggaccttaattgtcttctcagacctcctcagcattctcggtaatttgttgtataacaaattttctcattatccgttaaagtgtggatggaaaatttatttttcttcttcaaaacactttaaaaaattggcgtacaaaatgtatccgtttctttggtcccaatcactacctttaaagttttaataaatatttatagcagagggttttaattatggttagaaagttaattacgaataagttagcatggttgatagtattttataaacgagaattgtcaaaaatgacaaaatggacaaactatttacactttatggcaaaatcaagtgcaatgagtttttgtcgtttagaggttttttccataaagtgtaaatagtttgtatttttttattattcttgaaaaaaccccttttataaaattgatatttaaagataataagtaagttttagttttctatatattttaacttggaatgactaaattctttattatgattattattattatttgaaacataaatatatcattaataaatgaaattaggggaacaccccaaacacctaaagacgataacaaaagagatggccatgtaactaaaaagataagctataagttttaaaagggtgctttattttacattgccctgagaaaaaacagtaaacagaacaaatccataaaatggttaaaagtggaaaaagagtcagaagaaaggtgccaattcctcttgccccattagatccaaaggaacgtgcataacaaaaccaaccaaatcatcttcttagtaccatcaaaggatcacccaccaataatgaagcaagaagatcgaagatagtattaggagaggacacagcagggaccaaccaaaagcttccaagatgagaattcataacattgatgcaaaagggcaatgaaattggttggttctatttaaaaaaagtgaaaaagaaaagagatggattggagactcaaaatgatgacaacacacgagacacaaggatggtgaaattgaaagatatctataaggcatttgacgccaaaggcgattggcagtatttgatggctcctgaactaagaaattcttttttaactataaaacaataaaaatgtcgtgagagatttccatgctgaatccaatcctaaaatccaatttgtgtaattacctacctagatttaaacaaattgtggaattggaccatttacaattctgtaaattacaaattgaaagttgtggaaatcgtcactgaactataaaggttggtaccccaaaattttcctaattttttgggttgccataattgtatattatttgccttcaaacttacgaaacttcatcccattttgttatggagatacaatgatggggtttgtagcatgttaaaaactttaggtgtaatttctcagattgaaagttcaatgtaatgattgtatcaacttttggtttagcagtggcttcttttgtgctaaaatatttaaggtcttttatgcagaactgttaatcatttaaactttagtagatgaagtttttaccttttttggcttttctctttgttaattctatataacacaagtgcaactttctcttgggttgtgaagtttttttcttttcttttgatttaacattcacttggttttatttgggcttgattggagacgtttcttagatggtctctctctgttttctcgatatgtatatacttctttcatggaatttcttttcctttttctctatgccattttattattttagtttttctccttgaaagcttggttattcatcaagtggcagtcctgaaaatttggagatcatacttataatttgctaatggtttctttaatcatctcttggtagattattcttg

SEQ ID NO: 7738 - DNA, 1338 bp, Cucumis sativus
  Intron number 1 from transcript Cucsa.299680.1 (locus Cucs a.299680) derived from phytozome v7.0 (chr-ID scaffold0292 0; pos 176940 to 178277)
atgataaatatacaaaggaaacaatgcaagttacatgattgccattttctgaccatagactacaatggtttggatattttccttgaggcagataatgtatgccctttccttttactttagtaattcccctgttgttggttacattttgttccagatcatactgaatatggcatgaaaacttgtaacgcttataccttatcaataaggcaattaatttttccttccatttcccttgtacaaacgtttgggctaatataaagtagttatcaatgatttgtattttgttttatgattccacgaaatataatcttctacttggcctatcttacttgcagactgttgcttttcagcggtgaagttcaagataattcaaatttgtagatttttctttgatcgttcttttagtattttaattctgaaactttaaattctgaacattactcctgtttcatatagaaactttcaaaatattggcttgttattcacattttgtcgttggtcgaggaactctttgataatcatcgccttgtgctcatggtctaccccactgttatatttacattggtaggtgtcattcactctaagatcggttcctggagtaataatgattagaaattaaatattctctctgaagatcaacaggaacttaaattttcaagcattacaagcccttatattatggtcacccctaggagatgtagaattagcagagttcataagtttctttgaatttaacatcttctaaagtgaaaatcccattacttatttcctctatgtctgtctgttctcatactgccttatgaattttatgtttattggactctccccatgggtattcttttttcatgtgttggcagttggaaacagtttaggtagcatggctgtgagaaatgttctttttcattttttagaagaaagaaacacaagtggatttacattaaaaaaatcgtccatatccagaagtgaaatcaccaaacgatccaaagtatcagatttaattggattcaacactggcttgtggatctatgatttccttgacggttcatcgtcactaccaattctttgtgattaaaatttctgtttcctataatttaagtgtccatgaacaaggagcttaatcacgaacatcttaaaagctaaatttctgttttccatgaactgatcttccttccaacatcttgtcctgcagtgttaacgtttaactactcatgcttaatgttctgtaatcatattcgttactgttgttacaaattggtactcattacttcttttagttagttcttttctctcctttcattttcagggggaacataacggacaactaaggtctgtgcactg

SEQ ID NO: 7739 - DNA, 1380 bp, Cucumis sativus
  Intron number 1 from transcript Cucsa.027750.2 (locus Cucs a.027750) derived from phytozome v7.0 (chr-ID scaffold0037 8; pos 597656 to 599035 reverse strand)
aatcagccatattgcttcaacgccttgctcaactggtcgtcaatattatgacccctattgttctgctgccatggcagatgagcatgacaatttaagaaatgggaagaccataaatcgcactacttctctcatgacttcatcatccagttattatggctattacaggtattccgaggcttagttatcaccttcgtcctactaaactatctccaaatgtcactgacttttgaaatgtcttaaattgctagtttagtcattgaattaaagatgtttattgatctgactaacacatatcttaacttttacttttgtgtctaatttgtcctcaacatattcaaaatatttaaaaattataataggggtgatgaaaccttaaaattttaactgtgtctagtaggtacctgaatcaagggcggttgagatacttttttaaattgagggatctattggacagaaaattgtaagtttaaatgcctaaggaatgatattttggtccttcagtttattttgattttacatagtttcaaagtactagaactaaaccgcataggttagagatgagctttgggtaagtgaatattagatgaacatatttcaacaaaactaatctaggtattctaaaccttacactaaaagattcttaaaatattcaggagtaaactagatattctaaacctttgatgcttcccaggtctggcccgtagggcaagcataggtcccccgggagcaaaggtttgacttcccattattaaaaaatgacaatctaattattcatgtttgaaatggaataaccttgaaagttcaggaaaaatgagaattaaactaatataaaatttactagaactactatccattatctgaagtttttgtattgagtagtaatttgacatgttatgtgagtaagaaatcatgtgctggaatttcttaaatttccttttcttcctattttgtaatgataactacttataggactttgtgcaaaagttcaagcccacacggcgaacgatgtgttgtagtaaaaagaatgaagggagtttttaagtgtggatataatattaaagtttctaatatccaatcacttaatctgtttgaatgagcgatgatttaagttctcgtcactttttagacctccctctttatttgtgctagagacgatgctattggatcccggttgttttaattcttttgaagctctacttgttcctctgtagttgcgttcttataagttataagcaatgtgctttagccgatgcatgcctgtaattatgaatagataccattatatggacttctctaccattttattcatctgatatttatattcaggtcattgttgattgttattaactgttgtaatttcctgtaggagtgatgatgaag

SEQ ID NO: 7740 - DNA, 1963 bp, Cucumis sativus
  Intron number 10 from transcript Cucsa.145090.1 (locus Cuc sa.145090) derived from phytozome v7.0 (chr-ID scaffold010 83; pos 93032 to 94994 reverse strand)
aaaattggacaaactggggttacttacatatccaggtataatgacaccgattgaaatattttttatcagcaagcttgcagctatagtcaaagagaaattacactgtttttcttttaatttttaatttaaacttgaccttaaattttaatatatatataatgtcaatgcaattaattctcttaaacttctctggtatcaacgatatgttgacagccggatactgacttaaaagaatcctagaaaagcacctgctaggagttgatatattatcccagctatactttctgaggcattatgaccttgtgggaaaatatttcttgattgtcatacattaattgaagtcgtgtttccttcacaataacctcccattagtttactcatagcatttaatgttggcttgtatcttacatttcttattcatagcatttattgttggtttagttgtagaatttttgaacttaaccttctcccttcaaggtgaaggtaacataatatccacagattattgaagttccaaatccttgtctatagcactaagactttatgctgctattttcgataatttcggttccaacgagcttaaaacaaaacagtgcatcttagatttgatggtgacattaatgtgacataattattgttaccagaatagttcgagataaaatcatggagacatttattgatttaaccagtttagtcgtggctcttactcgagtcgtgatgagattgttggtctctgccagttttactaataatgctccacaaagcaaaagtagtctgggaaaaaataacttgctggattgtcgttcaaacaaagagacaatctctcgagttgaaatacgctgtcaaggaaacatgaaacctgctaactaaccttcattttggtaggaataatactagagggatttaataagggtgtattagtaattagctaagtggtctgctagggaagtttggttacaaaaatataaagggtggggaagaataaaagggagcaatattttggtgagtgaattagggtttgagagtaacctcaggagattggaaggatccaagtactagggatgttcaaatgaaccaacaagccgaacgatctggactacccacctgggttagttttgttcttggatttggttggggtcttgggataaataaattaatttttgggttgacctaactccgaaatatttttatacgtgtaattgtcttttttctagtgtaattgtcttttttctaatatttttcttttagtattcttatgataaatgtttgtttaaagcttgtaatagatatcattaatatttggtatttaacatttgaattttacatgattttagttagttattagccatatgtgtcctggatatatttagatgtattaaataataattacccaacctgaattttaagggtttctttggatgcccaattcgagtctttcgggtagttaatgcgatttaggttggtcttaaaatcccttctaacccaatccaatctaacttaattacaccactaccaattaccttgaattactttgtttattttgtagttttgttaccaattatattttaatatattcgggctgtatcagatttttatctagaaatagaaaaaatgaaagcaaaagaagaaaagatttctaaaacagtgggaatttggtaaaatgctgccacacaagaagagaacttcttgactttactaattgccctatgtgtatgattccatctcatgtcatattgtcaatcacagaatggcatgtttgtgctattttctcttttctttactacaacttacaaggaaagaacaactttttttttagcaaagctattaaaagtggggatgaagctatagaaactaggaggagtcattttccaataaactttcgtgagttttatttatttaattatttatgtatactgtttcttgtgcagtggtgcgctgacacattctgtgaaagcacttgata

SEQ ID NO: 7741 - DNA, 666 bp, Cucumis sativus
  Intron number 3 from transcript Cucsa.305150.1 (locus Cucs a.305150) derived from phytozome v7.0 (chr-ID scaffold0296 2; pos 18283 to 18948)
tctttgggtaaaaaaaatctctctctctctctcatcttcaaaaatatatttctctatttattatcaaaataatcagcaagtttaactttggtattttttttaaaaaaaaattgttctggaaactgatttggttttttctattctcgaaaattaaccctattttctctggatttcatacaatatttgtatatacaatagtttatttcttagtcaacttctaaaaacgaatatttaaaggtgaaaatagtgtctacaaagttaaattttaaaaacaagagacgaaaaaagtaacatttgtttgttacaccgtcaaaaagtaagtgcaaaagaatattagacattcaaattcaattttaaatttaatatatgtttgaatttaaaatagataatccaagaagagaatgatttattctaacaaaaagttgaaatgaaaagatttattcgacggtttttgaagttaagaatcttgttagacacggttgaaagtttagacatgtgttatccaaatttcaaatttttgaaatcaaataaacacaaattcaaaaattaagagactagataggttagatttaacataacacaacaaatagaacattttagatttaagccttttaatgtgtcaatgatcttatatgatgtataataattttgttgtgaacagggaaa

SEQ ID NO: 7742 - DNA, 160 bp, Cucumis sativus
  Intron number 5 from transcript Cucsa.251420.1 (locus Cucs a.251420) derived from phytozome v7.0 (chr-ID scaffold0222 9; pos 504349 to 504508)
ttatcatatatgtgagttattctgaataatgaaaattttggtagttagttttgttttgttttggcttctattcatcatgatttcactgcttatatgggggattgaataaaatgtatgttgtgcaggttgaagcagaagtctccagattggaagagttaaa

SEQ ID NO: 7743 - DNA, 1476 bp, Cucumis sativus
  Intron number 1 from transcript Cucsa.250130.1 (locus Cucs a.250130) derived from phytozome v7.0 (chr-ID scaffold0221 9; pos 270350 to 271825)
tctggcttaatctctcctttccctttatctcgaaggtcctccattcctctcttcttgtttctttaatcaccatattctatacattctgtttgtttgattctgtttcccttggaaaatgctgagatatcccatgtccaattgactcatgggtcactcttggttttgtcaattcattctcgatgctacctctaagagaacggaaaccgattgtgaaatgggtgtgtctaatgtttgtagttgattgtgattttaaattattggattcttcttttgtcctaacacataattcattgctttcaattaatttattcctctaaaacactagggaagttttcaaaaagtactttttatttggctaaaactaaaagtagtttttactcctccaaaaagtcattctagtactctttcctaagatgccatactgatgtagactatagtaataattttgttgacaacatccatttttttaaatctttgctaagagtagggacgatcatattgtgacgctatctattaaaaatattttgtttttgaaaattttgcttatagatattcatttcacattctaaatttctttgtttgttatctacatttgtgttcaaaatctaaagccaaaatttaaaaattacaaaaattagggtgttgggtaagcatcttgttttttggtttttaaaaattaagcatatttcttattcgtttttttacgatgatttgcatttttcttaaacgttgaacttttaaccaaaattaaaaaacaagcttttaaaagatactttttttttagtttccaattttttttctgaaaaaaaaatattttttaagtatacaacttggtgtgggagaattgaatccgaaatctcttgttctcgagaatgtacaaatgaaaattaaactaagtttctgttgatagttttcaaattttggattggttttttgaaaaattggtaaaaagtaggtagaaaatttgaaggtaaaagtagtgtctattaacttaattttcaaaaacaaaaacaaaaagttaaaatggttatcaaaaggagcctaaagattttactttttaagaaatcattcttctttttagaatttttctaagaactcaactcttatagttagaaacaatgggcttaataattttcaaaaaccaaaaacctaaaacgaaatagttaaccagagggattgtttttcttttctttttctttttcttttaatatatgtcttacattgttcactttctgctaatattctaaaaaaaaccaagtttagttttgaagactagttttcataaacttgttttgattttagatctttgattaaaatttaaatgttttcgttgataaaaagtgaaaactacgaaaagaaaaatggggagaaaacaagcttgaatctaagaaacaagcaaaatggttaccatacacacctaaaataaaataatgtaattaaatcgttcctttatttttgtccacagggaaaatcgtg

SEQ ID NO: 7744 - DNA, 1333 bp, Cucumis sativus
  Intron number 11 from transcript Cucsa.205570.1 (locus Cuc sa.205570) derived from phytozome v7.0 (chr-ID scaffold014 16; pos 626564 to 627896)
ccacgctcacgatcaaagtcatcatctctctcagggtatgtactctcatttgttaactataataatttattcttgtgatctttaagcttatttttattgttatttttaattaaatctaactgcagtcattgtttattatatttatatttatatatttgagtttgttgtcactcaagcagggtctgtttgttgcacccgtctttcattgggcagaatgttagactgtgtgaaataaacaacattaaagtactgaaagtgaactaattcttttgtattgctcaagcacgggtcagcaagggtttaaaatttagcaatggatttgatattacctttctggatgctatgtttttgcatgcggtgttgtggcttgtacaattctcttgaatgtgaaacccacttttttcttccaaagtattggatgcattcttggaatggtggagatgaatactggacaaacttcaaattagtctgggcaatgtatgggaccctctaatggaatgttgggtaaactttatcctatttgactcaagttattactattttacatctgattctattctctttttaataaatcttcgccctggccttcccctttatcaattgtgaatattttttttcaacagttgggatggctaagaaatgaatcgatttctttcattcattgtcctttttgtgtgtgaaagttacttgtttgttttttagatatggaaatatgcggcattctggggattggatattaggatcttgatgggatatgattcaattgccttcaatgcttttggttgagaaggtatgctgttttttagatgggcagctttcaaaaccttctggtacctatgttctaatgcttttagcaatgcaatgtccatgggtgctagattgggatcaaaggagatcatggattgcaattatagagctggatatcttgaactaagtgctatttggacttggaagtcatcatcactttcatttacattttctgctgcaagatttgccaagctataggatgcactatctggattcattgtggactttttgaggcacagtagggaagaatgctcctctccagtccactggtgtctataatatatagtttcctggagatttaagttttctaattttaggtcttcactttggtgtcttttacgttttgtattggcatatgttcttcatagttgaactactaaaaatattattttcccttttctacttatacgttgtggatgaggcgtcaggcttttggatcaaaattggtaaaagaggtgaattttaaatttgagttgtttctggaccttttgcagatcgcgatcaagatccaggtctccggtgccca

SEQ ID NO: 7745 - DNA, 2662 bp, Cucumis sativus
  Intron number 15 from transcript Cucsa.165870.1 (locus Cuc sa.165870) derived from phytozome v7.0 (chr-ID scaffold011 53; pos 1172110 to 1174771)
cttcaggttatcttttgttaatcggtttattttatgcaatctttctaatttctcttttagagggaaaaaaaaggaaaagacagtccttttgagtatcaggcagatcgtccctatccaatgtgtatttttgtaatagaagattctgtccttgtggtgtgcgtgtgtgtgtgtttttggataagaaacattacattgatgaatgaaataatccaaaaaaaatctagaggaataaccatgagatagatacaaaggagcccaaaaataaaagaagacaactcaggagattacaaatggagaaccaaaaaagtagatatcttttccttgcaatatcaccttcaacttttttattatctctagaatattcataaaattgaatctcttttaattattttttttgggtatgcttttagatacttgggtgtgtctgagcaaactcacatcactttgtccttagcagtgtttttaaaaatccctcttaggtgtcctagacgcagccctggttttgctcctcgccttgttaaagctaggctcacaaaataagatgtacattttgtgaagacccaaggtacaaagccttgtgcctttaggattttccattatttttaaaaaatagtaataattagtagggttcttttttattaactaaaacaatcaaatttacaaagcctaaaagcaaaatttctggtgtttaggggtcatttttttcctttcatattccacttcaactatggtttctcttcttaatgtagtacttttatatatagtgcgcctcacataaaagctcactttttttttgagccttgcgcttaagccccgtaagagtgttgcgctttattgcgccttggcttgagctttaaaaaacactggctgttagaaatctcataagatttagtatccttgttcattatttatttttaaatgagaaacattcagtcggaatttcattgatagtatgaaattacaaaagggcaagaatgttgtgtgggagtacttaattctattccattgtgatatgagtgatgtaaggttgtaatcacaaaataaggggtgaatttaccaccatgttagatatgtttacagttggtgatcaaagaagtgagtgaaataaccatcatgagttgcctagtggtaaaaagaagacaaactcattaaataactaagaggtaaggtcatgagtacggtggccacctactaggaattaatttcttacgagttttcttgacaccgaaatattgtaaggtcagatggattgttttaaaagaaaaaaaatggagtgaaatctgtctgtcttcaaaagtgtgatagataaggaaagctgtaacgatgaaggtccatacattctctgatgtcatttgatcaccctggtggcttaaatggaccatctccataaattctgccctatccttggagatatcttgaattatcatgccctctccctacccaaaagtaccttcactaggggactttacttttgctcccattcttaaaccactttcaaagcttcacatataacattgtttcttgaaagagttgaggattctcattcagaatttacaagcaaatggaaaagggaggagcagctatccccctttcttgcactattgcagagaggattatatgaaggttcattctgtggattccatcaattgtattggcaagaaatgcagtaggtcaattggtcatttggttgtcgattggtcagtaggtcaattgtgagaacaattgaggcgcatgtaagttcacctagatactcatgaaaacacattgttgtttattgatttgaaggctttagagaatactagagaagtgtatattaaggggaaaaatgaagatattttcatgcatgtttgaattccagttcatagagatgtttccaatgatatgaaaactcccaagattctttcttccaagtcagccaatggatgacccttgacaggttaattcatagcacattagccgtgtctttaagccaccatccagataaagtttcctttctgctttccagccttccacatgtttacaagaacttctgtcagtacctgagactcagaggcaacagatccaagattatagcccatgggaaattccaggtaagtctgggacagctcctgcaacacaatctaatgggatggcacatggatgacttcctcatcttggatgttgatgaaaatgaggatagttttagttctaagacctaaatgaagttcaaaagttgtggaaatttctattttaaaaaagttcgaaaatttttaaccacttgcaagggatattttcctcgcaagaaaaagaaagtagaatgaacaatcacggaaggatttaattccatttagaagccatgaagtatgaactataggtttgattattgtttggttataaccaattgcttatatgacatacaagccttgacaaattaagggcataagcctccttttcatcgatcaatgaaatgtttcttgttaaaaagaaaaaagaaaaaagaagcattcatcctgaggttatagtattaccaatgtcatctttttattatacttagataatgtctactacgaatagtatttgtttaaaatttaaaaatgtaggtcgccaactctgggtatgagtaattgtattaattgctggtgctgatcttatgctacaacaactttatttgtgcaggaaaagt

SEQ ID NO: 7746 - DNA, 4098 bp, Cucumis sativus
  Intron number 5 from transcript Cucsa.289140.1 (locus Cucs a.289140) derived from phytozome v7.0 (chr-ID scaffold0269 8; pos 620550 to 624647)
cattaaatagcgaggtgagctaaaaatttatcataatacatttctcatctctggtatgattttcacttctttcaatcatctgtttcaaatgatatggtttcatttattataaatctcgatcttccactctatacctaccaatcagaccgaatgttgttgcttctgtgcctcatctggtttagttttaataggacggtgtattaagtcattttctttcatggagaatgaaaatccttttcgttcattaagttagggtattaagtccttttattgtaaacattaagacagggtatatagtccttttattttaaacattaagacacatatcaagtgcataagtttaagttataaaatatttctatcttttcaaatgaaattaatgtttgatgtgaaattttcatggcttattagatatatatattcttctgtaaacaaacttgtgaccaactataaaaagcacaagcacgtgtcacattcacatgttttttttatcatttattactgcattcaaatcaaatatgaagctttgttgaattcaatatacttaccagtctaattttactactattgttttattttgataatctaaattatcgatagcatgaagaagattttctttaaaacgattcctattaatgaagcgtgttccccttcccagtatgtgcagccgatttgggtgtgctttctggtgtcctttggggtttctttggctcgtagcaaagattgttagatgatgattaaggaggttgtgttgttccctccctttccatgggtagagttctttggcaggcttgtttcttcatggtgttatgggttatttggctttagaaaaacattagaccttctagagaggctgtgaggacttggaaaagtaaatggggataacattagatacaacacatctttataggcgtttgcttcaaaatccttttgtcattattagttaggtgttttcttttggattggagcccccttattagatcaatgctctttttgtggattttcttttcgttgttcttgtaattataggatctagtttgtatagctagagcccattcttttagttgggcctcctttatgggcttgctttttcgtatgcctttgtattttttcaatcttaataaaaattttgttataaaaaaatgcattttgtcatcttttatcatctttccatgttgctgattttatgttactttttggggagcttgtaccttttttcgtttggtttccattgcctgtccagtagggaaatgatgaaggtcatgaccctcctttctttatttggagatgttaagtttaggcaaaggagaagggatatccatttttggagtcttaacctttctgatgggatctcttgcaaatctttctttcattacttgttggattcttccttttatagagttgggtttttcagttctttggaaggtgaagtcctgaagaaggtatagttttttaggtgtttgatattcaagtagggtttcatttcatagagctcttagtgatatgatcatcgatcaaggagttactcctccatttcttgtttgagggagggtttttttattgaggaggaggagggggttaagacagaaccttttattgtttggtcccttgtcagttttaatgtttttctctgggcgttgatgacaggtacttttttaaaattatttgttaggtcggagacccctctctagggtgctcccttttgtggggtttcttagcaaaaaaatattttttgtatccttgtattctttcattttttcttgatgaaagttcgttttttacagacgaacacacatttgattggtgtaaaagatgttaatgattggtgtaagggattttaactcacatcggcattaggccaagtgaccttttttctcattttcctttcttatggtggtgggtattcttcttactagtgaaaggtttatttaaatgtcttttcatgcgaggagacttgttgtccttctgacatacagacactatcttcttaagtcttttgagggaggattattacatccgttctttagtagggaagaccgttgcatgatgttggaacataaaagatctattcaagcaatattttacacgtctgagttcgtcattagtcgtagagtcaactgagagtaagtgtgactgcagtactgaaaatgtggatggacttatttggtgtggggtgtgataccgttctcttgttaatgactcagttagatcttcctttgggtcataaaatcctagactagttgttttagactattgcagaatggtacaaaaccagcttccttcttgaaagagggtcttttttgggtcaaatgagccaggttttctaattcaatctacccttggtaaactgctttatttataacacttattcagtctattgaggtttgtctctcaatttttctatatattaatgatagtgagactcatatccttttcaaaagaaaaatataacaattattccgtccttgaggttttgtttggtaagcatctaggtgtacgagttttcaaacttagcattttaacttctaaggtatgaagatatggtttatttgatcattttcattagtttttttttttcggtagcattacatatttttaattaatttttaaactaaaatattgtttcctttttttcttttctctctctattcatctccctctatccccttttctttcttattctcccactgttggttcccttctttctcctaaaagaggaagaagtgtggcgacacagtgtagggaggaagggaaagaggaagatggaagaggagaaagaagagagagaaaagaaaaaagagaaaaaatagttgttttcaagcactagtctcttttcatttcattaataagaaatgttgtttttgctttttttcaaaacaagaaagaaactaagtaagagaaagccaaacacacacacacacacacacacacacataaaggacatgactaatatatttacaataatataactgtaataatatgaaatagcttacgaccccaccaaatcttctacactagactttccttcctctgttttctctcttccatattactttacacgaggtttcacaaacctccaaattggatccaaaggctccacctcagcccatgttggctctgatacttgagcttatctcttcatcccatccaccattcactctcaccagagcttaatctgcttttgcctcatccacctttgatgaagaactcactggccagccatccaatactgtaaaccttagtgaagaaccttttgttgtccaccaagccttgggcattctctcgtctctcctaattgatcatcacccttctttgattgctaccctaccatttactcaccttcaccccctggttccatatttccttatcagttgttgattaccacctgatcagtttcattccatgtgcatataagattattgcttgagtcctatctagttggctgaaacttgtgctactttctataattgcaaaaatccaacttgcttttgttgctaatataaattctggatgcctccttgtggaaaatgagagtgaggggtggttctcatattagatcttgaagaggctttaagtgcagttcttaaagctaaaggctttagtactacttgatggaaatggattcgggagtgcatctatagtgctaattattctatcattagtcatggtacctaaaggcaaaaccattccatcttgtggaatttgtcatgttgaccctctctccttttgtcttcattttgctttcttcttactttagtctcctcttggttcatactgctcggttgggtagttttgcaactcatctggttggtgtctcaacttttatctgaaccacttactacttggtctataacctatatctgttttagtttggtatttcttaaccattacaattctgttaggttttttattctttgcaatgcaatcgtctaagcttattttttccaacttctaaggtagttttaatcagggaaactataaccatttgggttataacagattttacattctcactttctttgactactataatgggccattatgtcacatttctttctgtatattttttaaactttgtccattgcaatacagttcttc

SEQ ID NO: 7747 - DNA, 592 bp, Cucumis sativus
  Intron number 2 from transcript Cucsa.236920.1 (locus Cucs a.236920) derived from phytozome v7.0 (chr-ID scaffold0202 3; pos 28693 to 29284)
tcttaggtatatatgtttccttaccttccattcttggtagtttttttctttctacaataccttgaagtgctgactttttggtcattaggtggtacatttcggtcgaactatgctgatcttcttttttttaacaaatcactacaagggaaagaagagatttcaataggcacatttgtaacaactcaactagactgatattcacattacttctttcttttttgtcatttaataatatagttagctaggtttttacataatttgttgatgtggacatgtgaggttgtgagtttggttttggacttgcaaatatgtcaaaaagctaagctctttcaataagaagaatattgatggccaaaaggacaagactgtttctgaaattaaaggtttttttggcaactgtatgtggggtgggggaatgaaattatatacgagtttttcactgaataaatccatatatatagatgaaagaatattttaaaataagataattgaaaagacgtcctcaaaaaaaaatctgaaaagagacattaaatgaaatattctatacactattgcagctcaactactggggtttaggacatttattccacca

SEQ ID NO: 7748 - DNA, 4169 bp, Cucumis sativus
  Intron number 2 from transcript Cucsa.002900.4 (locus Cucs a.002900) derived from phytozome v7.0 (chr-ID scaffold0003 4; pos 74823 to 78991 reverse strand)
catctgacccgcaaaattcaaaaccagtaaggactaatctttgtttctgggacatatgatttttcaactcatcatataaacattatactggttttgtaaatttccggttatgggtatgattctgtatatatttattatggtgagggatgaaaatgtttgaaaaaatcattttaagtcgtttaatacttgaagaaagcaatattaacggattaggtccttctccattgggaagtttacttctcctgttcagttgttttagtttcaatgaacttttatggcagggatttcaacctagtcatgtagatgacgttatcagaaaattgggaccaactcttccaaaggtctattaacattctcttagttctctttgcatcccattttttttcttgtatcagcagtagatagtgcttggtcagttgtaatttatttattggtaattaatgttgtgattggaccaccagttgaagatgtacaccgttgacctttatgtgaatatgttgtgcttgtaaccacatataatttggaatagtattttacatttgttttcatgaaaatgcatgtaatatattacccaaaagtgaaggctttaaagttttgatttcttaatatgaatgagtattccacaattaaacttttgagtaattttggaactttttagctgatctgaaatccaaattcctaataagttcacactttacggccgcacacaacaacatagacctcttaatttgcttaatgtttcctctgattaatctgctcttttggtactttttttccttctctaaagttaattccttggtttgttgacttttccttttccattttccctttaaggcttttaaatctttcaaagattatgaaacttatagaattggaagttcagggaaggtatttgattgcattagattttcctttaagtccagggagttagaacatgattcaaatggctatgcttcacattagtggccatttcatacggaatgtttctacttctctaccattatcgtaccttaaattctttgcttgtgttattgaaccaacagaagaatccctgattcctcttatctgtagtgtgctttctccaatcacttgtggggtatttgttgtccattgctggctcattgtataccattttttctctctctagacacttctctcgtttaaatggccattggccagtgaccttaaggttgaaaaggaaatgggaaccttgatatggtcctgtcttaatctgttcttaaaaaactttgggaagagttgaatagaagtctctttttgggacaaagtagaatatggaaaaggttttagagccatattgtttttcaatctctctttcttctcttactaaaggtggcgcctcctgagatgaaagggacttactggaagtactaaattgggtgtatcctccttgcagaggagaagaacggtgtggcccctctcaaatttcactgttgaagttaaaccactctttgcacataaatagtcactaatatagtaaagagcagcccttggcactttggaaaactaggagacaagaaagtaaagatcttatggttcacctgcccggaggaaatgaatattattggaggctttcagaaaaaatcttaaagtgtggttcttaaaccgaactgcatttgtagggatgcagaggagatttaagggcatgggtgttgctctgttccttgtttggtataaagtgatggatctacagtgtttctgaattttcttgggttttgatgtaaccgagggaaatactatccagttacatttctgccaggaactcttagaagagcttaccattttggtaaaggttgcaaaactacatgagtgaaagggagtggaatgaaagcttttgataagataatagaatgctagtttattgatggaaatgagatcctcaatacacaattccaatccaaattttgtagagaattggaaaacaatcgaatcccaatcctaattaatcaaagaaactacctaattctaattagcaaagaaaaataatcctgacgcaattcaatcataaatactaatctcaatcctaatcaattaaggatttgaccatatgaccccctaatgtactctagtcctactacatcaatacattctgtggggaataacatggcttattggtggggttgagaactttaatctgtttgactactagtttgaataggcaaggacttcattaattcttataatttggatcctagcatcttagtattagagcattgattttggccataagtcttgatgttgaaggtgtaacagttgctactggaaataaaacaggaatttgtgcaaagatggactcaggaatttggaattcttaggatttaaagaagattgttaaaaaaaaaagaaagaaagaaaaaggagaagataagccgtagagtccttttgaaaaaataaacaaccacacaagagtgatgaaagagatgaaagaacagaatctacgggaggaataatcgagtttggttgtgacaaaaaaagaataacccagtttggaaaattataggttgaaccagattagatctacttgttgtcaacgcacccagaagatatcggggaatttcaaacaaagttggctgactagatggtggcaagcaaaccataaaacactagcctaagcaaatagactaatcatgagtcaaacaggtgttggcaatctttttttttttgcaaaggtattgttataaatgctggggtgaggatttgaacacgggacctcttgtccacaggaacatacaggtgtcagttgagctaagctcatgttggcgtgttggcaatcttttggaggctttggttcaaaagatacacgagcttttcacaatcaaaagttcagtagggacgttttttggggaattggttgctttatttgcttctacttggtctactcctaaaatcccacttggcaaaattgatatgagagtttcctatcaaaaagatgtcttttaggaaattgattgtattaaatatggcaatgtcacctagaagtcaaataaagttcctcgatgtcaaaccaagtgtcaatctagtgtcctacaaagaaaccttagaagaagcggtgtactaccaattatgagaataatttcaaagtgaactctccctcaaaatgagaggaggattttgtttgcagaggaatgaagtacaagttgttaacaaacttacataacaactatcacctaattcaactaactctttggttagcattttacaaaaaaaggccgttttggcacttgcatcgggaagaatattgaaaacagaagagtttgatctgttttttttaatacagttattgcagggttgggggattgaacctccaatgtctagaaataaaaattatgtcaataatcgtctagctaaacccactttgagaatttaatttatagtcctattttcaacaaagttggattgggggatttaacgctcttctaggacttttcggactgggaagtaagtatgtcaatatgaattccccaacttcttcacattaactcttgacaaggtagccttcattgctatcttatggaatgttgaatctagaacttggtagtccctgtttgagaacttttaaagaagatgaaattgatgaatggacttgcctcactactttggtatcttaatattcaaagaaagacccacatatcacctgaaaacataatgagtacttatatatgattggttgggtagatagtagtgttcattttttagatatttttccctaactgattaactgatgctagttttatgcaagccaacaatgtactctttatatcattcacctatgaaataacaaataatagcatcaggttcgggtttcagtggtcacatttaattatttctctttcttaattttttaatggagttggagttgtcctctacttcagtgtgtgtattgttcatgcctacatgcatacatccacttaaatatttgaccatgctaccaatcctctggttggttttattatttcttaataattatctcagtcgtaaaacattaataatatattgacattttgatgtatgtgatcttatattctcttatgtaattgatgtttaagataaattattatgataaaggtttgccattttggcattcaaaaatagtcttaggaagatgatttgagttgcctatgttctgtattgtcaggacgtatttcagaaat

SEQ ID NO: 7749 - DNA, 5590 bp, Cucumis sativus
  Intron number 5 from transcript Cucsa.067560.2 (locus Cucs a.067560) derived from phytozome v7.0 (chr-ID scaffold0069 9; pos 50640 to 56229)
ctgaccttctagctcgaggctttgatcagcagcaggtacgaatattatttccccatcatctcttttgtctgttgatagtatatcttgcgacctcttcatggatgcctaatatatgtttcttttttaggtcaatctagttatcaattacgatcttcctcttaaatatgaaccttctccacaagcgacaaaatatagatcttcctcgttatctgagcctaactatgaggtgtaccttcatagaattggtcgggcaggtcgttttgggcgcaagggtaagtttctgtgtctattatacttgggtacatgtttttctagattattgtaatcttcctgccctaaccttggatatgccttcatgtcttgattattgaagctaagcaactttattggggttagattcaactcttaaaatagctatttaatattgcatcatccttacgaatctatttctttgtttaaataagtgaaaggagtttatgaaaagatacttcttgaatcgaattactcaattcaaaggagccagcttttatactggaccttgaaccaaatgaatgcaaccatgagccacctataggttaaaagaattatcacatggtagttactaaaacttaaatgtcagcctactacaacataactgaacaacaaagaattaaagtaataataagtctcgaacagtccctaacaagaaactatgtaaattcccccaccaagcaaataaaactcctcctcgagttagtcagagagctgaaaagaatctggagccaagtattctgaaacattaaaaacaggactaatcctcaaatcttctggaatatcaattttgtggcgttgtttccatatatcttcaaaatgtgaaaaggtcccaacttcttatgctttgttttctgtaagtactcactggaaattgagattttgttaagtgaatcatggcaagatcatcctcttggaactctttggtgctcaaccttctgtttatgggtagtagtcatcttggaaatttgagtagccacattttatgtaattcaactctccttttcgccacaatacctgcttcttggctaaaatcaatagaggaatgaatattagtcaagtcaatttaatgtagacaatttcaaatagtgacatccctattgtcctattcttcatatgatccctattgtcctattcttcatatgattgtaggcaattttgcttgaggggagagatcccattgttttggtcgatcattgctcaagcatcgaattagattaccaagaactcgattaattacctccctttggccattagtttgaggatggctggttgtgcataattttaacttgcatggaacttcttccacaatgccttccaaaaatagctaagaaatttaatatccctgcctgagacaatggattttgctatgctgtgtaatcaaactattgaaagaagaaaagagaagaaacaaactattttacgtggaaaccctagaacagggaggaaaaccacgatgctattttcttattatttttctatatctcataatgatatagggaacatttatttataggttgtagaacctaaaataaaaataataaaagataattaggacactataaaatcttaacaaactctcgggctttcaacatacaacaagcttgctaattctaacacccccctcaagtcaggtcgtaaatgtcataaaaacctttgtcttagaagcctttttgtgagaatattagcaatttgttggcttgatggtatgtaaggaatgttgatgctactattgtccaatttctctttggtaaagtgtctgtcaatctctacatgtttagttttgtcatgttgggcctggttattagcaatgttgatagccgccttattatcacaaaaaagtttcataggcacctcatagttttggtaaagatcagataacaccttttgaagccaaatttcctcacaaattcccaaactcatggctctgtattcagcttcagcactactccttgcaacaaccccttttcttgcattcatgaacctctttccgtaaagtatataggcgagagacattttgaagtttggaatacagtttctaggctgtgtcctaaatatccttcgtagttgcagcgtagagtaaaggtttgccaatctatggctccatgctattgattaatgtgggtttaagaagagaattcttcccctttcagtaccgttcctaagggttcccaggtggaggactaggtatttcccttatcaagaaactgaatttatgccacccttcaagaactattttcactgactgggaccatgagaaataattattgttcaatttttccctgaaaaatgtcatgtagactgtgccactgtattagtcacgtaaggagaggatagagaggggaacgagactatcggattttcaaaatacataggtcgcctaggagtattggatgttgcccctaaggtcgcctcaagtgccacaatctgctatctaagcttctctagttgctggtgagctatatttgaagaagaagagattggcacgttagggttggaatgtgtcgaagactctccaacttcaaatgttgagtagatttggggatacccaaccccgggatgatagctagggtttggaacaaaatcaatggatggcaaggcatacaacttggtcggcagaagcggcggtggcttgacgaaggtaaatggcagaacatgaagcggtgcgtgggtggcattaatggttgcggatgaaggcaagggtggcagggatgagttggtcggctctttctgaacgagatgggtaggttcagaggtctttggcggtaaggcgtggatcacgtatggtggagaaaatgctgggttcaggattgtcggtgctgtctgaagtcctcgaaaccattcatccatggcagcaccaatacgagcattgacagtggtggcaacgacagtgctaatggcggctgtttcctctggttggtttccagcaaatgtttgaccttctagggtttcttcgacaccttgctttgataccatattgaaagaaaagagaagaaacaaactattttatgcagaaaccctaaaacagagacaaaaaccatgatgctattttcttattatttttctatatcacataatgatatagggaacatttatttataggttgtagaacccaaaataataaaaaaaaaaatagttagggcactctaaagtcttaacaaactcttgggctttcaacataaaacaagcctgctaattctaacacaaacaatttccttaaaagatagattagcattagccatataagttgcatcggatgttttcttgcaaggttaaaaaatgagacatgttgctgaacctatcaaccactacaataatcagctgagaaccccattagacataggataaaatgcatcgataagtcttcccaagtactcttgagaataggtaatgggcaatagagccacgcgttgtgtttctgcccttttgatgtttggcaagcaaagcatattctaacatagttagagacggcttttctcaattgaggctaaaagtatctatcactcataatttggaatgtgttattgacttaagccgcctccagggaattctttgatcaatgaatctcaaagaaatttatgtggaatacacaattgattgttcttaaaaaggtaaccattgactatatggaattcaccacaattgacacgaatattacaattatgccaatgggtaccaaaatcaacatcgtttggatataaagatgtgagatggttgtgcgtgaatcaaacctttggataaatgatgaccaacgagcatgcatttggttgatagactttagtgtctttagacatcacgttgtcctagtcttccttgtctctctccacattaatggtcattggaacctctttcacatcattaatactttctttgaaagtgtccactaagaaccctttatctatcacagtttatttaatgcgaagtatatttaaagaattcgacaaatttacccagaagtgagtacgcactgggtaaagatggtggaataaaacccaaagaggagtgagtttgagataccattggggattcaaaatgtgacttcgctctgacatcttccttataataaacagcagctgtgaaggatctccaacaatttctgttcagaccagcagggctatgattgtttcttcttccacctgtagaaggccatactgctatctccacgtatcatctatcttggatcgaaatttggccagacaaataagtccttactccattttgttcttaatagagaagaaaatgtaagattgatcctgcagaagttcatacaatctttcttcaacccattgcatagtttctggactaacggtagttttctagtattttttcaaatcttccacagaaaaaccaaacactttccaaatgcgaaaaaaaatagttactaatattgcagcttttgatttccatgataacaaaagtggggtttaaatgtctaattgagggaaaaggaagtatggtgataatgtgcaaggaataaccagaaaaattggagcagcccaccagcgttactgctggggaggatagaggaaataggagaggggatagaaggcagcatacgtactggcattactttctctgtatctgtcactgtaggctcttaagaccattgtagagggttgagtattaaagaagtatgttactgaaaggctcttaagaccattggttgatcactagaaggatcgttcgcttgaatttgtttagtgaactcgatgttatttgtttgacaaggggcagatttgttatctaaaaaatttgggcatattgatcttcattttatattctcgttgatgttcttgatcttcgcattgcttacttcttaaaaatttctgtcccaaaagatcaccctcatccgaagaagatttagaatcttgatcttgatcgtgctctaaggcgctatacatctagcttcttggttactcagttgtggttgtgtcattgttcccatcaggaaatgcacattttgtccctaagtgtcaaaatatcatccattgaattcttgactaccagcaagcacagtcattgattataccggaggattaagttgggctttcatatccctaactctattggtagttgcgacgtcctttccagtcatgagctccgcagaatcttggagctatctgataccagcttgatgatgtaaacaacttgagggagagagattattcataagtacctcttaaattgaaaggtgccagcttttatgagaaaattactactaccttgattatttgacacatcattaaatatttaatgtgtagacctacaattcttaataccttcttaggtggcaagaaataaatagaggtaaaaaaaaatttcctcacactggaccttcaaccaaattaggacaactaaaacataacaacaaacaatattatgcaagtctcaaacaagaaactacaaggttgctctttttttattgatttgcaaactcttctgtagtttgaatttgcttagaaagatccttaattgaacttttcttttgatattttgttaactgaaaactcacgactgttgtgttattctacaggagctgtgtttaacttgctgtgtggcg

SEQ ID NO: 7750 - DNA, 2009 bp, Cucumis sativus
  Intron number 1 from transcript Cucsa.213650.1 (locus Cucs a.213650) derived from phytozome v7.0 (chr-ID scaffold0154 3; pos 1502791 to 1504799 reverse strand)
atcgtgctgcagtcattgctattcaggtacttaaccacaaattcttaaagtaggtaataattaattggtatcaaatttgcatctacatgtagatgttttcaatggatgaatcaatatctcttttatataagcatcaaaatatcacgaatctaaaacatacgtatgtgtacttatttgaaaataataaattacttattttatttactaatttaatttttttataagtttttcaaaaatgtttgtaaaaatttatgtatgcttggaaaaaaaatggatgagaataacaaaaactatatttgtacttaatttatgaaattaagtataaaatttttgaagaaaattattgcgaatgaaaaagctgccgacttatctacgaatataaaagaaatatcaaattctattaaacatatgtttggtaaatattttgattgattttttttcttgtatttgaaaacaatttagggtgtcgaaaaaaattaagcaattataattatgtttaattattgtaattcataaaatagaataaattattatattagcatcattagtaataaaaatgaatacaaatgtcaattatagatggcttagtttagaaatatttataaaaaatgtttgaattaaataataagaagaaagaaggaaaaataaataaaatgaaaaagataagaagtaagagagagagaaatcatcctatttggaaggttatgaaaaatctgcatggaaagagaatatgaaatgcctttggaataagatgctatcattcccaagattgaaaacttacaccaaatatggtgaaaagatgttatgcctcattcccacaaaataatataaaacttgtccatctctatagttttttttaagtaaatcattaaaattcttttatgtaatatttactattgttaacattatagttcaaaccagactaaaattataatctacacctaggttgtaaactattataattgaactatcataatttaagattataataacaaactccctgatctaaacgtcttttaaaagttctcgatttcattcattgtgtttaatgtattttaattttagagaatatactttcgagaaattacgtgtatatgaataaataggtgcgattaattgaatactctcactcttttttacactcatcgatcattttatttttttaaaaaaatgtcacgtgccacatttttattgggtgcttggatatgtgtgaaaaagttataaaaacctaccactcagaaacaccaaaattagtaaacattattttcaaataagttgaaaaaaactattatttaaattatataaatattagtgacattatttattagaacattggtacaaaggcatttaaaagaaaaaaaaagtcattaaaaagggaaagtttctaaattcttctccctatttgattctacgaaattagttgaaattactactttttcttttctttttaaaagttttcttgacattattcactaatcatcatagactaaattgagaaacaaacaaaaagaaaaatactaaattgaaacttttttaaaggactgaattgaaaggaaaaataacgtactgcattaaagacttcaataatgcatggttaagtactaacccattaaggtattatttaattacgggtaattataagaattattataataaatatcttttatggccaaataagttaaccatggttaaagagttagaagtacagcaaaatattcatacctgatagacactattgtaatagaatttttttattaacgatatatcttgaaatacttgtaactctaccaattacttaatcatttatattttcaatattagtgatagactattattaatgattgaatattccaatattttgttatatatataaaacttattttgcattgtattgtattatatatataactatttaaaggtgattgctatatttgcatatatacaatatataaattatttatattcttaatataggtaactaaatttcaaaacgaaggtttttccattgg

SEQ ID NO: 7751 - DNA, 2383 bp, Cucumis sativus
  Intron number 4 from transcript Cucsa.207000.3 (locus Cucs a.207000) derived from phytozome v7.0 (chr-ID scaffold0144 1; pos 194624 to 197006 reverse strand)
atgtaagtcaaatagttttatgttaattattttgtttttagaatataaatttaaaatcactacttatatagtgagtatacgtgatctacattgtcctaggtgttttagaaaaataatacattatgaaaactcaaattttttttagtttacttaaaaattaacgtgtttgtttatgaaggataaaatcattttaaaggtttgatgttaaagcaagaatgcattttttagaagaaaaaaaaaacttaaaaaatgaaggattattcaacttaatttttaaggttctatagcaaatttgatctcatttctattctaaaaatgtgtttatctaacaaaatctaaaaatgtgtttatctaggaaatcgacttcttccttgaaaggcaattagtgaatattcatatcaaaagtaattgtcaaagaaaacttttattaaatgttgtattgttattgtcaatggtatttagtgttcaataacttcttttaggaaactactttgcagtagcttagttttcaaatgtcttaataataggaaggattgtgggtgaatagtgagagtaaataacaatatttggatttgcaatcggagggaaaatggttaagactaagtataagttttgaagatctacaaagaggtcaacatgggaaggccgaaaaataacgtctatccgcgataaaaccgaattataagaacattcactcaaagcttttgatttctcatactttttcaccggtactcttcacaattaaagaatataataatataaaagaaaattaattagagtaagcacgttaaaacttaaagtgtttctaacttatacaattgaaaacaaaaaacataggcaccttttatagcccatgaactttccaaaaccttttcaatatagaacaaaacctacgacattcctaaaaactctttcaatgtaggacaagtccatgacttttttgtaccttttttatgtgagataataacacacttctaatattttgccaaaaactcaacaaatttcacattggtaagatatttaaagattccatagcttctgcaagatctattgtcttcattgacaatcataagtctcatttcatagaattataacctacttcacactaagagtagaccacttagaattaccacccctcaagattttcaactcccatcacatgccgataaaacctttattgagatttatggtgcaaccttctaactacttggctcacttgaaagtcttttagccatcgacataccttctaacacacaacttgcaaacttgtggactcactaacatcacattctctattatgataaagtggacataccacgaggatgaattgtgtcttcttgagaggaagtcaccgtctcacatgacatgaaagtcgacatctgatccagagaccttcgacaaacttgctctattttccatgtgtgcaaactattcacatcccaacaacctatcaacagctcaaaaagactatccttttttaatctcttaccaaaaccactcttagactacactagaacatcgtcaccacttaactggcactcaggtaatcagacttgcattaatacatccttgatttccacttgccagaaatagaagtacaatccttccatcaaatttatccacatcaaactttactggacccatatagcttgacagacatctactacaattctagcaaataaggtaatagtgagcaacttacactactcaggaataccgcagttagctttgagaattcttttttgatgtgaaaggtcagacaatgttgcaaccacaaatcatactcaaaaattcaagaaactacaaactcaaagttttgatgccacttttctgaaaaataccctctaacttctatcacataaaaataaagaaaaaacaataaaaacataaaacacaagaatttactgtgaaaactccccacttgaaaaaaaaaaaccacaacaagaaaggaatctattacgtaaaaaattgttaaaatcacatataaaatagttttctctatccaacccaattttaacactctctccaagcttttactctacactcacaccattttactactcttaaacgctagagaatataacatataatttaattaaagttagcccattaaaacttcaaatgttatagcccatgatctttccaaaaccttttttagtgttgacaaactcatatatttctaaaccctttcaatgtacaccaattccatgacttttctaaaccttttttcatgtgttacaactacgcagctaatattttaccaaatatcaacaaatttatacctattatttgttgggtttctttatttaccttcttctaaacttttgttacaaataaatagtatatgatatagtaaaatttaaactgcaggattcaaatacga

SEQ ID NO: 7752 - DNA, 2493 bp, Cucumis sativus
  Intron number 5 from transcript Cucsa.312340.1 (locus Cucs a.312340) derived from phytozome v7.0 (chr-ID scaffold0299 5; pos 1789538 to 1792030)
gttctagtcgaaatacaggtaccttctatatatcaatctaatcatattcctactcccataaaagtacttccatttactatcattaagaatctttcctatcactatttaattatacatacaattttacctctaaacaaagatttagtatgattttgaaatatcaattatccacttagttgttaaataacttaattacaccttttgatgaactttcgaaacacaaaatttaaaatttaaatttatatctaaacgaatcgattgatttttaagatttttttaaatatatcatacacaaacatcgaatttgaaggattgagcttgtaacttatttagtagaaatctctctctatatatattttgtattcctcaatattggtggtgaatattatagctcatgtcattttctcattgctcctttgatttatctttattattacttttttcccttttaacttccactttttaaaaaggattaatttacaaagaaaaaagagtccttttgtttagttataataagataaagaattgaaacttcaaccataatctaaagaagaatttataacataaaaataaaaaaaggaaaaaggcagattctccttttgaatgggaagaaaaaaggaaaaaaaaatagcacaaaaagagtgaacaaaaatgaaagaaagaaaaagaacaatatagttgtggggacgattaatgttgaattgaaaaatcaaagaataatgtctaaaaaatacatgaaagagagtgcataaacaataacaaaaaaacaaataacactcttttctctactttcttcttcttcttattatcactttaaaataaataaaaagtccaaaaaacttgaatagtaaaggcataggacaacgtcaaagagttgttaagtaattatcactagttcatcttcaccttcgtcgtgatattgacttaacatctttttgatacaatcataaaacactcagcgtacatcacaaagtttaaacttgatttaagattattgtatcttttaaaataaaattttaaaaccgtcatacttggaaaagtagggttttaatttggaactacatacttcttagatgaaggagaaaaatagcttttctaaaaagtaatgataaacatggtatataattaagattttgaaagattaaatattagttaatagaagttaatatgatacccatttcaagatagaaatgagcatatttataaaagctaattttaacggtttatatttgttttattcacttcaaagttcaaacccttttaaaagcaactcctcaagatgattttttaaattaatgtttttgagtcacgagacctatgtattgatgatggtggacatagcaatccctaaagttatttgggattaaaatatatgtgtaggctcaaataatgacatgacattggtttgaaatttagttcataaatggtatatgtgacccaggaatggtgtagcccataatttattggcactcacttaccgacaaaactaagtttttttttcttagttaggtttccatctttctttgttttcacggagaaagaaaataatacttacacatcgtttatctttgtgcatctcttcttatcaattacattaaaaaaaaattctcagtaatcaaatatttctaaaagaaaagagaaaataaaatcaattgatagttgaacaacaatttagtggaagatacaaagatgaggaatacgaatacaattcattctaaatatgtttgttttagaagaagaaagaaacctttgaggagaaagaaaaagtttgcagtttgcatttatttttattctaaaaggttaaaatgctgcttttttccaataaaaacaaataaatgatcaaaagctaccgatgaaaatcagacacacacacacaaatatatacatatattggtaaagtagtgatatgtgtgaatgattgaaaggtaaaataggaaaattggaagggtgtttggataaagattgtatttgatagaattagggtttgatttggattccttatgggccatagtttagaaatattgtgaggaccatattcattgtactgtgaagaccatcttcaccactcacaaaaatggcttcgattcatcacaaagtttttgtttgtattcgattcgacggtccaaccaacttcttgctgtggaaccctacataacccaatctttaaactttcaattcaatacttccaattcccaccattaaaatctccagctttcctccttgtaaacaaacactgctcaaactgacacatgtttacaattttgatgatgttccaactcttgtctctttgtatcattggtgggtaggagggttgtcccccatcccaccatgcttcctgtccttttcttcatttctcaaacctccacacattcacacaaacaaatactctatttgaatttactaatgtaagtaagtaaacacaccagctcaaggactaatctatattgaaaaattacaggacacattgagatcaagcccagcagaaaacaaagc

SEQ ID NO: 7753 - DNA, 3811 bp, Cucumis sativus
  Intron number 1 from transcript Cucsa.228170.1 (locus Cucs a.228170) derived from phytozome v7.0 (chr-ID scaffold0193 3; pos 135315 to 139125)
ctgttaaattaattgttcaaggcaaaaacttggaggtattttagcttcatttttgttctacaagtttttcttttcatctgtcttcctactatgcttaattgttcgcgtctttagcagtttctatttcttctcaagtttgattcagtaattattatcataatcaataattgtcacttggctgcccccacaaaactctctgtctacctgtttggtaccccattctctatgctattccaatcaccatatctcttcactcaaaccgtaattttattttctccaagttattctgctaatttctgcctcatttcttcaaatatcttccatatcaaccattcatatcccttctcaattgttactctgcacaccctctttgaagtgaacgcatcgcataaggatttctctatcatttttcagaatctcctaatttctcatccaattttgatattctatattttcacttattgcagctagaagatttttctttcggtcagagaatcgggtgcattcactttcttctatatcagcatcttaactcacgggttgactcaaaagcttaagttgatgcatttgaggagaaaataacatagcagtggtttaaactcagactcctctggattagataccatcttaaattacccattgagccaaaagtttaacttgtccatgggtgacatcaaatttcaaatttattcttctgtacattctcatcaaacacaaccattttctttcatgattatcagtttccaggaaacacacaatggctacttcatacttctcaatttcaaaccttatctgctcaagggaatcctttgtaaaattggatcacgatttctataggcctctatatttttcacttaatccgagccagacaactcaagctgtatcatcctgcttagttcttgaacatgatactgatagaacactagtgtagatgttttttattcaacttggtaaaagatacttcagtacaaagacagattgatagattattaatctagaaataaaacacaaaatacagcagaacaacacaaaacaacacactcaaacaacaagaacaaacacactctgttatcctcctctcaagcatgaacatcacactcacaaattgaatttttcctctccactcacactctcctctctccatgtaaactaccccttccctcctaaatagctataagattcagtaactacccattaacttaaaactaccccttcacttttgcattctctttcttctctttcgagttccatttcttctttctcctactatattgcagtattatgggaagtctaacattacactcctccaaaaccaccttgtcctcaaggtgaaagtcaggacattggtgttgaaattcatcacagttctcccaagtggcttcatgcggtggaagtcccttccagctgattaagacctcccaattttctgttgttggattcttctggtacacttcctctggtagggccatccattcatgattttctgatatataaaggataaatggatgtgctgttgaatgctctcctatcaccttctttagatgaaagacatgaaataccggatgaatagctgctgatacaagaagagccaatctatatgccactgcccctattctctccagcacttcatatggcccaaaaaacttgggagacagcttctcattcctctttttttgtaagaaaacttatctatatggtcgtatcttaaaaaacaccatgtttcttcatcttctcttttcgaagatgttccttcaaagcccccaaagctatggccctatctttgagttgatgatcaagagtttagttggacgtctcagattctccataataaatcaacagtggtggggagctcccataaacagcttggaatggtgtaattccgatggaactacgataggtagtattgtaccaatattccacccattcttttggtttctcaccacaaaaacatcttaaatatgcttccacactacagttgactacctctgtctgcccatccatctgtggatgataagatgaacttctgtttaacttggtgccagccaagctgaataattcacgccataaattactcaaaaacaccttattctggtttgaaacaattgactgtgggtattcgtgtagtctaaccacctccttcacaaacgtttcagccacagatttggctgtgtaagggtgcttcaaagctataaaatgagcatatttactcaatctgtccactaccactaaaattacttcataccctgctgtcttgggaagcccatcaataaagtctatagtaatatcattccacaccttgtctggaatctctaatggcataagcaacccagctggagataatgttagacctattcctttggcatatgagacactcatcacaatattttttaacatcttgcttcatcccttcccaatataactcccccattagccttttataagtgcgtagataccccaaatgtccccctaaaacagaatcatgataagtgtgtaatatagttggcagcaatgtggatgatttagaaattaccagcctacctttatacttcaacattccttggtgtaaagtaaaatctgaaacatcagcttcattcttttccagttctgctacaatttcactcaactttggatcttttttcacctcttctttaacaaccagtaggtcaatctaatcaggggctgtaaattgatttagatgcacagttggtggcattatagacaaagcatctactgctgtattttcctttccaggcctgtaaattacctcaaaggtataacctagcaatttggctatccacttctggtgttggggttgaatcactctttgctccagcaagaacttcaagaacctttgctctgttttaactatgaatttcctctcaagcaagtaggtctccacctttgtacggctaacactactgccattaacttcctttcataccctggttttgatctcttaatgacaaagatggctgaaataagcaaaaggtctatgtgtttggatcaataccaccccaactccaaaacctgaagcatctgtttcgaaggaaggttgaaatcgggtaatgctaatataggcaaagtcatcatagctttcttcaaagcttcaaatgccatatgtgattcctccgtccacttgaatgcttcttttttaagtagttgtgtcaatggggctgaccacaattttgcacaatgagacctaggaaacccctaacttcccttacattagttggaattaacttcctgtacacagccaaagcagccaacacatgtaataaaagactgctgcctcggaatttagtttggctctatatgtctacccctagttatggaagtattaggattattagtatggttattagaaggggcatactagtaattatcaaagaaatataagtgggagaaatatactattgaaaacatgcaaaaaaatgaaatgataacaaagtttaataaggtgctcatcacactgaacttgcctactagatgcagataaagaaattatctactaatacttgcttacttaatggtccaaactctgttgcttcaaagtgacaagatcacctactaactataaattctaatatctatttctataaattatccgagtttcagttactcaatttatggtaactcaatgtttaaattttaatttttttgtatggccttgaattcctattccttctcaatgaaagcagtttgtttcataaaaaaatgtttaaattttaatacatcaaacattgagtggatttatttttaattgtgcgaaaaactagttgactgaagcagttaagaagcacgtggaagagaa

SEQ ID NO: 7754 - DNA, 6036 bp, Cucumis sativus
  Intron number 1 from transcript Cucsa.079610.2 (locus Cucs a.079610) derived from phytozome v7.0 (chr-ID scaffold0079 3; pos 2475727 to 2481762 reverse strand)
agctttcgtttcaagccggtgaacgtcacgccgtctggaatttcatctgctccccctttccccttttcggattttatcacgtttctctttttgtgtgcatgaaattgatttatttagacgtggtttttgcttgtttgttttttcatctctatttgttttgacgattctggatagtttcaggtaatctgagaattaaggtaatatgaatcgtgatatatgatgaaagtatagaaagcccgtatttgtctgtcaatttggctacaatgtttgttatcgttatttgttctgtcttctaccatttgattctcgatggagaatttataccgtttgtgcattgtgatgagggggtctgtttatggtggttaactttgcttaagggatgactagaatcgaatgttctgtgttgtccttttatctcaaatttgaatgtttctcatttatccttcgttcttagcggatgcttggtggttaggctagcagcacagggaattctatcgtattcactctaaaagatgcaagacgtagttgcatggttatataatgtgaaataaaacttagccttcatttcatgcaaagaaaagtcaaggcctgcttagaaaacttatgcaggataatcgctactaatgatacttatagttgaacgggtgaattaatatcacttgatcaatgaacattttgtagtttttaaaaccatattctcaactttcttagaaatcctaccaaagcttaaacttggtattttgtgcactggatcctttcttgtttagttattttttacctttctgaatcacattgattttggcccttttaatacaaatactttaggaagataagtcaaacaacctacgaaagattgtttcttatatatatatatatatataaatataactataagtcaaacaaccaacgaaagattgtttcttatattttatatatatatatataaagataagtcaaactaccaaagacaatggggattggagactagagaaataccaggaaaaaaaaggttgatgaatttgtttggctttttttgatgagacgaacaaattaatagaacataaatggattttctgtaacttttctagctttgatattcacaatgccaaggttcttcaaatcaatattttgaaggatttggctaacggacagagaagcattataagatattgaataagaatgagcaagaataggaaagagaagattatttgagttggctaagatttattgtccttcttggtgttcccttttttattctctttgctaaattagttcttttgttaatatgaaaaaaatgctaatcttcaatcattcatgatgatagaatccacaaaaaaagaattccccttttgtttctttattgtgataattgaagtttaatctctagaattttgcagatctaggtagaaaactcctcgaattttcacaaactaaaaacggaagaaataatctcttgatggaaccatcaccaagaagcttaacaagaaagttttctcctaatggtcgaacaccttcaaactggagaataaaatagaaatcagcaagtaatattaagccaccaccacttagatcttcctaaaacagtgaacaagaatccagcctttttaagattcatgagatagatgagaaggatcttgaggttcagctgaatgcctctttgaaagaagggaaagattctcttaagtttgattttgttgatgttataaggttagaaactagtagttggcaaaaaaaaaaagaagttaattgggctaaggaaggacattgcaatacttccttctctcatagaattgcaattgagaggaagagtcaaaataggattggccctctaatcaaaggttccatagaggggtgataaggacatcaaagtatgaagtagtttcatttttgtcaaaatctctatgggctagaggtagtccccaaaaccttctttcctaggaattgattggagtcctatcttttacagggagatggaggatctatttgcacctttcaatgtggaagagattaagcatgttgtttatgggagcaatatgtcttaactctgggcctagatggtttctccatggcgttctatcaagacaattgggagttattataaggggacttggttgaagtgttttaggagttttctcaagatgggtgtcttgaacaaagtcgatggtgtacattttcatgtgcagtgtgccttattccaagggaggagaatgctaacaatgctgaggattttaggcttatcagccttatcactagtgttaacaagattctgatagtaggatccaaccaattgaaaagagtgcttccatcaacaatctcaaacttgcaatgggcctttctagcttaatggagacaaattctagatcaagccccctttgccaatgaatccatcgaggattgcagagttaaaggagaagaagaagtgatttttaagattgactttgagaaagcttatgagttatgctcatgtggatttggggatacttgaggaacgtgagttgctccttccttattaatggaagtcctaggagtaaagtggtgggctcgctaggtcttagacaggagaccctctttcccactttttgttccttctagtggtggatttccttagtagaatcgtttataaatgtgttgatggtaatattcttgagcccttcaagctggggaaagataaggtggccctatccaaccttcaatttgccgacaatacgatgttctcatgttatggtaaagaggattctttcttaatcttaaaccacatcttaggcttaggttgagaatcaataggagcaaatgttgtgttatggggctcaactgtgaggccaaaaatattgtgttttgaaaaaggtgagttgttggaagaacttgttaatcatttctagaacttgggaggtcttagtgtaattcttttggagtgaaaacccatttttgtagggtaagcctctttgttgagctgtttgttttgtatgtcctcacctcatatcatctttcatatttctcaattaaagcctggtttccttaaaattaataatgataaaggaagaagatatggaagctcttaaccaattattttttaaggctgcaattaactttatgaagaattacactttgttaagtggatatggttttattagtttgcgattgcaggaaaagatccattgtttctggttataactattagtattagctaggaagcacatacacattgttttttatggagttctagacacgtgtcagacatcattttacatgtcttattcttttctccttcactttatcttgggctccctttgggggacaatttgaaggctgtccttttgggatcccattcgattcgtaagagattggcgggatggaagaaaaggtttttctcagaagctgggagattagctcttattagttttgttatgagtggtatctcggtgtctaatatgtcgctgtttagaatccctagtttggtttgcaaaaggatggagaagtacatgagagatatcctttaggaggggttggcaaaggtcatggttcccatttgttgagatgggagttggtggggcataaccaaggagggctagagattggcaatttaagaatccgcaatagagcgtggttggctaagtagctttggcgcttttctcttgaacttgagtctctatggcataggattattgtgagtaagcatggcgctcatccctttgaatggacgtcgaaagggggttaaaggcacacaccaaaatctttggaaggatatttccttttagcttttcattttctcttggtttactcgtcgctttgtgggggatggtaaggatacgtatttctgggaggaccattaggtgggagagagttccctttgttctttatttcctcatatttatcatttatcctcgttaaaaaactgcatggtcttggattgtgtggatagcttggtgaatcccgtgtctttttcatttgggttccgacgtaatttgaccaaatatggaagcgacggaagtggcctatcttctttccttgcttgagatatgtatttttaggaaggggagaagggatgttcgtgtttagaatcctaatccaagtagaggtttaacgtgtaagtccttgtttagtcttttgttagatccctctccctagtctaagtcagtctttgatgtggtatggagggctacggtacccaaaaaagttaggttctttatctggcaagttttgcttgggcgtgttaacactgtggataggcttgttaggaagaggactttgcttgtaagccctttttgctgcattctttgttggaaggtggaggaagatcttgattattttttttcgagattgccattatgcgagggtagtgtggaactcttcttgcaagagttcaatgtcagttttgctggctctaggagtgttagagctacaatcgtggagtccttccctccatccgccctttaaagtttaagggggactttctttgggtggctggggtgtgtgctattgtttgtgacatttggggtgaaaggattgagcgggtttgtaggtgtagggagagggagagggagcgtagtgagatttggtctttgattagatttcatgtttccctttgggcttcgattttgaatcttttttgtaattgttatgtagataacattttacttagatggtctcccttttgctaatggtatgttttggtgggctgcttttttcatgctcgtgtgttctttcattctttctcaatgaaagctgtttgttagatcaaagaaacatgtcttttttttttttaataatctgacaccaggtgacacactcaaacagtccatattctatttcctttcctttcccttctattcattccttttttttactagaggaccacgattgtcatcggctgttagagagcattggcagttgtcaggatggtgacagcttgcagtggcgatagcagcagcagatcagtggtgaagggaggaggtctggacgaaattggggatgagagtaaagttgggggagaggggagaacgaagggggaagagaagaagatggctgaagagagaatgagatgttagggtttttttattttattttaatatggctcttgaagggagaataagagattagggtttctttgttctagtgtttgttaggccttttaatgtggtttttttataggttgggcttttgtccttttagttttaggggacagtaatttgttgagtatcatgcatcattaacatttataattaaataaactttttttaagcaactttttaagtaattttagtttgtaaaaagaattaaagtattttggttctatcttttagtattattataataataaaaaaaatagtgtgtccctaacgtgtcgtgtcctacctttctagaaattgtcatctattgtatcatgtggtgtcactggttgcgtgtctgtgttgctgcttcctagagtattagtgtagcaaagtgcaagttctaacacttgttatgttcactaaaaaacaaaatctattttgctcatttgggaatcactgtagttccttagtagtcagcagtcttaaggggactagtgtggacaaagtgcttggattagcatttttattgttggactggtttgttattggtagggatgtgctcctgtcaaagttccgttttgggctcctggggttcttttggcggttaggtttgtttggagaggtgttccatttgagatctttcttttggtggctattaggttttatttattttcttttctttttagttttgttttattatgggctgtcttctggatttattaggtaggttttgcctcccttgttttgtttgctttactattcactattctctcttccttttggaggtcttattcttgtgtatctgtttgtttatatctaccatgaaaaggttgtttcttgtttaacagaatttacaaatatgcattctcttctttggttcttattttgctactgcgatatgatatctttacaaattatgttgttagtttgttttattagcatttgtaacctcatctgatgctgttttcaggaaaagctttatcagtgg

SEQ ID NO: 7755 - DNA, 2388 bp, Cucumis sativus
  Intron number 3 from transcript Cucsa.048600.4 (locus Cucs a.048600) derived from phytozome v7.0 (chr-ID scaffold0054 2; pos 3259451 to 3261838 reverse strand)
caatacagtcacctcagttcctcctcctggtatacaatttttcatattaattcttctcccctttatggttgttataagtgttgaagaaattatgataaaataatgcaatgtgctaagtaaactataatcactatctacttgataaactatttaatttaggctagttggatgatggccaagtacatgacttctcctaacctaaatatggcatgtaggcaaaaatatataaaattgtagacgttttaaatggcacgaaaagctgactacaataaagggtgtggatatttacaccaataaagaacatggaataaaataaagtttagaaaagattcaaatcataagaatgcatccctgaaaattcttccattccattgactcctaagattccagaagataaccctattgatagcaagccataaatttttttgataatcatagaaacagaaggcctcaccccctcccaaaaaaaatgaagaaggaaacaaaaagaggtaaggatatgatatcataaatcttgctgagcatagccatagaccaactaaaagtgtcaaacataaagagacagtaacgctgcacaaaaggaaaatttgccaacaaatgataaggatgctggacttgagtacttgtaaagcgttaaggcctcttgtcgtaggtgagcgtctggctgtgggtgtgcctcaacaacattgggacaaacaaaaaatgctttagaacggtcttgtggccaaacaccacaaatctttagcattctgtagaacagccatagaaagaagatgggaaaaactagctcattcaaccatttcaggtgttggtgaggttccttcaaaatatctaaatctcatgtaccacgataaaaaaggtcatctacacaaaagaagtccgaatgttaggtatctcaactgaaatagggtttttccccctttttgctttaattggacacaaaacttaacttgatgaaggatgcatgggtaaaaagggcataggcatacactaccaaaatcatcatttacaagagcataaatgttgttcactattgcatgggtcaaaatgttgttcactgatcacctttaaggcaacaaaagggctcttatgggattacattaacagagtcattttttggaagatttggaatgagaggtattctgggatttttcagtggaaaagaaagatttcctgggggttttcttgaataatctgtttttaatggcctttttggtgtaaaaatttgccgcttctcaatagttacaatttaaatttcttgtttttaattgaagggatcttttgtaatcccttattaggctcattttttactctttggagacttcattcatcagtgaaatagtttttatcagaaaaaaaaaaaaaaccccataagaaaaacacatttttaagatttagcccaagtcctccaacaatttggtctttcatggattactgcgatatgcaaagcaaaaggaagtcaaggatatgaatgcaacttgtctagttctagtaggacacggacacgtcaggaacatgtgcattttttatttttagaattagtatatatggtatgtatctatatattaatacttccttatacgtagcccatgtaaatttaacctaaaagcaatatataccccacctaaaacaagtagtcaattagggaaaattatttttaatgacgactctaaagatatttacaaatataacaaaatatcatcgtaatagaccaagatagactaccatttgtgtctagccttggtttattgtggtctgtcatagatagattgtgatattttgctatatgttgtaaatattttgattcattttgcaataattgaaaatagcccgttaattagtgatattttgaaacttagaagatatagaaggatttggttggctatgattagaggtagaagatgccatcttaatataaggaatgatcaatatgtcaggtctagaacccctgttctttttcataatttttagataattttttcaagtcagcctgatttaggagaaaaaaatatctggcagacgaattttagtatgttggacacatgtccagtgcgtgtccttgccttcaaggtcacaatagtgttctccttcaataatggaacatgctcatgtgaagatgttccaagtggaaaattattatgttgaaatgtgttgagtaagatgttagacttattcataatgaatattattttattagtttctaattttattttgtatttcttatagaataaccataaagttctgatagtagagttgttgaattgactcttgtcctgtaacatataagtctgagcaattgcttttgtccttcataccactatttgtcatttggcttctcttctgaagtcttatatcagagacttgggccttgcatttgcaggaacagat

SEQ ID NO: 7756 - DNA, 1309 bp, Cucumis sativus
  Intron number 1 from transcript Cucsa.062730.1 (locus Cucs a.062730) derived from phytozome v7.0 (chr-ID scaffold0065 9; pos 589 to 1897)
cttttggggttgaacagctcgcattgcttactcaggttttctattttctttagctttttcgaatgttgcttaagctgatggatttcagtaaatggagtcaattattgttactcttttttgttttctctgtttctaaaatggggggtttcaatgtaatctttctctctctaaaatcttgaggaatgtttagtttctcttgggatctcttcctctttctctctctcttaacaacattttacccttcttctttttttttcttctctctctctctctggtcatttggttgttttcgtgtgttcttgggatttggactgattaagttgttggaagctgattttagcaaaagagatttttcttattaattccttttttctatattccctccattaacattctcatatatatgtaatttctctttatatcttatgtagtttttcaagcccttcccccccaatgctatttgtttttcctctcccattttttctatccttttctttttctccccaatcagatatatatgatatgtatgtataaattattaatttttttttcttcacttccttttttttaatttttttgggtttaattttgggaaaggagaagtaatttctgagactagttggaatatttcttaaatgggtatattgatttaatttgctcaaaatcattaaaaactatgttcttccaaacatcattaatccatactaagagcaaatgtagattagacattataaaaacaccaacattttaagcattattattgtgctttaagatttaggagagttaaatcaatcattagattattggtattttcatagcttttacataaaaagatcgattttatttcttttaatttttattatgatcagatttatcttttcttaatagattttttcttcttcttctgtgaacaattttttgtatagtccaaagtccttgtttcttccttctcttgagaggcagaacttaatttctaagctatgttgcatgaacaatttttgtgagacacaattaactttggtaaagtaagattcattttatttaaagcttccttctaaatttatatgtcacacttcgatccccttgtatatttgtcaatggaatgaataatactaacttatagttgaataaaaatgcagattattattgattaaaacacttttggattgaagactagctagtgatattgttaatgatatgaaagtggggattgaagacttcctttaatttccttcttataccaaaatttacatttttattaacgaatttttggtgtattattggacatttccagaagcaattggtaagc

SEQ ID NO: 7757 - DNA, 1380 bp, Cucumis sativus
  Intron number 8 from transcript Cucsa.091540.2 (locus Cucs a.091540) derived from phytozome v7.0 (chr-ID scaffold0089 4; pos 2529091 to 2530470 reverse strand)
gatcttgaagaactattttctacagcaccggagaggtattggctttacagtatttggtagtttcctgtcattcgggggattatggttcaaacttgtatactcaagataacatcctcgtgcattgagcgagaaaataatctgtcatattttctctcaattatttgttttttgaaatatgctatttttaaaaaaatttataaagttgttcatgaactttcagttatgtgtctaaaagtgtttgataggttctgagctttcatattaatgccattttggtccctaaatgttaagaaatgttgaaatggtccttaaactttcaatttagtgttgtttagtgctggagttaatattcttagacctactaaacactaaattgcaagttcagaattctatgcactgtgggttgtccttttagaatcttattggtgagagtgctgcaacatttctaaatggcctcttcacataccccctggtttttactcttagttctgcaacattctcatggaaattctatcaagatttttgaatgcccttgaatttttttagtttgcatttatgttttgtggctttatttttatccatatgcttttgtagaaatcttgtcaagatttaaaatttgagtttagagtttttatgagtctacgacagaaagaaaatatttttcacatagattttatttagtatagctgggcccctacttataagtgggttccctttttgtgggcttggcttttttttgtttgcagtgtacttatattctttcatttctactttatgaaagttgttatatcaatattgtgctagttgcttgggtgtattatgttctgttcctaaataaatctgaactttgttgatactgtaatactttttttccccttgttttcattcttccatgtgtcaaattaatactccagatctaatgatggttcaattttcaaatatgttaaagcaactacaatataacattgaccctttgcctagttataactcaattctgttgtgaagatttctcatattttacttgtggttgtttagatcctacgtctatctttataaaataggttttgaaattttctccaacatttgttgttaaactgatttggcaaccattatgcttttcaacataatttattgttattattgttatcatttaataaaacaaccactttcattgagaaagaaaatgaaagaatacaagggcatacaaaacataattccgcaaaacggggtcactctagagaaaaaggggccaatcaagcaaaattgtgcctacagaacagttacagaaaagttttgaaaaacatgatttattgttttggtgagttaatgagcttctttgatttcttatgcaacattttcattgaaacgccagtccttgga

SEQ ID NO: 7758 - DNA, 1953 bp, Cucumis sativus
  Intron number 1 from transcript Cucsa.250230.2 (locus Cucs a.250230) derived from phytozome v7.0 (chr-ID scaffold0221 9; pos 349578 to 351530 reverse strand)
tgacgatttcagcgatttggtatcaccaacccaaggttcgacatttacccagtctttgtaggcctagattttagttacccacttcttaacgcctccaattatgtaggattaatcgtagttggacatgttctaggaaggattcaagtgcctttcgataagatttagtgcggaaaacactgagtttcactgaagacctaagcttttttcttatttggtaagatttaggtggtaaacacctgattggagctttttgaacggaaaattctctatttctagttcgaaattgtttcaaaatttaccacaaaagcttctggttgtttttgggttagaacatctttactgaacatcctttagaactctaaataaggttttggactgagttttgaccttagagccttggtcctatggtttaggggccttccggattgctttaggagcactttatctaagtgaagttctattcgatgggtctgttttctcattgatagatgagtgctttacttgcgttatatctattttctatgatgtaaatgctttatgttctcgaattatgtgtttttggcatttaagcatgttgtattgttgcattaatattcatgttgatgtgctattatctgaccctatgttaatgagtgagcataacccgttgctatgcatatgatttatggtgagagcgtgttatgatatataattaaatttacctttatccatcagtttaagcttttgggttgaattggtgatttaagatgggatcagagcaggggtctaggtaggtcctgtgttcaagccaatgcatttttgtattctccctatttaatgttcatttcctcttgttgggccttcttcatattttgagctcacaagtaagagggagtgttatgatgtatttaccttcacccatcatcaacttaagcttttgggttgaattggtgattcaaactatcattctacatgattttgacttgagcattgcttagaaaagcatgcattctgaagagtttgtatgagaaaaatgttagagttccttgtgtatttatgaaggaaagttgggtgaatataagtttttcttgaataaaaatgatcaaggggttgcatgttgcatcttactgttggatttagaggagcatcaatgctttggataaaaatggccaaggattggtgggataagtctagaatgagtatgtaggttagccatcaaatgtcttaaataaaaatgatctagaggcattgttgagtttaaggacttggacaaaaatggtcaagagtcaagcatttagttttgttgagaactttgaagtccagaataaacaaggtgaaaggtaaacatatcttgaaggaatcagtctcaaatagtcttagtgtgtcctaaatatgaatgttgagtgagcttttcaagcttaaatagagaatgcattacatgatatgttgattcgtgtgttagcatgttatagctgttgtttatttttcatgttaaacgagcatgtataagtgttgtggataacatgatgtgtagataagttaccaattatcttgttgatggtctgattctcacacctgcaatagttgaactaaaaaaggcagtgttttgtttagaaagaaaaatataaattgacaacaaaaagggcatctttgtaagttgtccgtttaaaggtccctcttgtaaatgttgcatgtcaataatttttgcatggtagctttcaacttgtgatgaaattgggatgtttttggaaccaagcggaaactactctccttgttaaattggtagccggcccattgaattttaaattttcatttcattccctgtatcaatttgtagttttgtcactgtacttccatttttttggcagagttaattcctggtttaggtccataggattctagattttgatttcgtctcccctcgttattggctatattttgtagtttagtcactgtaattccatttttccagcc

SEQ ID NO: 7759 - DNA, 556 bp, Cucumis sativus
  Intron number 9 from transcript Cucsa.257050.1 (locus Cucs a.257050) derived from phytozome v7.0 (chr-ID scaffold0222 9; pos 4445800 to 4446355 reverse strand)
tgcattcttgcgaggtacactctacataacttcgcttataagtattagaacgttccttgaaaccaatctatcaattcaaaattcttaatttatgttgcattagcaataaaccatttggtttagtaatagtttagtatattggtaaagtagaatgtcctataatcaatttttgtagttaacaggttagattttgttaaatcaaattaaaatttaacacatgaaaatgtggagaatatatgttaatggtagttaaacacatcataattgagtaagaagcctaaagctcaaacgaatgactgctatatatgttcgttatagaaaattattaatactttaaaaaataaaaactataagagtaaaagattatcaaacgagatctaaaatattaatgcttttatacaaacatttagatctaaaactagtaaaaggaggctcaaacctaccttttcaaaggttatatctactacttaaaagaatctttaaatacacatgcgataataataacaactaaagttatattgaacaataatcgcagaactggttgccaagaagagtg

SEQ ID NO: 7760 - DNA, 7635 bp, Cucumis sativus
  Intron number 6 from transcript Cucsa.383160.1 (locus Cucs a.383160) derived from phytozome v7.0 (chr-ID scaffold0388 2; pos 123452 to 131086 reverse strand)
tgatagcttctgaagtaattggccttgaagagaaggtaatggattgttctctaaaggctttcaattcagtacagtgcttttctagctactctttcgggctgcctatcttgtcttgtatgtagggtggtaggttatggctttcctttgtagttttgatcatgatgactataggggctgttcgaattgttaggaactaaggtagtatgggatgctcaaatacttattcttttggggactcaaaggtgcttaagtacctgactatggtgtcagacccggttgtcggcttttcggagtggaaccagtggagggttttgacctggtttggtcgagtgaagtatcactgaagtagctgccggatgtcggctttccagagatggggtattgtaggaactaaggtagtataggatgcgacctggattggtcgagtgaagtatcgctgaagtagctgccggatgtcggctttccagggatggggtattgtaggaactaaggtagtataggatgcttttatctcatgtttgttaaatgggaccaccggtgtggtacttaagtgacttgactctcttgtcccaatagctgttttttggggtgtggtcctccaaggtgcttaagtacctaaaaagtttcacatctccttgtccatttttttttaaattcccctcttcatattgaaataaagtggttatcatgtaaaaatgtcgatgcttagttaatttttcccaatgcaaaatgaattgatttttttcttcttcaaagtagataagaatttctcattcgtgaatgaaagggaagagaaaggttcaaagaatacaaatttgaagggagtgagcaacgacaagaggaaaataaactgaaaatagaaaatagaaatccatagagggatcatcatcccaatcaaaacaagaatcgaaggcttaaaataatagaggaggtttcaatagacccaaccttgatccattccagccgaacacctctgctaagattcccaatggaaatttgaaggatctattcttcaaacaggaagcaagtagcatggctttgtatttcttgagaattttagcatacacatccgcaatctccttgtatcagtattcaacttgtagatcttgcttccttctagactgagcttccaaacaaagacccatttctttgtcaagcttttccagttccagatttatcattatttttttaaaacggaaataagactttttcattgatatttccagatttatttgatcaatccagtccttgacattttcaataaacctacatacgattaacggttctattctgaaagagtttccttgaatcctgttgaaaagctctccaggtggaattggtagtttattttgaacctaaagaaaattttctcctcaaaactccttcaagaagatacaaaaccggcagaaaagaccttaagaacgtccacaaccgaactaataaatggcactttgatgtgcccaaatgattggattgtcgaaaaagaaaccattcttggtcatttagaatattaaaaaaggcccttgaaaaccaaagacgagttaaacccttatcatcaaatgaaggctgttgagatgttgtgagtcccacgttggaagaaccaaggagactcactccttacaagatagatgtgctactcctctcattgtcaataggttttgagatggaacctcatactatcaaacatggtattagagctcattaagcccaaacggttattcggtccaagataggtgaacccaaagaggcaccatcttaaggtgttgagatgttatgagttccacattgaaaaaacaaggagactcacactcctttataagatagatgaactactccactcattgccaattgattttgagatggaatctcatactatcaaacaaatacctttcaaaattatgaactcccaagttgataatgatatttataaattggaggttatggaggaatactgtccattcagattggaatgtatatcacgaccttttatgatcaaaatctgctctatatgttgtatatttgtgtcctgagttctaagattggaatgcttatcaagttaaattataacatataactgttgtgactgaaaggagaggggcgtaatttgaaaacgttcttggatctgacattagcattctgtaagggcccctattatccatacatataagaggaagggtaagaaggtaaattccctggcaactaatgatgagagaataattggaaaagatcgtgcaggtggggcccacggggaggaatgataggcagggatataaatatgtaactttggggattgggtagctaggttattttttagtcatcttttaggagaaaaggctgctgtagcctgaaggattctctagctcggtataaggtagctggatatgtttttcttgctgttttttcctttattatcatattgtgacggctgtttatcatctttggcctatatataaataaagatcatcagagtaccgcctctgtttagccattggttgtgatatttttgggttattcttgttagtatcctaacaaccggtatcagagccctgaaactgggggtggttacgtgtttaatggctcaaagacaaatagaggagagagttgatggaacgggaagagaaattatgggcttttaagaaatgatgttagagatgatgaagtccatggataggatggctgacgagatgagagaaattcatagttataaaagaagagaggagtttggtacatccgatggctcggttatgaaactcaaagggaaagatgaaagagatggataccatagtagggaaatacaacaaatgcggatcgaagtaagtataaaaaactggaaatgccaatgtttacgggggaaaatcctgagtcctgggcttatagagcagaacacttcttcgagattaataatctattaaaacagagaagataaaagtagcagtggttagttttggactggatgaagttgattggtaccgatagagtcatgactcataaccataagaatattgagtcatgggaggatctgaagggaagaatgtttgaacttttttgtgattttgggcagaaaagtttgggtgcaagactaattcggatcgagcaagatgggccctataatgactacattaagaagtttgtcaactactctgctccattgccacacatggccgaaagtgttctaaggaatgcatttgtgatgggcctggaacccactcttcaagtagaagtaatcagtagatatcctcagacattggaggagtgtatgaacgaagcgcagctggtgaatgatcgaaatttagtgctgaagttagccaaagcagagtggggaagagcagaaccaaaaggaggaggtgttgttaaaatcaagagaatagtgagaagggtattcaaaggaaaaccgagtttcaaatgaaacagatcgcagtaccaattaagggaaactatcagaaaaatgaaccaccagtgaaaaggttgtcggataccgaattaagagcacggcttgataaaggtctatgcttcaagtgcaacgaaaagtgctcgctgagtcatagatgcaaagtcagagaaaagagaattgatgctcttcattcttaatgaagaagaaagtacaggggaggaaggctcatcggaggaaattaccgaggaagttgtggaattgaaacagttagacatagtggaggagacagaaattgaactcaagacaatcagaggattcacatccaagggaacaatgaagttaaaggggagtgtgaaagggaaagaggtggtggttcttattgatagtggagccactcacaacttcatacacaaggctttggttgaggaaaaacagttagcaatcacgagggtacgaagttcggggtaacaattggtgatggtaaacgcttgccatggaaaagggatctataagagagtggagcttagactgaaggagatgactattatagcggattttctgactgtggaattgggaaaggttgatatagttttgggaatgcaatggcttgatactatgggaactatgaaggtccactagccttccttaactatgaccttctgggtgggagataagcaaatagtactaaaaggggatccttcactcatcaaggctgaatactctttaaaaacattagagaaaacatgggaaaagaactacacaactatgagatagaagtggaagataactatggagaggaagaggagaaaaaaggggatggagaggatgtacccatgatcaaatcattattgaggtattatgctgacatctttttgagacaccaaaagggctacctcccaagagagcaatcgatcattccatcatgactctacatgagcaacgacctatcaatgtgcggccttataaatatgggcatgtttagaaggaagaaattgaaaagttagtgacagaaatgcttcgagccgaggtgattaggcccagtcacagtccatacttgagttcggaactgttggttaaaaaaaaggatgggggatggagattctgtgtggattataggaaactaaatcaagtaaccacctccgacaaaattcctattccagtcattgaggagttgctagatgaattacacggagtaacaatcttttcaaagttggatctgaaatcgggttatcatcagatcagaatgaggagggaagacattgagaagactgctttttgcactcacaagggccattaggaatttttggtaatgcctttcggcctccctaatgctcctgatacttttcaatctctcatgaaccaggtatttaaacccttcttaagacgttgtgtgctagttttttttgatgatattagtttatagtgtcgatataaatgaacatgaaaaacacttgcggatggtttttgcggtgctgagagacaaccagctctttgccaacaaaaagaaatgtgttatagcacactctcaaatccaatatttgggctatcaaatatccaagagaagggtggaagcagatggggaggagatcagaagcatgataaactaaccaagggatgtaatcagactgagagcattcttaggcctaaccggttattacaaaagatttgtaaaggatatggagaaattgcagcacctttaaccaagctgttacagaagaatgcttttaaacggggtggagaggctacggcagcgtttgaaagtttgaagttggcaatgactactattatggtattggctttacctgattggtctcttcctttcaccattgaaactgatgcgtctgatattggattaggggcagtaatttctcaaaatggccaccctattgcttttttcagtcagaaactatccccacgggctcaaactaagtctatatatgaaagagagctaatatctgtgatgttgtcggggcaaaaatggagagactacctccttggaagaaaattcaccataattttagactaaaaagccttgaaatttctattagagcagagggaggttcaaccacaattccagaaatggctaacaaaactccttggatataactttgagatcctttaccaacccagactacaaaataaagctgcggatgccctttctaggatggaacaggcagtggaattgaacaacatggcaactactggagttgtagatatggaaatgatcagtaaataagttgagaaggataaagaactccagaaaattatagatacctgaagatgaaccctgaaaaggaggataaataccaatgggatagtggaaggctgctgtataaagggagagtggttatctcgaaaacatcttctcttataccgaatctattacacacttttcattactaaatcctagggggtcattctggtttcttaaggacttataagagaatgagtggagaattgaattggaaaggaatgaagtggtaaagaaatatgtagaacagtgcgacatatgcaaaaggaacaaatttgaagcaaccaagcttgcgggtacgttaaagcctatccccattctggattaatggcaggcggaggtagtagtgaaccgattgagtaaatactcatacttcatcccattaaaacacccttttccagctaaacaagtagctatagtattcattgattaagtggtaaggaggcatggaattcctacgtcaatcatcactggtcgagataaaatctttcttagcaatttttggaaagagttatttgcaaccatgtgtaccattctaaaaaggagcacagccttccatccccaaatgaatggtcagacagagagagtgaatggatgcttagatacttacttgagatgcttctgtaacgaacagccacacaaatgggacaatcttattccttgggcaccactactttccacgcttccacaaaaataaccccatttcagactgtcccccccatatcctatggtcacaaaaaaacccctaacaatgaagtagaaacaatgctgaaggaaggagatttggccctcagtgccctgattatacaatctagaatagaatgaaaaaaatggctgacctgaaaagaatagagcttaaatttaaagtaggagatgaagtttatctgaagttagaccctacaggaagtgctccttagccaggaagaaatgtgaaaaacttgcacctaagcactatgggccataccgaatcatagaagagattggagaagcctacaggttggctacccctgaagctgtcatccataattttccacatatctcaactaaaattgaaacttggagaacaataagaggtgcaacacaacaccccatcttaactaaggagtttgagaaacagtgctaggcatccactggaacacagaattgggagctaatgaatggctggttaaatggaagggattaccggatagtgaagccaattgggagttggtgtatgaaatgaaccaaccattttccactttcaccttgaggacaaggtggacttagaaccgaggggtattgtaaggccccctattatccctacatataagaggaaaggtaagaaggtaaattcccttgcaactaatgatgagggaataattggaaaagatcgtgcacgtggggcctgtggggaggaatgataggaagggatataaatatgtaatttttgggattgggtagctaggttattttttagtcatcttctaggagaaaaggctgctgtagcctgaaggattctccagcccgatataagggagctgggtatgtttttctggctgttttttcctttattatcacattgtgactgctgtttatcatctttgacttatatacaaataaagatcatcagagtaccgcctctgtttagccattggttggaatatttttgggttattcttgttagtatcctaacacatttgttcttcatggtttattgacccaatattgattcatagaaaaattctgtatgttgatttggatcatattttgacgttgataaaagcaaatttttggttctatatttgatctccacttaactaaatatatgtattttgtttggaactagctgaggaatttaacatattattgttatgttttccaaaaaagtggaaaagatgtcatgaacccttctttgtggggattggaattagagttctacttgcatcttgtttggacgatttattgtgtctgaaatatgcttatttatttatgtaggccttaagactaaggtcta

SEQ ID NO: 7761 - DNA, 6116 bp, Cucumis sativus
  Intron number 1 from transcript Cucsa.341700.1 (locus Cucs a.341700) derived from phytozome v7.0 (chr-ID scaffold0335 6; pos 4101559 to 4107674)
attctccggtgacaattgccggtattctttctttgtttttgttgttttatcgatgttccttttcttattgtctgttgaatgcgttttcttttaactttgaagtgggaactgcatgttatatgcttgtgtttgtttggcttatggaaaatgtgagaaaatgaatatatgtaatgtatttgatactttgttgagatcaagaagacaccataaagtctaatgctgtcattgtggggtacaggttgttttcatccattattctctgtttttgtaatttagtttcctgattcctcacgttgtccaaagggcaagtgtttatgattttatattgttaggattgtgatagagacctttaattttatttgactacaggttattggggacatttttgtactctgtagtttatttttgcagtaattgtgcgttccctccaaacatccttttcttctgctatctttcattgtttattctcagtactttccttttatcatttgaactgtttatcctttataagttgtttattatcttctatattgatgtatcaggaagatgacacacagactctctccaagtcatttattaccttctaagttgatgtttaaacgtaatttaaacgtttgtagtaaatgttgagtttctgaaagtgatgccacagtaatcatgctgcttcattattctaggtagaaagtcccacttgatttgttgatgcatctaatcgaacgctgtttagcaaaagatgaaaatagacgaggttgctgattatattttttgtagttattagtgaatgaacagtttaagtgttaggactcagcctatcaattttatttaccaacactcaagggaagattcaagagctccctttctctcccaattgtctccaaagagaacaattgcaatagttatatttttcatacctcctcccacgcagatacctcctcccacacagacaccctatataatgactcacaacaagccttactaacaaccagcattcttacgggcccacctacaacaacctcataataccctactacccttttcttaatattgtcattcttgcatttctcctaacacaaaccttagcgatcgggggcctatcattacccgcccccaaagagccaccttgtcctcaaggtggaagtacgggaacttatctttgactactgaaaacgcctcccatgttgcatcaattggcgaactatgctcccagaaaattaaaactttcgaaccaccctcctctatgggtaaattactcaatcccaatacctctgccggtcgtaaaacaaagctcaggttaggggctaaattggtagggataggcagaatgggcaggctgctacccaccaccttgaaatacagagacatgaaaaatgggatgaattcctgaagtaggcagtagagctaacttataagcaactttccccacacggttcacaacttgataagggcccacataccttggagcgagttttggatggctatggcgtgctaaagaagactaccgacgtggcttcagtttcaagtatatccaatcaccaacatcatattcaacctctttttctttttttattggccaaggtaaccatgcgttgttgagcctgttgtaagttggtcttcaaagtggctagcatattatcttgagtcatcatctgctgttcaacttcaccaactgggcttgtgcctttctcaaaacacatcagagggaggtgggcagccatataaagctgtaaatggggatatctcgctggtggagtggtggctatattgtaactgtattttgtccaaggtatccatttggctcattgcttcggcttccccatgacaaaacactgtaagtaagtttccaagccacggttgacaactttcgattgaccgtcggtctgtgggtggtaggccatgctgcgacttaattgagtacttgaggctttgaataattcctccaaaataaactggtgaaaatcttgttgcaatctaagatgatactttgaggatatccgtgtgaacacacaattttctgtataaacaatgtcgccaccgaacgagcattggatggatgcttcaaaaggaggaagtgtgcattttttttaactgattgacaaccaccagaattgtgtcgtagcccctagatttgggtaacttgatagaacaccacttcccaacaagaatcaaaatctgaaatatattgagaattcatgaaatcctactatatgatccaagtttatggtacgtgggaccccctctcttgaagatactactcaaccacctcccccttcctcactctataacaactaccatatgtaactgcctaaatatctaattacccttatacccctaatcctatactaatctaggtatctaacataacccttccacaaaatccatagcaatgtcttcccatgcttatcctggattgggatagccttgagtaatccagctagtgccaaagtgagatatttagcttgatggcaacctttgcgttccgtgacaaatgagtgaactcgaaccttcatacctttccaatacacctcccaagccaaacgttgataagtcttgaggttcccttggtggccgccaattggactgttatgaaactcagttaataatagagggatggttggagatgatgccgggataatcgaacgggctttatagcaaaggtctccacgtaaggaatagccagcaacacccccttgccctgcctatagagttttccatatttcattcaattcctcttcttcttccacctgttttttaaacccagcaacattgagatcacccactatacttagcagacccaactccatggctgttggtaaccgagacggagcgtcggaggccgagttttccaagccttttttatattctatcccaaactcatagcccattaacttggcgatccagtgctgatattcccttgctcttatccgttgtttgagcaaaaacttcgaacttttctgattggtgccaacaataaacctcctaccaataaatatggtcaccagttttgaatagcaaacacaatagtcatcagttcacgctcatacaccgccttgaacctgttggttggctgaaaaacgtgagtggccgtttattctgcatgagtacagtccccaacctgacttcagatgcatttgtctcgaccacaaagggcttcttgaaattaggtaaagcccatacaggatcttggatcatggttgcctttaaacgctggaaggcaatatctgcatcctggttctatcgaaaattttccttcttgatcaattgtgtcaatggtagggcaatgctgccatagtgctcgacaaatcttctatagtacccggtgagtcccaaaaaaccctctgagttctttcagggaacaagccattttcccatggcttcaatctttgttggatcggctgccactccttccttggacacaatatgtcccaaatattcaatccgtgacactctgaactggcacttgttgctgttggccacaaactgattttctatcaaaatttccatcaccatcgctagatgctgcacataagctgctacagtcttgctgtagatgagaatgttgtcaaagaagactgatacaaactttcagagatgacaaggaattcataatgcccttcacgagtttggaatgtcgtcttatgcacatctgttggcttcaccctaatccgatgatatcttgatttcaagtcaattttagtaaacaaagtagcaccatataattcatctaatagctcatctactacgggtataggatacttatctgggactctgacattatttaatgctcggtagtccatgcaaaatctccagcttccatcatttttcttgtctaacaacgctgggctggaaaaagaactccgacttggctgtatgatacccgccattaaaatctctttcacaagtttctcaatctcatatttttgtcattggggatactgatatggcctaacattgactgcgttgactccttgctctaattctatggcatgatcattacttctcttgggaggtaattcctccaagggaaagaatatctccttatactcctccaacaatctctaaacttctctatgcgcacccctgactttcggttccccctcagtcattttcccttcggcagccattggtttcacagtgcttacctcaatccatagtctgcggtcacctgtttccatagttttcatcattgctcttaacgtggtctgctttgtggccaaacttcgatctccttgtaatcacaccacccaatccccaagcataaattccaatactgacgtgcggtattccactgtgaccttcccaacgtctccaaccataacacctccaatatcacgtcggcacttccaagacgcagaggctgaaaatcttaggtaattatcaaatcagtaatagtgaggaccactcttttgcaaattccggcggctgaatggatccttctgctctaaggatcaccccataatcttccgtgtttgacgttggcaatttaagcgaggccacccattctttgtcaataaagttgtgggtcgctcctccatctatcaacaccaccaccctaatcagccccttgaccttcacggtatgtggggagcttaatcctgccatcaagttcaaggacaaatgggccacttctttgtcatcccttacctccatgacaccatcgtcattttggtttgtccctccttcagcatcgtcttcctcttccgaagaagacatgttctccctgtcttgtacaaacatgaattgtaattctttcttctttcttacctgtggccgaagctgaatctcccatcacacttgaagcaaatacctttctctttcttgctttgcatctcctttgtcagtctccggtatggctgacctccagggttccgaatgtcattatcgcaagctgtcatgattgttgtcgcaaaacttcccgtgtttcccaatttgagattagggttaaacgtaaacagtagtaatatttttcatacctcgtcccacatacacaccctatataacgactcacagcaggccttgctaacaaccagcattcctatgggtccacctacaacaacctcatattaccctaccaccctttacataatattgccgttctttcttgcatttcttgtaacataaaccttagtgatcggggcctatcagtgagctacctaggtttcattatggttggaacttggtcaagaatattgatattacagaagggtctcacgtttggagaatgcttctctattttattgcatttactattgttattatttatttgacgggtgatagaacactgatatagtgtttctattttattgataccttcaacagaattacaatataaaagcagtgaaagaaaagtaaaagaaccctaaccctctgcccttcctctctttcaaggaatgttgcagccctaattcttcaccaaattcttcatacccttcttccctcctcaatttcctatttataaccaactaactaccaaaaaatctaattacccttttgcccttaccctatactaatctaggtatctaacaacggtttacaatggagcaatcattctttttaacttaggaactatctggcgttctactaacttggtttgatgtagatgggatttgtttatattgcattcatactcttgcaatcactgagtggcaccagaggtggagtgctagggcagcttttatctcaccgaggaatttgctaatgataataagattgcataattaattctcatggttccataaattttactatttttttcatgttaaaattcaagctttctgtgtctttttcttgtttgtgaagtaatattcagaagaataagagtaggtagtgcttggtaacataattagtggcttgtttaaggccttgactctacttttatgtttcatttatcaatgaaacttgagaaatccaaatttaatattttaggaaacacatatgttgattaactaagaggtattgaagttgattttttcttttcttttaactatcaatagatgtcatttgcctactattttactctgtttatatcttcatccatcgtttcattaattgttttttcatacggttgggtcaactcatgaacagattggagcgtacaagcaactgttagttggatcctt

SEQ ID NO: 7762 - DNA, 968 bp, Cucumis sativus
  Intron number 9 from transcript Cucsa.136010.1 (locus Cucs a.136010) derived from phytozome v7.0 (chr-ID scaffold0104 4; pos 773805 to 774772)
attgagcgcatcgactcttctatccagaggtatgatgcttggaattggatgagaaaacagacataaatatgttgtatgtcatcatgataatatgcatcccgacttttcttatacatgagtgcttgtgcttgtcctttcaatttggattttcttttaataaaagaaatcatcttattttgtagagctttgtggcaataaccgttttctaaattgccatatgcatcacaactatggctgaactgactttgatacctaggttttgagcataattctgtgtatgtttatagttgggagtagcgattttagaaaaagagatttgttacagttgatttctaaacaatcaaatttatgtttggtaacaaactcttaaaattaaatttcaatcattacgtttataccaaatcaaattactaaatgtgtattttatatgtgaaagttttatctttttaaaaaagaattataataaatatctaattttattactttactttctattcattttattgttggactagtatatgagattgatattgaggtaaaagaatgcacatattaaagataaaagaaaattcaaaacatacatctcattcagtctaaacatttttatatcattacaaaatactttaactatatgtattatctattgaagcacaaacttgtataacaaaagtattaaatagaaggaaagtgtggtggcgtgtggaatggctgaggtatgagatggattggagaggttggagaaggcaaatgtgaaattaggttaaaagtttccttattaaatagaagggtcttttgggcatttaaaaaattaatataaaataaggtgatgatttctgactattcacttttccaccgtaactagagagatggttttaaaaatcaattttgagtgatttcttgttagtgacaatcactaccaaacacacccgcattattctttttccttttcctctgttgatcacaggatc

SEQ ID NO: 7763 - DNA, 5885 bp, Cucumis sativus
  Intron number 2 from transcript Cucsa.069500.1 (locus Cucs a.069500) derived from phytozome v7.0 (chr-ID scaffold0071 4; pos 281559 to 287443 reverse strand)
actattctcaaattgcatacgactcttggaaatcggtcagtctctctctctctctctcatagcgtagaaatattcgtgcagttctcttcgtgattcttttcaaaattattatactcgattttaaatatcggcgaatagatcgttaaggtttaattgtagtatataatttcgagtagacgatatttttattcgtgaatcgccgtttgattcttcacaacagacattttgctttgttgagtctgcatcgttatctcttcttgatcattcatatttctagaacttttaatttcattttctattttctcttgtgctacattttttccacttctgattttcatttcaacctttacgactgatttctacttccctgttcttgtttacgtcgttatttgcccgacgatcattatattcattcttttggaatattcggactttttttataaatttatttgatacctttccttctttttgagatcttcatttgaagctaattcactgacctctgctttgttgttcttgtcaacatcgttctcgtccttttttttatcattatcatcagtttttttttttggcacattcgatttatttatttatttttgtaattttctttccatttgagattttatgatatgattacaaaaaattctaaaacattatcatgcattcgatttatagatcaatgtattcattcgtaatttctcatagtctccgtatgaagtttgacgaatttcatctgagaataataagatggaattcatatgaatgaatttcctctaaaagaaagaaaatcaaagaaaatttgatggagattccaaactaaaaaacgaaaaaggtaataaaaaaataccaaaaagaaatgctactataaaaatgtataggtagattaaattgaaagtgtgtaataaaattatacattaatttttatagattagtatctctacttaacaattgagttctcttaattcttttttcttttaaaaaaaccgaaattgataattaaaaaacttttaactttacaaattgcctactgtgctatagtttgttgattctatttttttctttgttttcaaattcttccgtaagtcttaaaacgagtcttatttttaactttgttctattaacattccttatataaatttaaaaatatatatttctagtttttcttcaatgaaaaacagtattgttattagtttacagagttcacaacttttcttcaacactatactaattggcttatcttaagatttattagtacaaattaaatttgatgttaaagttggaaataaaatggtattttatttatgtttaaataatagcgtaattagtttgtagattttcttaagtttcgtttttttttttttttctaaaatttcaaaattttcaatagaatttaatttttacttctgcaaaaaacttccaattgttgtgcaatagatttctagaaaatagttgatctaactgtcttttttttcgtttaacttttaattttcgactttgtgttttaatagatttgtaattttattttttaagaaatcaaaattgaatgaataaatttgaaaatttataagtttaggggtagaatttgtaacttaatatctaagttaaattacaaaaaaaataaaataaaaatcaacctaactttaagggttgaaatttgtaatttaatatatttttctttttcaaaagctttttgcttcagtttttttttgtgaattaattagtgtcatcttttcagactttcgtaataaaagtctgacattattgataatgataatagaaattactttattaaaaaggacagaaacacgtgtaacacattttgcatgtaatgccattgattttgggctcacgggccttaaagcttgaaagaagacatcactttcatgttctttccacttccgtgtcccaccatactcctttaacaaacatctcattaaataacacttccaagaaattattttttagttctaagttttaatgaatgccaaataaacatttttagtccttcggtttataaaatagataaatttagtcccttgtatgtatttagtttttcaaattttaaaaataggtttggaagaagtttttttttctttctttttttaatgttttaaaaacaattatattaattttaaattttgaaaaaaatagttttagaaatgttaagaattttagaaattatttctctaatttaaattataataaaattatctaaataaaagtatgaatctattttgaaaacttaataacgagatagtcttttagattagaaagataattttttctattaaaaaaattagatttatttgtaagcattatgttctttttttaatttttcaatactaaatatgtttttcctctacatttcagtccttttttagaaaattgcatgagatgaccaaaacatttagaagaataaaaaacaattaataacaccaattttttacatattacaaatataataaaattagtgatatcagacggtaatcataaattatcatagaactatcaaacgataatcacacagttatcaaaagggttatcactcttaaatttgttatttttacaaatttagaaaatgttatgagataaagctctattatcataattttttctttttgcaaatagcaaaaatccctaatttttatctttcttatgtacaatacaataattggattgttagccaaattttaaaaataaaaacaacttttttattttttgttgttgtttagttttcaaatttggtttaacttcttaaagtatcaatataaagtgacaaataaaagtagtatcaacaaacttaattttttatatataataaaaacaaaatagttacagaacacatctcaatttttaatatttatgggagagagccatgagtttctcactttccctcttattgattcctattggtatttttggtattgttttcaattgtccacacgtgtggccatttagttgctagctcattcatggatgccagctagttaaagagtattgggatatttgaattaattagttttgttagcttagtgaatgatctaccattccaaacttggaggttgtttgtcgaggagatagctcacttcacgttggagtccaaacttggataattctaaaattaagttttcctaatctttctctctctcagtcgaccaacaatcattttcctttaacttatcattgttactcactccttccatatctttctccattccttttcgtcattatttctcactccttccagaacccttctctactccttttcatgattgttcctcactcccaatttcccactctgccattcccatctccttttccctctttcccttctccaaattccttctctgaaacccttctctgttttattttctttataacttttgagttctgtaatccatttttttaaaataattatttttgtatttataatttaaaagtccaactttaacatttatataatttgtcctttctttttttattatgaacatcattcacaattcacaaagtacatgtttgaaaataatttattttaagatggttaaaattagttagtattgtgcccaccttatgtagacacacactcacattaaatcaatttcagtgcttgatttagtggtaaaccactgttctaattccctttgaactcatgttcaagttccactctgacatatcttttaaccacacaaaattaatgtttaatgtttaattttcttgtttgactatagacatcatgattaaatgcatatttaagaatcacttcaaaattgttaaaatcgctttcatttcgtataaattcattttgtacctattttaaatcatacagaattaatgttttaattttatacctttaaatatagtatttatattatcgaatttgaatatgaaggattaaaaacatattttatattgattttaacgttgaagtgattttttggttgatgttatgataagtttaactagatataaccaactagctctgtgttagttagaaaatgttttttgaggatgtttataattttatttttcatattttgtttgttcttagactttttacattgaaagacccggttaatttatcagatagatttaagagtaattataacgtataacaattctaaagagtatactaatttttttttaattgcaaatatagcaaaacgtatcaaatataattcaattgctgataaatctgtatggtttattagtgattgatcaacattttatcactacaaattttgctatattcgcaatattattatatatgtcaatacttgcaatgtaactattatatttatttttagatttaaaaaataatataattacaaatatagtaaaataaattaaaatattaatgatgttgatagacatctaagtttatcatatatatatatataatctaaaatcttgctctatttttattttcaacaactttgtcgtttagcataattttttgaaaagctatttctaaaagtagagcttttttaggtgaatgattgtttattgtatttattttacctatagtatattacactgtaacaaatgtgaggttggaacagtggtagtgtgttaacccttctctcgcaccctattttgggttcaactttgactaaaaattttagctgaagtggggtgtgaaaaatgtcataataccactactattttgtgctgctttctttttaaagttctacaatttgaacccagtaacttaaaatttttatttcaacataggtattattagtggtaattggtaacttcttctaccactgctataaatttaccttgaaagtataaattaccgttaagtaattagaacacccaaaaattagataatcacactcctcaaaagttacactaaaatatgactattagaatcaaaacattattataacaatattttaaaaacttgcaaatatagacaaatccgtccattaatgaaagaatttttttcttcaattcgtttgaaaaataatatagtagtgtagaaaaatattgtgagaagagtttcaactctcgagaaaagtagtgtgtatggataacacctatgatttaatgcaatgatctcatttgaaaagaaaaatctttcaaaatgtttgcttttatttaagatgctcattttgtttcttttctcccctattttggtcccttgtatttttaaaccttcatttttagaatttatgattataataattaatagacaaactttttattggtagtagtaaccataaacaaacaaaatctatctaacattataataattataattgtcttttatttactcaatctaaaataaatttatatttcctattaactgatggggatgaaacttaaatggatagatattgaaaatgatatttttgtagttttctataattgcctctttaaaatgaaatgaactttctatattatatcgtttttccttccaatgaaatatttaccctaaattcaaaatcagacaaatgaatcattttattagaattatcaaaggtgaatgcatctggggaacttagaacgttttgggtgtacctcaatcgttttcaaaatctctgtttttctattttaatgattattatcctctttaaggatccttttgcccttagtaaattgtgtgcattttggtgtaggttattattatttattatttattattcattatttttagaaatattgttttaaatcatgaaactatggaaaatatttactagattacgacaagctattatttggatctattattcaaatgctatttgtgaataatttagtccattttgtttaaaaacatatcttactattatttatcatctttttaaaacaattatttttgccttaatttgtgtgtttgggctgtaggtggtcattaattgcaggacatttacccggacgaa

SEQ ID NO: 7764 - DNA, 3101 bp, Cucumis sativus
  Intron number 2 from transcript Cucsa.334370.1 (locus Cucs a.334370) derived from phytozome v7.0 (chr-ID scaffold0330 6; pos 430043 to 433143)
catatccacaaggctgtgagttaccatttaaactgctatcttggcacacagttgtttacaggatttttacattctcaagtatactgcgcatgttgaatttttaaacggactctttatccctaaagcattttctttgcacacctgagaattgggattgctcatttccgggagttctgtaattttctgataggtttcattcttttatattggagtcttttcgtgcttaattagggtttggattcccttcgaggggcaggatacttttatgttcttgtgttttcattcttctcgaactaagctttggttttcatttttttgacccaaatgctaattgaaagatatccaattcttttgatgacaagacaatgttcatgaaggaaaaaaaatggaggagtacaagggataaaaagattgtatttacaaaagggactatgattagattgaagtttacacctggagacaaaactttaacttttagccttgaaactcacacctcctttcagccacaagatgctttatcccttgtaaaaaacacaatgaggctttaagtcttcatgtctcgtgtaatgattagaagaataatgttaccacggtttgaaaatatgatgaatgtatttgtagcattttttattagttttccttaccaggcatgcaggtgtattagcgttagtttgacttccaacagctttttgcctcgaacaatcttctttttcaactgtgatctctatttatcaagagggtttagagagtgactggctttgaactagttcaatactcgttaaatgtagatgggatgggaggtctatcttggagaatagatttatcgtgttgtttgttaagagttggatacaaaattcaagaacattgtcacgagtgaagcccaacgttaactccaacaaatatgctaaagttacattaagttatagaacaaggtctcatcccttgaataaaagaaattagtatcatttgcgtaatggtcttgtcatcaattgtagaaattggagatgtatctgggagatgggttgttgtgttgtattcattgttggagggtggtggaagatttgtgttaggcctccaatcattcatacgcaccaaagaaagggtaaataggaataagaaaagaatgttagttcatgaaattagagagctggggaccatctgtgttgggtttatgggaggggtttggaaaattattttgggtgtgaatattttggaactcttgatgcttatgggagagaagaggcagctctcaaattctgctgttcttcttgtatctttacttctttattcttaacttgtgttgtgttcttaactcactggagtgtggagactatattgtatcatctggatacttctttccaatctaatatcaacatcagatcagtttgtctctgttattgtccttgttgggtatttttttagtgcagggaactaaatacctaaccatttggataatttattatggaattattgtttagctaagttagtgtggaactactttttggaggatctgaaactttagtatttaagtagcctgtcaaaaagcttttaatgatgttatggaggagttattcctccatctgtcgtttgagagaatttttttatggaaatttcgggggtgtgtgccttgttattggtatttggggtgagagaaataacgtggttttttaggaggattgagcgagttcttggatgtttggacccttgtggaattcatgtttctctttaagcttcagtaacaaattcctcttgtaattatacacagtgatttattttgctagattgaagctcccttttatcgagtgctctcatttgtgggcttgggttttttatatgctcttgtattctttacttttttttctcaatggaagttggcttctatttaaaaaagaaaaaggagaggaagaattatgcgagggaaaaggaattttaaaattttagtaagtctaaattttttattctttagtgctatagtctctttgtgtcagggcagaagaatgcttcattcgtagtcccctatcatacctgctctgaaaaatctactgaacacttgaacccaatccttttctatgaaatcctcactgttcagggaaaaaagaaaaaaaaacattaattatctggcttaccttcgtttgtctcaactaaactcagcatttctaatttcctattgggtaaaatgttgttcaagtaactcccaattttctccaattgccgggtgaaaatacaaaccaacaacaaatattctagagatgcatacccgagccagaaggtgaatttgttttagatttccttaatggtagaagaatctatattaaaaaggattctagtttgtcaaggtcactcaaaacttttgtaaattgaccactcaaatttctaacttttagttagttttatgtatttttattttgattggaactccctctttgtcgcctttccaaattagttaatggtccaaaagtccagcaaacattcaagtgcctttaaaatcacaagtttgtgggttgagagagccattggtgataggtttcaccccttgcttgataacttatccttaaggttgtgcaaaagggatttgctacagttatattttatccctttctgctgagggttgggttgggggggcctgatgaaggtagtgtcatgccactctattagcattgatattattaaaagcagatgtttttcgcgtctttacagtttggaagtttatttatcttcaagagttccaaatattttcattttttatttatctggctattatcaaggaaagctctcaagggataagaccaatccttgcctagtttgaaatctcaaataccttttataattatgctttttctacaaaaaataaataaaaagtcatgcttgttatctaactttagttaaaaccaattgaagtatctttgttaacttccaagcctactttgggaggataataacttgttttatgcatttacctttcaataatggaattcagtttcttatgggatcaaaaggaaatatatcatttgatagatgtaattttttgtttgggatgggaaattataatactacaattgtacgatagttaattttgatgatctttcttactttaacagttg

SEQ ID NO: 7765 - DNA, 7878 bp, Cucumis sativus
  Intron number 1 from transcript Cucsa.277230.1 (locus Cucs a.277230) derived from phytozome v7.0 (chr-ID scaffold0260 1; pos 230205 to 238082)
aagtggagtcttcttccgttaggatagtcacccaggtacatctcagagttcaatctgaattggagcgcttttatttcctcagcataattatggattgatgttgaatggtcttcttgctcggttttgttttgtcccttaacagatttaatagtttttgtttaataagtggatgccataaatcaacatctaacccttttatgatccgttaaatgtgtatattgtttgttctttttgtaaaacgaacctcacaaggagaaatgaaaaaaatgaacaagaacaaagcccgtacaattgagccaaagactttgcaggatagagcttcaattgttgccatttttttttgtttggtatgaaataattttattaatgttgtgaaatttacaaaaaaaaagaaaaagaaaaaaagaggagaatcttcttagagatgacaagaggtttccaatttgtttaaagggaagcataggtataagacttaaaggaagttggcactgtacaccaggatatagcaagataaattacctgatcataagacctattgcaagcatgtttcttatagtagacagaattcttttatttcttttcatctaaaaggtcccaaaagaaagacataaaaatgtgcaaccacaacaatgcctcatccttctttagaaggtggccagagaggatggtgaagcgaagggtcttcatgtcaatagggagggtcatccctcttgacgatcttcaaccttttactccaatttttctggtttggagattaatatggcgaagtgccaactcttggggtaaattgtcatttgaacacaacttggggtaaattatcatttgaacaaggtgggtaggtgcgttgatatggttggatgtgaggtggggtccttcctttatcttgtcttggtcttcccgctggtcatagcttaaaatgtctaaagtcttgggatcctgtggtgagtaagagtaagatttgaaagaagttggcactttggaagggggtttttgtctcttgaaaagaggcaggatcctgatctagtatttctatgttttgagttggattccaacctacttcctatctctcttcaggatttggtgtcagtttgtaaactttagagaagatcaggagtgatttccttcaaaatgatggtggaggagaggaaaggggcacacttaataaatttgtgctgtcctcttttgagttgatcctttatctctctttcttttcctaattataagtgaagtccttgtgcttttgtttctcgaattcatgagaatggagtttttgaaggtctcatggtggaaaaagataaaattcacgtctcaatttcgcaagaaacaactcttgtggttggatgatccacttttattctgcaagtataatgaagctatgttggatattctgatccaaactattaggttctttgaatggtgctccggactcaaggtaaaggaacaaatcattcttctgtggtgttaatgttgatgataaatttatgctttctaccttctccatctccaagctgaaatgtaaagctgaaaagctactgtttttgtatttgggtttcactttcggtgagatatccaaagcaactatctttttcgtggctaattatagataaagtttataaaaagctagacagatggggtgggggcagtatattcgcaggaggttgattaactttgagtaatgcagttttggcaaatttacctgcccattatatgccaatgttcctaatgcccagtttggtgatctcagaaatggaaagaactatttgctcattcttatgggaagtttaaaaagggagtaaactggaacatcttgtgaattaggattccacttcaaagtctttacagggtggaggtatcgacttgggaaacttggaaaacaggaacttggctttattaaacatatggagttggagatttattaggaaacctgatgcactttggtgcaaagtaataaagagcattcatggtgttacttgttagcacctttcagtgacatacattaggaaagtatggtttgagtttgagaagcccatgttttaggatttcaagatttggagtaaattctactatctagttaggaaatggggggaatatttacttgttgcttgatgttcggagtcttgattcttcattcgaactgcatttccctcaactatttgatatagcttcattcccaaatggtaatatatttgataattgagatttagaaacttgttcaagtaactttcttttccaaagcaactaaatgataaagaaattttaaaatttacaacagttgaggaggagcaatttggctgacaagcattaatctcaatcacctcttttctattctgggtgatgaccattggattcttcaaggaaatttactgttaagtgctaactcctcatccaaccacttgattacctcgtcccctttaagaaaaggagattgattaggctttgtggaaatctaagagccctgagcttattaatattttggtgtgaataattatttttggaatcctgaattgttctactactttgcaacataagcttcaggtgcactaacttttgccttctatttgtacattatgtatggtgaactgtgaagatttacaacaaatcttggttggccccatattatcttcaatgtcaaatattactgttcaatatagtcaaggggacccactctcccctttcttatttcttctggtaagtgaagttttgagttctttgattgcaagactacacgaaaaggggctgtattaaggattttgggttggaaaagaaaaggtgtatgtctctattctccaattcgctgatgacaccttaattttctgcaagtttgatgatgaaaatgcttgataatcttgtgcaccagaaaataaattgggaaagatttgctgtacgtggcattaatgttgatgatgggaaacttctctcagtggcagcaaggctaaattgtaaggtggagcaccttccacttgtgtatctaggcctacccttgggtggctgtctgaaggaggtggagttttggcaaccggttattgataaattacaacgcaagctggacaagtggagaagatacaatctttctcgaggaggaagagctaccctttgcaaatcagttctctctaaccttcctatttattacatgtcttcctccaggtaaggttttatcaaagatagaacaagttctgaggaacttctttaaggaagggaacaaaggtggaaaaattaatcatctctctttggcttctccgcttgacatggctctaaagaaggctttttggaggacgagaagtcctagacgagttaatattctggtatggattataatagttggtcacttaaattgctcctcggtcttacaaagaaagtatccttcccattgtgtgtcttcaagtatttgcgcactgtgcaaaggagaagagaaagacattcagcacatcctctttgagtgcggttatgctcaaaactgttggtttgcattattttaaattttttggcatcagctgggtttttggaaaaacagccgcgagcaatgtttttcagattttggtggggccaaagcttaaaaagaatcaataaatcctgtggattaatgggatgaaagctgtgttgacttattgtggtttgaaagaaaccagagggtcttccatgataaggaaactccttggttactagatttgaagcagctcgattgaacgcatccctttggacctctctctccgaggcttttgctgattattcaagtcaagatattagtttaaactgaagtgttctcgtttccatgaatcgcggatgataccttagtttgcttggtttttcagttttaagaaaacttaaaggttgaagaagtgaaaacttgaaggttgaagaagtgagtgagtttcagattattaaggggctttagtcacacaggaaagaaagggttgtaatcaaccaaagttagtggttgttggctcctattggaaatttttgagttaattcattcctccgagttaaagctgtaataattctatggtattacagaagtcttagtcgaaaatcgttaatctaatttggaaaatggcttttggtcactgcttgtcttcttcaatctgcacttttgctttgctgctagtgactcttcacacaacctagttttgattgcttattgtcaacttgtttgcatcgttttcagaattttgtgtttgggaagatcctagagatttattttcgagcaagcttctcagcgtaagacctcgatggagtcgtcaacttttagcctcctcgtggtgttccttctccaaggatctcgagtttgtctcagtgcgagttgatggatgtttagtctgatatagtcttttagtccttttatttgtatttgtatttctttgtacttcttttggttttgctttgcctttggacattactcatttgttttggtttttagcttgtttggatatgacgagggtgttatggggtgtcaaccaggttgagatgtccaggtgcacctcatgatccatggttgcatgctcattgtataattctcttgtactatgagctttcgtctcattattattatattaataaagaggctgtctccttttcaaaaataaaatttgttgacagtagttgtagataagatggctcttcctctactacaattcatagtcttgttttgttatttttattattcctggcaatgattgtaaatttttagtctttatcaattttttttttgaaacagagacaagcttttttattaataagaactcagagtacaagagaattatacaatgagtaataaagaagtctaaattagggaacttgggggatcaggaggcgcactcagacatctcaactaggttgacacctccttagcgccaatcatcatattctgagaatacaaaaacaaaactttctaaaattaattaatgtccaatgtaatacaaaggggccaacaggcaataaaaaactagaagaaaatctaacacccgataaggccaaaaacataaaaacataaaaacataaaagttctaaggctaaaaatgaagaaatccaccaagacttcaaaacacagaaaaaggcctacggtaagaactaagaatctttccaagttatttgtaagattctttttgtaggtaatgacgatgctaagagggtgttaacctagttgagatgtctgggttgtatctttatgcttgttgtttcctttgtactttgagcattagtctcatatcattatcttaatgaagaggctcgtttcttgttctaaaagaagttataagccaatactgagcaaaagcaaatacaaagatagtcattagaaaaagcaagcagtactggagctaaaatatgacaaatatcaaagggagctgtccaccgaacatgaagggcaaagcatcaacttggagggaagataaaagcttgccaattcaatagtctcttgcaaagagtagtcctggaaggttttggataaagagcaccacggtgttgcataagaaaccttagatttatcagtgaggagaaaacccacgtgagatgggatgatcatcaataaaggtcacataccatcgtttttctggagaggttataatactctaggtacgccaaacatcactacgaataagagtgaagggttgagaaggtttataaggttggggcagaaaggtgactctatgctgttttgcatgatcacaagatagagaagagatataaactttattaaataaatgaggaaataaatattttatgtattgaaaagttgggtgatcaaggtgaaaatgccataacataccatatttttctgaagttggaaattgagaagacaacaaactagtcccataacaattcctagagggagcattattgtcaaggagatagagtctcttattgagacgagcggtgccaatcgtcttccccaagctcaagccctgaaagaaaacattgtagggttagaaggaaaattaacaatttaggtcacttgttattttactaacagatagtcaattgtaagatattttgggtacatgcaacacgttttgtaaagttaaaccatcaaagggagaaatatgacccttgcttgcaataggagcacaggacccatctgccatttgaatcttttcattaccagcactcgaggaataagatagaaaattataataggatctagtcaaatgataagtgtccactgaatcaggtatctatggcttcttaccatttatgcttaggaaacttaaggatttagaggtatctgattgaacaatggccctaaaggaagagacaccgtggttactttgacaattcacccgagattgtggttggggggcactcgccaattctcttaacagcttgactagggctgggcttgtcatttgaagggcgtcttttgccatttgatggtcaatcgtgtaacttctagcactattctttcgtatgctagggtttcttgccaagttcacacaccggggtttgtttcccattttgtttcattgtaagaacccgataattttgcattgaaagaagcaaaatcaggaggagataccatcatgatgttcatagcactgactttgtcttcctctagatccaccttaggacacttctataagagaacgtataggcttttgtcccaatatacggcctcgcactacatcgaacttggagttcaaatcagctaagaaatcataaacacgatcaacttcctcaagcttggaatattggacactttcgcacggacaatcctagatataatttcacgacacatatccatctttgaccaaattaggggcaatttgttaaagtatgaagtgacatctatcgtcccctgtttgcacttatgagcatgtttacgcaaagtgtaaagatgagatgcgttctttcttttataatatatttttgaactgcatcccagatatcttgagcagttgcaacatacaatggtttccctatttgaggttccacattattgcttaattagctgtgatcgaaggagggagttttcccctttccaaatatgctctctctggtctgggtcttggtatctaatcggtggacactcaaacttgtgacgtccctcaaggaccatcggtaaattgaaaggaatgcctgaattcattgttctagaatttaggtttgtggaagcacctagggctgcccaaagagcagagatttgctgaaaatttgtctgaagattagctaattgttgttgtaacattatcggggacaaaccattgaaccttgatgttcataactaggcaacacatgatgagcaagactcgattgttgctagaagtttgttgccgtgacatggaatttacctttgtgctaggcagacgactcactaatctcagtttcatggtgtatgtttcggctagggttttcgtcaaaagtttatggtggcaccataaatgaacggatatgcaagaactgaagataacaatcaataacgacttggacaacagtgacggcaggctgcagtggaaaagttggcgacgctggctatgattctgtcgacgttggccgttgtggcagttgtggcttggacaagactggtgcagagctcaggtgatcttgcaccggatagttttcgccaatggcggttaggtttcgtcacctctctatgataccatgttaaatggtagagaagagaacccaaagtttacgtggaaaaccctagaacagggagaaagaggcacgacagagagtctagtcctaatataaaaaaggaaatgaaagtatagttacagtttggactgtgttttctgttctgttcttacaatcaataatcttgttcattattatttttctatttctattgatttataatcctaaattttttaaaaaagaatttcaatgcacaagttgcttctgtaagacaaaaatgcaatttaatgaattttaatatcctaatatagg

SEQ ID NO: 7766 - DNA, 5620 bp, Cucumis sativus
  Intron number 15 from transcript Cucsa.112100.1 (locus Cuc sa.112100) derived from phytozome v7.0 (chr-ID scaffold009 53; pos 788669 to 794288 reverse strand)
aggggtgcaacaactattattgaggacctaaagtaagtatgcttgcagttaaatggtcaaatgcatcttttccttctctgcaagggaagctcctttttgtatgcgtgtgtttttggttttgtttttctttaaacaagttcattaaagaaatgtgtagaaattgaaggaataggagtatgtatctccttttttctcttattgaatatgagcaaattaggtcttcttatgtaggagaaagactcttttacaagaatggaaaaaataaaaacaacaatttgtcaaattggtttgaagatgtcttccatagccagcttgtcaataaatctgtcaaattgtttctttggaagacctttaatcaacacatcggcaatttggtctaatgtaggaagataaggaatgcatattgttcctgctccacttttctctttaatgaagtgcttattaagctcgttatgttttgttctataatgtagaattggattatgtccaagactttagaccaatcagttcaaacacattaacatataagcttgctgctaaggtgctagctgaacgcctcaaaagaatcatgcctagtgtaattgcccccacacaaagcacatttattgaaggaaggcaaatcttgaatccgatccttatagcaaatgaagttgtggaggaatgttgttctaataagaaaaaaagggtggattctaaagctggacttagaaaaggcctttgatagagtagattgggagttccttgagaaaattctcatagaaaaaaactttgacactagatggatgacatggatcatgggttgtatttctaatccaaatgttccaattttcattaacggcagaccaaggcatcaaggctacaagaggaattaggcaaggagacccacattcacccttcattttcttaataatcagcaaacttttaagtgccttgttaagtaggctttatgaaaaggaaagtttgaagggctaaaggtgggaaaaaacagcattcatgtctactgccttaatttcgctgatgatgcattcattttttgtaaatacgaagatggtatgctggaaattcttaggaagacaattgaattctttgagtggaactctgagcagaagattaattgggaagaatctgcacttttgtggtattaacattgaagaaaatgagctgctcgaagaggcatccaagttgaactgtaaagcgtcccatgttcctttctcttacctagggctccccctcggtggtcatcctaagcaagcttctttttggcagccagtaattgacaaaattcaatgaaaattggagaaatgaaaaagatacaacttatcaagagaaggtcgtgccactttatgtaagtcagttctttcccataccccaacgtattatatatcaatatttgcaatgtcagcaaaggtgtcccaatcagtggagcgtttattaagaaactttttttaggaaggacactcgagaggtaaattgaatcatctagttaaaggaaacatggtgacctaaatgcaagaggatggggggctttctttgggggctatgggaaacaaagatttagcaggaaagaggacatgatgaggaatctcaccattgaggacagagaggcattcgattaattagaaagcaagcagtggaaacaacattggcctaaatggggttaagaacatgcatctgaaatgatacagctcaggctgtttcaagtaggtgcctattctttctttcaacgactccattttgggattaagtgtcagcacaagaggattgatgaatgatgccatgatcacgtaagtaagaaccaagtacatgagagtaatattcaccagcattatagacatttaattgagttcgaatttcagcatgaaagcacgaaagtgagacaactctgaacgatttttcattaaatataaccaagttacacaagagtaattatcaacaaaagtaacaaaattttgtttttagttccccaagtaaccaaatttcccccaacgaaggaacaataaccagaggtagatcttctatctatagtactttctgtccaatctgcatcagtataaacttctatttggaagtgattattcttttttcatagaatacactttccaggagatcctttcaaatatctcaaaattctataggcagcttcaaaatgagtcagtccagaagcatgcataaactgactaatcatgctcacaacatatgcaacaggtgtctgatattgttccttagcctttatgttttcttcttttgttgctagtatccttagatcaagttaaaggcttagtacggtttgcgtagtccggttcaggtttagtcaaactggtctggttcagttttatgtgtttcttttaatgtcattgttttatttttaaacccatatctctcaattagatctttgttactgcctagaagttcttctttcattctttgtagattttgttatagatctctatacgaggttctatgtttttatcttagaagttcttggttccgttcttcgtgggtttttaattctagcccagatatgctaatttaattcagtcattttcttagcaaactcaagttgttcgtcgttctaccaccttgagtttgagggagggtgttgaaggaaaattagggtttatggattattagtatttccctttttgatattttccatttatgcattttcctttttgatattttccatttatgcatttattctctatgtgaaagatcattatgtactctgaattattatgatttattcaatatatcataggcaacatagttttcaataggatgattggtgtaacttctaacaccttttctctgagcaattggtagagttgaatcatcaattaaaggtgccatataagtaatatcctcttcagtggaatttagagataacgattcctgttctggtgattagcattcttggtcttgggaggcaacctctcttcttctcctataagcaataggtgtttggtttcatgatgcttcaggaatatgatggttaaactcatgagtaactagctcatttgtggtaggagacgagacttcagtggtgataggaaatagttggaatgatggagaaagattccacttccaatgtctcaatttttctcatattctccccctgaatttgggactttgggaagaaagattgatattcaaagaatgtgacatccatggtggtattcattttcctactggttggtgaaaaacatttgtaccacttgatattcaaagaatgtgacatccatgagatgcgtagcctagaaaaatgcacttgctagatttgggatcaagtttagaccggtgagaatgattatgaacaaaagcagaacatccaaacacgcagagaggtaacgtggaaaagaggttctgaatttgagggtgaaattggaggaagacatcttgaaggaatttaaaggaaagaacacaactaggcaaacaattgataagaaaggtggtagtgagaatagcctccctccaaaaatagtttggaatattatgagaaacatgagagaccttgctacctcaagaagatgacattttttcctttcggcaattccattttgttgagtagtgtccactcatgaactaatgtaaacaatgccatggaatgagagatacataccaagagaggaattgaaatagtctcaagtattgtctattcttaggacttggattttacaatcaaattaagtataaaccatagcatggaaagatggaaaatatcagatgttttagatttgtcctacattagaaaggtccaagtcattctagtcaaacttttatcaaaatgatcgttctctcaaatgaggagagacatattgtatttatagaggaatatgagtacatggtccaaactacccttctaactaactttctaactttcctcttttaaaaaacaagtaattctcttctagtataaataactctctttctattacaattaatactctttcttactcttgttacaccagtttattagccacgacaccaccaaatgatcatctgatctcaattttggatccttactatctggtgtcagggtatctccaattaaatggccatctttggctcgaccacaaataaacataaaaacggattgattccattgaaggaaattgtgaccttggagtttatggtttgtcagaatttgaggagaaggatcatgctgttgaggtgagtgttcagcgttacaacttcctaacctgtgttttgtcatgatcggatgaagaaaactacacactaaattaccttgcaaggcgggtcagatggaagagcaacaatacacaccccaataggatgatctggaaaacaaaccacaaaggaaaacaccgtgaaactgctgatctggaataaaacacaaataacgccaccgaactcatcgggaaaatgaatagagaggcagcaactgccaaagataaagcaaagacgaaaaacgaataaagatggtgtgaaccaaggataaaaacgcaactaaaaacagagtgaaccatgctggagagatgccctagcgtaggaagagatgacaccgaaagagacgtcaaaggaagactttgctggagaaggaaagacagcaccggaaattagggttaggccgttagggttttttttatacctatcctatggtttgtagcgccagagtcaatgacccatttcgaagtggaggaaagaagacatttaaagatgttaactgtctctgcgatggcagtaatggaagtagaagatgatgccgtcaatgactttcaatattgttgaaatctaacaaactccttggtagaaatggtaatggacttcacaagattatcagtattggaaacaacatgtgcagatgacaccctcagacccttattcaacaatttcctacagccacgttcgaatggccaggtttatagcaataatagcaaacatctcttgaatttgatcgttggttaatgggataacttttgaagttattagatccaccctttcttacctctataatcatttatgagcccaatcaaagcactaccagaattggatgacataattgcttgtggcttctctgtacgaagtatttgagtatagtcctcttctgacgatgagatacttgagctcaacaaaatctaatctttggccatctcatatttaggtgcaagaacggctaagaaactcgtgataaacaatttttgaagttgagcctttcattggccaacagaacagattgtgtgagtgagaggatacacccaggtaatcttgcatttcttcgaaagttcatgctgacaaccaccttagggcaggcctgtagggccattgaactcccaagtaggttcaattttgtctataatgtgaagaatttataatttcatttgtttgctttcacttcttgtttactcgtgtgaattgccgttttgattctgctattatctgcttcgctttggagtaaattgaaaagtttgcacataccactttctgttcctttaaattttatctcagtaacaaaatatttgtttctagatttgggtgattttcattccaaactaaagttataacttatatcatattatgctgtgctacaaaagtcaaacttatatcatattatcgtcactctcaccttagttgttgcccatcctcagctatccactgaacg

SEQ ID NO: 7767 - DNA, 2606 bp, Cucumis sativus
  Intron number 1 from transcript Cucsa.093980.1 (locus Cucs a.093980) derived from phytozome v7.0 (chr-ID scaffold0091 9; pos 206733 to 209338 reverse strand)
atcccactactgttaatcgccaggttggttggtttttttctttttctttttaatcaatttttttgatgtgttatggttcatgcctcaattctgggttagcctttgtttgggtagtttcttttggaatttttgaagttgttatattgagatttcgctatcttttttagaattgaagcttcgatgtttaccaatatcatatttgagttcaatttctctgtcgtggattgtttaacgacttggactggtcaatccttatgtgttatttgtttcaggactcgggaggaaagcaagcttatccatgcttatgaaatatatactagtaacgtagaggaaaaatagtcactgagttaaaaattcatgaagggatgttttgtttctgtttatgccttgttacttacagtattgtactttcatggccataccgaaagttgcgaatttttccttctgctttgctacacatgaatggctcatgtattgatatagtgtttcctggctttaaataatgtgaatcagatgaaagatggctattttaataagtatttacacatgagtatatgattaagaaatgttaagcacccgccccgtggggagaagagttgctttctttgacttgcgggtgtatgtgctattttgtgagttttgtaggttaggaggaatagtagggttttagaggtgtgggcagggatcctggtgaggtttggtcccctgtttgttattatgtttcattgtgggcttcgatttaaaaggttattttttgtaactattctgtaggagttattttgcgtagtctgtgtccctttttgttgtagggtgcttctttctttttgtgggttggtcttttattttccttttattatttcatttctcttttctcattgaaagtggttaatctcataaaaagagaaagaaagaaagaaagaaaatgttaagctcatataaagtaggatgttaggcagttgtaaacattcctcaaagatgcatgctcagagtatcaactatcgagtgaaataaaaactgttgatggttggtctccgttgccacactcgtgttacattgtgcttcttcaattggaagataagtttttattgaagaaatgaaattggcaaagtagtaacctcttaatttcaatagagggtactttgatcgtatattaactttcttattcatgtctcttttggttttaagatttaagggtagagcatttgatgatggagttttgaagaggttgagcatttagctgagaataatgttccttttttgactgagtggctgtagcatttttccttgaaacattttgagggctgtgaatttatctgagaagattgtttctattttgatcgattggctgtagtatttttccattgaactttttgggtgtggataatttaactaggaagaatgttttgttttttgactgagtggctacagcattttctttttggaattgatactgcttgaaatatacaattgcttttactaattaaaaaaaggagttcgttttttggaaccatcatgggttgttttctttgaaggagacggcctctttattgatatagtaataatgagacaaaagctcataatacaaaagaattacacaatgagcatgtaaccatggatcaaggggtgcacctgggcatttcaactagattgatggaaccatcattggttggtcttgtggtaaaaaagaagacatagtctcaataattaactaagagttcatcggttcaatccatggtagccacatatctaggaattaatttcctacgactactagactactagttttgttgaacacatgaatgttgtaggtttatgttgttatcccaaaaaagaaaaaataataaaataaaaaataaatgatttttttttagcaaggacatcattccaatggtcgaagatcctatgtgttttgaaaggcacttccctgaatctttagaaagctatttctcaatgtttgccttgttttatcatatatgtaattatcagttgtggatgtggctagtgctattttagtatagttgattgacatggtttccttggttgcgttttcatttgtttgttgggggtgggggtcaaatgtgaaattctaaagaaagttgagttcttcttgtggctccttttgcttgaaacagtaaacaccatatacaaccatgtactttttccaaaggtttcccattttaggtcttggtcagagacttgtagtgatgtgttcacatttactctaaagcatgcttttaatcatattcttttatgattggagatatgaaagtttccaagcttttgaatcagtgatttcaggggatacggacccatacttgattagcatcacaggttacgtactaatctcctttcagccaactaaggggaagaagaagtatttttcaaggattacaataaggctatttttttttttttttttgtttcttctcttttaaagaccattcttcagtttgagctacttatttatttcttattccaaaagatatatcatatatgatgtttagctccgagataacttgtcattgttttgcatttgaatcttttctgttcatcctcttccctaaatgcaagtaattgtgatcatattcttttggatttacagggaa

SEQ ID NO: 7768 - DNA, 635 bp, Cucumis sativus
  Intron number 1 from transcript Cucsa.100350.1 (locus Cucs a.100350) derived from phytozome v7.0 (chr-ID scaffold0092 6; pos 872105 to 872739)
ttttgcttgctcggatttcagtgagctttttttaggtatttcttttttttgtctttaatttttttttagtgatgttgtgtatttgtagcgtatggattcttttatatgtgttgtttggtattttaaatgtatttcctttttgggttttaattgaggaaatatgggtattgatttgaaaattgagctgaattttgggtttttgagtgggtatggaaaattgttacgaaatggggtttgtgggtttggtgtttagtgtttgaatgctgaggaaaatgaagagggtgatgggattttgagttttgtagttgtgactgtactgaggttactgagaaatgaaaatgtcgatattgtcaaatgatttgagattaggactggttgattcttttacttcaaagatcgagattctcaagactttgatttttaaattcctgttactgtagccagctgctaaaatatcaaatatgcatgaatttccagttcaagatcttgtgtttttattttccttccttctttttgattaccataatgagaattctccgttttattgactctgagattttacctttttttctgcgttgaaaaaaaaaaaaaactgtacaggaagtgtaggttttctcaagcttatattcccgtgg

SEQ ID NO: 7769 - DNA, 897 bp, Cucumis sativus
  Intron number 1 from transcript Cucsa.209360.1 (locus Cucs a.209360) derived from phytozome v7.0 (chr-ID scaffold0146 6; pos 95050 to 95946 reverse strand)
tttgcaaattagacctctctaataataaccttcaggtcatctctctctctctctcttacattttgccctaattaaattaaggatattattatggggtttttttaagaataataataataagaaaattacagactatatatttgcaaattattatatgcaagttgattttttgtttttttttaatgttttgctttcgatatgattttaaagaactatcatttttagatgactttgtgagtataattactatttacttatggtaatttagaaataaaataggtactttataaacagattatctacaaaatagatattcttatatattcccattattattattttttgtgtttgaaaacgaaattaaaaacatttatttagcaaaaccattaatgttgagcttttattttatttaagaaaaagaaaaagaaaaaaacttctattcttgttttttttctttttttcttttttgaaaaacagaactagttgtttttttattctattagagaatatattctaaatgttataaaagttaaggaaatatatactaaattatattccagaaaattgtcaaaaatagaactttttacaaaaatatttatactaatttgtgttattttgtagattttttatttcatttttgaaaaagaccctaatattttataataatatagtttttacccatacgctataaaaacaaataatttattcatttaaagcttaatttttttagaattgtttgtttacttagaacatttctatgtgtaaaacaacaatcaataaacacaccttatccctttgttgtatgtttaaccaaaagagtaattttgaataattgttgtaatttaattttgtatgtttacagagtattccagagtctcttattgcaagattgttaaa

SEQ ID NO: 7770 - DNA, 3441 bp, Cucumis sativus
  Intron number 1 from transcript Cucsa.165310.1 (locus Cucs a.165310) derived from phytozome v7.0 (chr-ID scaffold0115 3; pos 671592 to 675032 reverse strand)
ctgttcttgttgccgaagcttccaggaccctccgggtgagtaattccatggttttttctcttcatttcttttggatcttgtaattctgcttggattacttcattatctgcgtttttctgattttgggtttttttttttgttaattgtaactttctgttcgtttgacttgagttgtttggtttgagggaatttcgttggtctgagcttaatttttttgccttgttgagagatgggatttctgaactttggtgggttcttgtgaatatgattgtttgtttcgttttcgctattgaatgaattgtgctgatatgaatctgggctggtgttttctttcgttttttaatgttggtttttttgggattggacattgggagtgtcgtctccgctttttgtagcttattggtgacatgagaataattgcagcgttcaagtggaggtgtaattatggcaatttacttcttttaggtgaatgtgttcccgtcaatcaattatgtttaaggaaataaatcacaactaaaacaggacgttcaaacactcatgtcgtgttgcattatttaaaagttgtgctcatttctgctgggtttcatttgcatcacgggctaattctcatatttaattattctccagttataatggatcggtattatcttcatcctcctacatttactcttttatttgtttagtttatgcatttttatatctgcataaaattgtgttcattctaacaatgacatgaaatataaaacggtagtgaatactgtgatggcttagttagtagtacatagattttgagtctggttaagaggcaaattcggtggattagaactaatactgctgctgctcagttaggaatgtttgggaatttcagaccctgtcaatgtagggacaagtgattaaatgacatgttcaaacctctcattttttattccaatttctcatctttgcagcagggttcaccttcattaggctaaccatggctaatctgtaattgaatgcaaatgatttgcattacttatcctgtctttacccatctttctacaaagattgccgcttcacctcagttgaaattggctgagaattcatccagtcacaaccccaccgacctttctccttgtagtctgtctctgtattggaactgtttgaagaaggtaccctcattgccatcctctttttacaattttgataccttactattttagctaagccatagccactctaaactcctgcatttggagcctcaatcatttgaaaggcagcagaggaagtaggatattcccgctccacttcattagtaaatcagctagcctcaatagatggtaacaggtctgtaatagcatgaactttagattttattaaagttctctctaatttaaacttaacaaggatgatttctttggagatttatagtttattacttttgagaaggtagagcttttgaaggtctttttgttgggtacaaaacatagttggacagatattttagccgaaggtggaattatgagttcactcagaagtctagtatatcaatgctgttgaccagtcctcctgggatggttgtgttgtttgcctccatgcatccaaatgttggcagagagttattagaagtgttcaaccaaagatggatcttcaaatattcagttggaaaagtaaacacataaaagatgagctaacttagatcctcacttcaaaataccagaaaaaggatcagtgaaaatgtgtcaataccgggctacgtaacaaagaaaaaatttgggcgtcatgacttttgtttggagagccaatcttgaagcatttgggctggcaatgatgctgaatatacacactaattaacggtaagttatcagcaaattgaatggatgtggcaatacttggataccacatttctaactttcaaaaacaccctataagagactttcaaatttttggttttgtactatctcaacacagggacgtcggttgaggggttccttctccaacatccctttgtaaaaagggttgtcttctgtggtttgcagcagtgtgcgcaagtttatgggttgttttgggaagctgaagaacagtgtagaaagggatgtaatagtcggagccccgtttttggtgggcttggcttttgtatattcttgtatcattttttccataaaaattggtattactggaagccaatgaaattgtcctgctgtcaacaaccaatagaaaggaagaagattgttaattgaggttggagcctgaacttcaacaaagacaactgtgggtgcagccgcacacttgccaagttagtgacgaatatggtcgtttgacttcctcctgttattattgctttgatgcatcttatgcaggaacacaatgaaatcaagccaacaaggcaacaacccatataggtgcatcaaatttattttcaatgttctattggtgtaattagtgcaaagaataccaacatgagctcagcttaactggcacctatatgtacctgtggacaagaggttccgagttcaaatctctccactctgttttttacaataccttttcaaaaaaaaaagtgcaaagaatcctaattctaataaatcgaagatactaatcctaataaaccatggaaactaatcctaattctagtcaatcaaggaaactaatcctaatgctaacctacaaatttgaagggtttaaattccatccaacatcccaagatttgagcacaaaatgttgggtcggatcgtgtgggtcgagttcaatgggttgtgttgatatagcctaagtagtttcaaggaataaacctccaaggatcaatcatatgaatagtttattaaggtgataaattgtttcatacaagagggttacgctattattgactgagttgctcccaggttagcttcttggctatattgtggggagttcggatcgagagaaacggcaggatggttagagaggtggagttgtgtggtgaagtctagaaggtcatgagtctcatattggtttgcaatgaggcaatcataatttgtatggtgaggtttggaaggatgaggtttgtaactatgatcttcgattgattttgttgggtcgagatatctttttgttttggtttgggtccttgtatattctttcatttctcttgatgaaagaatatgtagttaattttttgtttttggccttgggcaggattttttttgttggttagattctttgttctgttgctttcttaaaggtgttagtaattcctggtggctcttggcttgacccttttggttggttaatttttttcttttctcccattgaaggatgtttccttgaactttcagtatcttttcatgtttaaatgaaaaattatctgtggtaaaaaaatttgcttattattaacaagccatcatctcatcagaatttaattctaacatcaaaagcttgatcaaaatgataggactatttggccgcacctgcaacaacagacctagc

SEQ ID NO: 7771 - DNA, 1369 bp, Cucumis sativus
  Intron number 2 from transcript Cucsa.283200.5 (locus Cucs a.283200) derived from phytozome v7.0 (chr-ID scaffold0265 3; pos 410969 to 412337 reverse strand)
ttgttagtaaactgctcttgacgctagtggaattgatgtgggaaatttattcctctagatggctgtttgaatagctacgagctttctttcaacaagtattactttccgtcttaaatgattggagtgattagagagtctttttgactttaaactttacatgtcagaggatgtttttattagaaatggaatgacgagagggatgtcaatgtcaataataaggctccttgtagggttgattccttatgtttggcaaaggggatagatctcacatgcttcaatgaaacgttttcttgttcactttacctaacggccctttttgtgttccttactttttgaccgaagtatgttggtctgacttggctgcatgctgtgatggaatttcccaatgggactacttaaaacttcattgcattagtggtggataaactattttcttggtagcttgtttaaggattggactttggatgtttttcaataggggatttaatgattgcatttttttcttatcatgcatgccaatgcttcagtacgtgtagtttagtatgcaatgaatgattgattcgttctcaaaaagattgttggtcacctcgttgatgtgcctgtgatttgcttcctattattttggtgtgcgttctttatatctattgttggtaggtcttggtctttcctccccatgtcattcaacagaatcattctttctatctctttcttctcttctgttctcgaggaatttatgttaaaaaattgtttcgctacattccttcatatcatttcaggaatattagcttgcccatggttagattaatgcctccttgattgaaatccacctcaacaacctttatcttattgccaacacaccattcctcagcttctccttcatcatctctctctctaactccattttttattttttaaatctatgtaaaaaagaaaacatatgaaatttacaaggagaggattgccatggagtttttccattaacatggtaaaaaaaagcctctgacaaataatctttattgtcagagattctttgttttccttctggctaaagattccaaaagaaagccctcaaaagcttttttgttcatccatttttacgtctttataatttgtgatactctgctcgttgtgtgttaattgaatgatgtttgctctattggttctcattctctgaatatgtatatgtttgctctattggttttcattgtctgagtatgttgcccatgtatcagttctgtgtaattttttttttttttgcccctctaaaagttagcttatagctcaggaattgttgtagtgtcttttatggatgccaatggtttgccatcatgttttgcagtaggaaaatttgaccttttcagtacaatct

SEQ ID NO: 7772 - DNA, 1063 bp, Cucumis sativus
  Intron number 21 from transcript Cucsa.271650.18 (locus Cu csa.271650) derived from phytozome v7.0 (chr-ID scaffold02 500; pos 477202 to 478264)
aatttttgaaggcgtttaaggttttacttgcactaattattttcttgtgcagtcttaaagatttggtagttgagctacatgtctattctttgctatttttaattctatattaaggtctccctatagttttcaccctgtacaatcgtcaatcatataccaattactctttcctttcttccctttctttcctttcctccttatggtcttcccctagccggtggtgttctagtttacacactcctagaatattggatgggggcgagcaattagaaatcttattgaaacattccaaagcaatcagagaagtgggagatgaattgaactacagaaagatcatgggggtgggcaattactgaacaatattctctataaaaagatgacaaagaggcttactgaacaaatagtgttgggttatctgttcatccattattgttgctttgtattttctggtctgttacctctaccaaacgtgctataaatttgttattattttaatccttcttttgggtgttatcgtgctgtactattgttagactgatttattgtcattgtgttatactgcctttcagatcacagtatttatttgcaatttatggagcaagcatgccacaacttaaattggggaagaagcatggagtttataaaatcactaaaagtggctttttaaattgccaatatttggttaaaattttagacaacagtaaaagtgtgttaaaatttttttgataataaaaaataattttgaaaaattctaaaagtagataaaagaagagttaaaatgcttttagaggaaccatttcactaattatcttgtgcaagtggttattcacttggtgcttcacttaaaacactttttttagcttaccgaaacaaacaattataacaatctgaggacaacacactgttaaaacttgaaaatttcatgagatttactttcacatactaagtgcttataacgtctgcttcatttttgtgttttctcgggcaacatatatttgttctcattttgtgagtgatgcagacatcatttatgtgctgcaggtggcaaattttgaatatattg

SEQ ID NO: 7773 - DNA, 467 bp, Cucumis sativus
  Intron number 7 from transcript Cucsa.232350.3 (locus Cucs a.232350) derived from phytozome v7.0 (chr-ID scaffold0198 9; pos 345816 to 346282 reverse strand)
ccttctcttgggctattgttgtgaggtatcaagtcaatggctgatttaaaaaaatctacaaatttgaattgattaaggaaataacttaacctaggaagcatgtgctgctatgcccaccaatagaagaaaaagaatgtaatttacgtactttcattgaactttaaatggatttattctctagattttaagtagtttaatgtgaactatcgatcacactttttacttagtcgtgaatagaaggctaatgtaaattaaatacctgttagtttgcctgctcgttttttaagtagcaccagttcagccaaaatctgcctgatgaacatgccatgccatatttctaactcaaatacaatacgactaaaatatttgttttgtggtccagtgattaatgccattggattcgaactgttcaacactgttaaacttttacttaatgtcgacttctttaaattacttgggagtatagg

SEQ ID NO: 7774 - DNA, 1640 bp, Cucumis sativus
  Intron number 5 from transcript Cucsa.060610.1 (locus Cucs a.060610) derived from phytozome v7.0 (chr-ID scaffold0063 5; pos 86983 to 88622 reverse strand)
agaaaggccttaaatatcctgcaggtaataatgtttttatttaactgttgttttctgactttggtggcaatgttcctgttagctagttcagaatatagtgatagattcactttatgagaattaataaatatggtagtgtaaatggtgagcacatcattccagtaatatgagacgtaggtacaacttgtaaccctatattaaagattaagatcgatattttgttacacaatcctgttaaagtggtttttcacctccaattttcacccttcctttgtttactagtaacggtagtgcttagtggactgtagatgcttatcatttcttgaaaattcggaggaagtgataaggacatccctagaataatgacttagcaacactagtagaaactagcacctcttaaacacgcaaactattactttaaaatttggttgaactgataaggacaactatagagaaatggcttagcaatcccaagaaaaactagcacctcttaaacacacaatctaagaactttctaacactcaaagaggaagcaagatgattatcgttgatgatctaatatcctactggaagaaggctagctccaatctaatgtcctattacctcacaaatttggtgaccaactaaacttgaattgttccatggctttttgtgcgagcaaaatactaagcaacaattggactcctgaaacacaccaggagaagagaactctcaactgaacattttcattcaacaagaatattctaggttacaaaagaacataagttggcttatatatggccaaccaaaaactctaattagtttaacctaataaaatgatagaaaccggacatattgaagtataaaagataacagaaatacaaggtaaaccaagtgttcgaggtacttggacccttccaatcttgagataactctcaagtcctaattcactcaccaaatattgcctatcttctccattccctgcctctctatttataaccagcttacttaataaactacttaactaattaccaatgtacccattcgattcctatagtaaaacacacaaaaatgtatctaaaatattacgaagtaaagtttagagctgagggaggggattgggccttagccctatagaagaagcccaacaactaaagtttcaacaataaatctacaaaattacataattcaatcaaaataaagtcaaaaactaaaatccattacgaatgtcagtggtccatagccttggttcttaactaaaacttcaagtcatcccatatctgtggtgcctttttgtagtctttggttcatctcagaaagtttcatgatcaagagttgtaactttttatggcattctcaacgtttccatgtattgaagtctcacacaattaagctgtgatttcagcagcaaaaaaaaaaaagagaaactgtgaataagaaagcccataaaagcacccctaaatctctgcacagcagtctgaatattttggattttggaccataatgcacccttaaatcaacatgcattggtgcatgtgaacattcttttacaactcgtagatgaatcgaagacatctacgtatgttatttagttcatttgctgttactctgtgatcctgatgacgtttttgaaattttgtctttttatgtagtcaacgcac

SEQ ID NO: 7775 - DNA, 6710 bp, Cucumis sativus
  Intron number 6 from transcript Cucsa.373400.1 (locus Cucs a.373400) derived from phytozome v7.0 (chr-ID scaffold0372 6; pos 240135 to 246844 reverse strand)
gcctcgctaagaagtgttctctcagatccactatcgtgagtcattttttatggtgcttacattttctttcctatgagcctttctgtaatttatttggacgtccaaaatctgagctaaccttttagccttccattggatggtgatgttattggaaaggaaatctattacgttgtagtaacaaaccctgcgtcctacaaccttttatccttcaatacttttctcaagatttggactcatcggctaggtacttttcatatatatgaacataaatttttgaattttgaaagtgagaaatttagtgttctttcaagggagaaattcggtacttcaaaaggtttcaacatgaaagattttgttgtttcacgcaacaatatatttagaatttttgttttgcagttaataaatcttaccttatgatccgttgaatcagcccatggttctgtgtaaagttttctgcatggagtttgtagtatataaaatactactttgttgggtgccctttttcttatgtaaggaattcttcattttgatctgtggaagttcgatgattcataaaaaagaggttatagaaattactcccaagatctgttcgtaccaattgcaaatctgttatggatctcctaagcaattttcgttatatatacatatatagttcaaaaagttgtttctaataggtgaaagtatgtctcatgatttggctttcttaacttggtacatatcaatattttttgagctcaatagcatgtggggtgggttgatttgaaattttaacttattggtcgggatatatgcctcactagttgaactgtggagagcttgacaacttaatgcaggtctagaaaatataaacactttgtatgggctaaggcaaagtgcccatgcgggacacataaaactctaaacatgctttgaacacaactctagaaaaaatatgacaaaacagtagagaaaaaatagagatcctctgatggactccaatcatatattttgatcgttcctaaagttttaggatgacatcttattcctctggatgcggtagacaactaaaatttttctatctcgatgtttccaaatatcattaattgacattccttcaaagttgtggctaggagaattcttcagaaagtaaaatatagatcttgtgtccttcgaaataacttgctaaaccactagagtgagcttccttggtaagagcttcttgaagagatccttggggaatacataacataacatattacctttaaagagatagttattgtaaaaattggagtaatagaaatattaatctccttttctctcattgaatgtgtgcaaattaggtttcttatacagcagaaaaacctttttacaagtatggaaagaataaaaacaatgtaggataaatatttgaaaataatatttatatacaaatgtagaaattccaacacaccccctcaggctggtttgaagatgtcttgcatagacagcttgtcaatcaatctgtagtgcctccaaacacttgtagcctctatggtgcctagggataccccaaaaaaaatgggtgagctcgaggagcaaacttggtctggttaggatcgtaattgcagacaaaagcaatgcatccaaacacctggagaggaatatcaggtatacgtcaagtggcagggtagaactccttgagacactctagaggagtttcaagatggagaccacgagacaacatttggttaattagatgaggcacaatgagaatagcatcccccataaataagactgtagagaggtacgtcaaggaggtgatggtttttcgttcagctacctcgttttgcataagggtataagcgcaggaaatttggtggtcaattcctttagaggacaaaaactcatgaaaggtatgatttaagtactctcgatcattatcatcggtgttttcaaaggctcaaggcacactaaggtgcaatggtcctttggagcctacgtgcaaggcgcacaaaaaggcgtgagctttttttttcatgaggcgcactatatataaagaatatatataaatatacacactcgcatatgtatctacaaaattgaaaggagcagagcaacaatgtataaaatatatgtatataaccaaagtggaattgagtcttaactttaatgtataaaatattataaaattagttttctacccaaaaaacaaaacacaacaaaaaactactcatgattcaataacaatcaaaataaaagttcatccctaaagatcaaactcatcatcactaaattgatcctcgtcttcattcactccttcgttggacttatcactacagagtagcaacttttgcattgaactgggtctcgatggtggtgtagcatcattggaaaatcgatgaaaccttagatttatcagtgaggagaaagacccaaatgagacaggtatgatcattgataaaggtaacaaaccaacgtttccctgaggcagtagtgactcgagtgggccctcaaacattgctatggataagggtatatgattgaataggtttgtagggttgagaaggaaatgagactcgaggttgttttgcacgaatactaacatcacaagacaacgatgaaacatctactttagaaaacaattgagggaaaagatatttcatatattgaaaatatgaatggcccctacgaaaatgccacaacataccatcgtttttagaaatggaaaaataagaagacagtaaactagtcctagaacaatccctagagaaagcatcatcgtcaaggaagtagagtgtcttactcatcatcaaggaagtagagtctcttactgtgtcgggtagtgtcaatcatctttctcaagctcaagtcctagagtgaaacaacataaggtgagaagatagcttgacaatgtaagtccttagttatctagatatgcagtaaattgtaagatattttggacacatgcaatacattctgtaaggtaaaaccatcaacgggtgaaatgtgacccttgcttgcaatgggagcaaaggttcgatcagcaatccaaattttctcatttccaacacacagtaaatacaatataaaaactttcagatgaggtagtaagatgatcagtagcacttgaattgagaatctaggactccctaccatcgatgctaataagactgaattattcaaagttacttgattgtgcaatggctccaagtgaggacttagcaggatcagtgtgattccttgtatggattgaggtcgatggggtccttggataattactcataaaggccttaccagagttgtgcttgtcaatcgatggacatctcttactgtttggtggccgaccatgtaacttccatcagttctcttttgtatgccaaggtttcttgcaatgctcacaaagagttgtcatttcagagctggactttacactgaaggcagcaaaatcaatagacggaatagtgatgatgttcatcgcacttgtacagtctttctttaaacgaacttcttaacacctcaattaaggacgagataggtctttgacccagtattcaaccacgaattaagtcgaacttggaattagaccagcaaggaaataatatacatggttagccttcaattctgaattattgccttatggacacctccacaaggacagacccagacaattactctgcatatatccatttcttgccaaattagagagaatttgttaaagtaggttgtaacatccatggtcccttgtttccactcaaggaaatgtttctgtaaagtgtttaggcgggaagcattatgacgcttcgagtataagttctaaacaatatcccaaatgtcccagactgtagcagcatacaacagtggttttccaatttgaggttccagttaattaatgagtaccgaagaagagagtcctcccccttccacattcattcttgaggatctctcggaggtttctgtatatcccttatgaaatactcaaatttaagtcatccctcgagagaaatcttaatagattgggactaagagaagtaactctaactattcagtttctaccctaccattaaacctgagtttcccgtggaactagaggaacaattagtagtatttaatgtagggaaagatgttactagattatctgattacattggtaggtttgacggtatgtttgaatttgggtttgttgaggcacctagagcagcctcgactcctgagagctgttatttgttgctagaaatccatttggaggtttgtcaattgtcgttgtattatggccggggaaactccattctaacccttggtgtctggtgataggccactaatagatttgcccttgtgatgggcagaagattcaccactatttacttcgagataataaccggtagccagcttagagaaatttgtcgatccagtcggtacaaataagtgatggttgtgatgggcaaaagtcgaaattaagcttgccagaggagatgtgattggcaaaaggtttgccggcgagacatgggtcgttgaagaagggttggtcgtctacagaaaagggaatttgcttgaatggtgttcggttgttggtcgaactaggttggtcattgattgaaacagccatcagagatactcattgacggtagcttgaatagcatactagaccaccatagttctacaacatagtagaaaaggaaagaggggagcaacacgtgtgaaaggggaaccacagtgagaagttagtaagtataaatagaagaataaaaagagagggaaagtgagttagagttttgagtaaaaatatttctgttgtatctttgagagagaagatagcaaatttgagggaggtattctgttttttccaaattgatctttccaatcaatttgtttactgaattcttgtaattcattttcatgattagcaataaagtcaattgttcagatttattgttaaattctgtgttggaaatcgagttccaacactgcggtggcggtttcgacacagtccagtggcggcagcatctgtgatattagggtttccacttgttgttcttcttctatgacggctagggttttgttatccatatctctgataccatataacaattaattaaaaatgaagaaagaatatcacctggtatatgtggaaatctctagtttagggagaaaaaactacgatatgactcttttgtatatttttctcattatctaaattgttgattatttccttttttgtattatattttattgtattatatttgataatattattttttccttctttgtaatgggttgttcttctatttaagaaaactcctctcttcttgaaatacaagaaatatattattttggcaaaaaaaatacaagggacgtaatatttataggccataatgagctttgacgaaaaagaaaaaagactagggtataaagattacacaaatatctttaggtgaattattttcaaccctagtgcagagatagggtctgctaagttgtagcaatcttgtcctttttctgataatccatcaaattaactttgatggcttctattggcaaagtcgacaaatctgtcatctcaattctcttcatcttcaagtcttctttaaactctctgatctgagggaaaagctatattgatttgactagataatgtggttgcatctaaatgatttggaagttccttattcacttttccttagggagaggaaagtttttatgacaaggaaggggatacaggtttttgggctgaaaggaataatagaatctttaggagagagcttacttctggatgcttggtctgtgctagcttccatgttttcttatgagctgttgcggagttttttataattattcactttgggtccaaccagagcagaaggagttgccaatccacaaccagggagagattagctttctccattcttcaacctcagaccaaccttaagaaatatggggttcttcttcttccttggagaacttctctttgcttccatcttcactttctctttgcttccatctttcatctttaatgagtttggcaataatggtgctggtgaattgtcttcaaaggtagctattttgaggagaaatttatcacccaagttgggatagtaatacctgagcttgatgtcagacatttggttgctctttctttctctcaaagggattggagatcttctatttgtttttagcagcagaatcttctgcaattggctattatcatcccgtgcgatttcttcctgcacattgcactttttggtactctgcgtttttttgtagggatgaagagtacaagtccaaagaagcacttgaaaaagaaaacacaaataaaaacacataagatttgtcaaagaagcaacggttggcaattggattaatttgctttgtcattaagctcttagatttgcacacattttcaccattgatggagacaggtttttttatatttcttttgtaattggctgttttctttttttctcggatatctttacttcattgttgaatgagttattattcaattgagctgcgccattcaggtctttgtacttcaaaaaacaaattactttttatcttgcttgattagagtccatttcttaagtaggttccaatttttatgggatattttttttattatgcttcgtattcttcatttttttttctcaatgaaaatttgattattcattattaaaattaattaataaataaccccttcatgttttttatgtttttccactttctccttttatccattcccagaggtgcattccttgagg

SEQ ID NO: 7776 - DNA, 1684 bp, Cucumis sativus
  Intron number 1 from transcript Cucsa.074740.1 (locus Cucs a.074740) derived from phytozome v7.0 (chr-ID scaffold0078 5; pos 622572 to 624255 reverse strand)
tatcgtttgcgaagctcaggaaactgctgccattggttgggattttgttctcctattttcttttactgtcgtttttctcttgtttggagaaatgaggaagtgaaacttttgacgatatttggatgtttggtggatttaagatcatgttcttagtagctattggtgtttggtttggtttgatttgatttcgtttagatacttatgaaactcgacgtgtgtgcgattaatgaataatatgttaaagcacctctagagttatgacttatacgtcagatcatgatgagtttaactttttatgtatatgcataatataaaattagagcgaaaactaaaaaagtaactaaaaaagaagtcagtttggtggattgatactgacacggtataacagatcatttcctgtttgaatttatgtacttgtcaatattcattccatatccttgcattttcttttatctgaatataaaattcagtgatactaagttgggatgaatctgttgtcctgtttaggaaggcttctaattgattttttcaaactcttaaaaaaatcgtcacaaataggctctgaattgggctgttgaaatgtgtttccattttgaagtgaaagcttgagctttaaaatttctaacgacttaatacattgaccatatattattacccgagatgatgccttaggcaatcagtggacacccaattggtgagtcacagaccaattttgtcaacacatccttgaaagggacctgtgcttgtaagagttgtcactaagcattaggagtaatagttgctaattgagtagatgatttctgctgtgcctgggtcttaatgatgccactaagagtgatcagtagggagctggtctgatattggctcaatatgttgggaaaatgccccagttgtttttctcttatgtcctgttctctcatcccacacttttcgtgtgtatgagtgagtgtgtttctgtatgcatcttgatttattgtattgtatggcgtcagattctgagtctttaacaatcggtgtaagtattaacactgaaatgttatagcacatgcgttgattgttgtcgttccagcatattgtattttaattgttattctgaatgattggtatgaaataacagctcttgaactgtcgaaacggtaaatggtacatttcagctatctttatattctaatatacaagcatgcgcacatacatacactttgtatgtagtgtatatagttcataagtgtttgttcagttgctagtctttttttttttttaccaatttgatcatagaactccatttgtttctgtattgaggggtttacttgtatcaaaattttccatatctgctttcatatacccgacatttattttatttatgagatcatgggaagaagacttcgaaaatttctgtttggaccttaagaattgcgacacttttaactgactttgttttcagatctctgtatcattgtttatacttatttttaatcacttgctgtgatgttgatattaatccgggagaggcacaatactcattttatgttagtatcttctctgttgcctacctcattggaggtcgataatattacctgcacctactttttctctcctcgaaaaagcattgttgtggttaattgaaattgcatgtttcttgaatgttgcagtacctgctgcttcagaagctacctgggagtcacta

SEQ ID NO: 7777 - DNA, 8420 bp, Cucumis sativus
  Intron number 6 from transcript Cucsa.155970.1 (locus Cucs a.155970) derived from phytozome v7.0 (chr-ID scaffold0113 9; pos 185377 to 193796)
gggttgtcatacagcaaaaaggtaaaaggaatttccaatttacttcatttgacaatttatttgcattactattatcattcagtcttcttatcatcattgttatcacatcatatttaagagctgtatgttttatcaaatttattttggagcagaatccttaaagagagttagtgtcatcattttttgggtaaaaatacgcaaagagacggtagatttatccatagtttgattgaacttgtttaaggaatcttggttatacaggtttgggatatggaaatgttgagagtatgagattttacaacgcatcatattgtttggcaattcaagcatttgaaataatttgtgtgcacatatgaacaagggtattttaattttatgctttccacacccatataatacctgtataatatttaaacattgccttgagctatatttatttagagggtggccatttaaagtaatatgaaaccatgtaattgcattaaaaataaagaaaaaagtaatttagaaaagagtctagctaatgctgggtgaggaatgtagtttaaaactcttgatgcttagcatgtgcaactattatagatgtaaatgaggaaattgccttttggtttaatgtgattgaatccccaagtgagactagggagtaactgtagcactagttgagactcctctttgttagttcttttggtttctttgattcccttaatgtttgagatgttctgtcgagcatggtatagataaccttttttggacttttgagatgttttgtcgagcatggtttggataactatttttgggaggtttttgggtggtgaagttccctttatgctaaagtgttcgtatctgtaacatttgtttgataagaagttacactcggcatgttcaattttggcttcctttgggctcttctttctttctctttccaggctcattctctatatgattaggaaatggtgaatgcggttgaacttcctttgaagaagagaccttcatttttggactctcaaaccttatgatgtttttttttgtagtttttacctctacctctttgtgccccttcatccacccttcttgtgccactcgttggaatgttaaggtattcaacaatgtcttcttctttgatattgaatctgaagttagccaacttagtgtggaatctcctgtgctgcctatggtatccctttggtgattgaagactctctttctgatgcttttgagttcctaattcaagaaaatgataggagttctttcaagaaaatgataggagttcttcctccttctatagtgcctagcaaatttttatcgcttgaagcttgtggttttgttcacgaagtatcttagttgttttgttagctgttggttgttgtgattgttgttcaagtttctttggagataagttcttgtttcatgggtcctttttgtttttgatgttctttctttctctttttaaatttgctttaagattttgttaagtttttgtaaggcttcccattgtgcacacatgtaaaaggaggggtaggaaagtaaaggaaaggagggaataagtatcaacatggaagacaagttaggagtgggactgcgaggaggtgatttggtgaggtggtggggaccatgagggatgataagaaagtttttgcaggtggtaggagaaaggccttttgagtgatcaagcttggaatgtaggagaggacttccagccctcgagaaagtgctggttttcttgttatcttttctattgtttcttgttgtttgtcttcatgctatcttctgtactttcccttgaagtttactaataaaattttcgaaaggtatgctctattcttggtagtgtgttgttggaaattttctgtttgcaggggaaaggatcctaacagttttatggttctatcttctttttcatttcctttgggagttcttatacttggattttgagctataaagatggtaacgttggtgtcacagtaaatgcttgtaggtgctttctgcattcttatcctgtagtgtccccagctggctgacagttttttctattgttggaaaatggaatatactgtatcaatctgttcgttagttaactgtttggcaactttaatatgttttttcatatcatgttgtattagattttaaatcatataaatggtagccttagcgtcatagtaaatttgtatgtgttctttgttcagagaattcagtttttcaagtattctttgtatctatatatcaatactctaacaaatttcatggagtatgatagaacactactaaaaaggtaagttctctctccctttctctcttccttctctcctccttcgtttcaacttcattgccggccgattacctctccggtagacactgctagttgttatcttgttctttggcattaccctagctaccattttttcttctcaaaagtggaagtaaaaagctgcaaaatcgacaacctttttttctgcatctagcatgaagatgaagcttttcacattgaagatgttgaagctaatatttctatgactttatcaatccttcaacttagatgattcattcaaacggtgaaagattcgaataagaaatctgaagaagtttatttctataagatagaaaaagttgaatgtggaagggttgaagcttccaaatttagattcaaaagtgggtgggttctgacatgcattgcatggccttgtacgggagggagatcatttatacatatcccctgaagataaagaggggtggaaaagttttggaaaaatcttgggagactacaaggacatccatgactacaaaatctggttctccacccaatccatgttcaacaccattatgaagcagccgaacagaaatatgaaaggaagcaatgcggagatatcaaaatcaaaagaaactcccaatcataggtaatttatgtaactcagcacggattctagaaatctcatgatcaaaggtttccaacttctcttcaatccttttttttgccatcgcaattcttttcccaagtagttatgctctgataccaatatgatagaacactaagaatttgtgtttgtattgtattgatatgaatttcagagattacaataaagaacgaatgaactcaattctggaaataaaatgcattaaaatagaaaataagaacagttcagaaactaagaacaaagatgaaatagacttccctcactccctttcctctttctcaaagaaacttgcagaaaccactcatccccccttcctctccgaattccttcccatttaaccactacttccttgtaactaactatggactcaccattgtggtcctctctcctactgctctccccttcattcacacatgtatttcccttcttcttcctcttactgtattgtaatacaatagggggtctatcatatatgttataatatgtatttatattattatgtatagttgtcttttattgtagttttacattccctatattttgggtttcttactttcctatatctttgtatcttttatctggttaaataataatagattattctccaaaagtaaagagtacatggtatcagaacctctaaggtattcgttttctattacggctatgttagggtttgtgcttcttacaaagttagggttggcacttgggttatcgaatatgagtgaccgtttgttgacacaacccaacccttaaggagcacccctatctttcgccatgttctatattttgtctctgaaaaacgtcacacgtaaggctcacatgctgctgaaaagatcgatctttgtcaccacttgtcggcacgtggagtgcttgagaggtttgttttagttgttgttggtcgggtttttctcggatcctaatttttggtcaatttgtttatttggttcctttgaaatctattcgtgtgtgaggttatttggaaaaatacccttttgtttctttggttctaatttggggttcctttaaaattccagagctttattggctaagtggctctggcgtttctcttgaaaccgattctttatggcataggatccttgtgagtactgagtaagcatggcacccatccctttaaagagacttcaaaaggggttaaaggcacacattgaaatccctgaaaggatatttcctttgagcttcccacattctcttggttcacttgttgttttctgggggatggtaaggatacgtattttgggaaaatcattgggtggggaagagttctctttgttctttatttccccgtctctatcatttatcctcgttaaaaaacagcatggttttggattgtctggttagtttggagaatcttatgccttttttctttgggttccatagtaatttgaccaatttgttgcctctcttctttccttacttgagggttgtatttttaggaaggggagaagggatgtccgtgtttggaatcctaattctattagaggtttcatgagtaagtttttttagtcttttgttagattcgtctccataatctgagtgggtttttgatgtggtttggaggacgaggtttcccaagaaagttaggttctttatttggcaagtcttgtgtaaagatactgcagctgtatcttattttattgattttccttaacgaattacaatatagaattggaaaaaaatcacacttctacttcctagagacacattcgaaacaggatcaaaactagaacaagaaaaactaagagtaaatcgtaacaataaagaacgatcaaaacaaataataaaggacttgacttggaccctctgcttctcccgagcacagaagacggtagcccctatttctcttgagtaattcttcttcccgatctctttcctctcccttcccttttaatctgctttattaactaactaatgagaaagatctcctccaatattctctcctcttgtaatccctcctagattcatgcgtgggtcaatattgttgtttttatttttcctactatatttaaacaatatcggtgacctagcatctttcttgggcgtattaacactataaataggtttgataggaagaggactttgcttgtctgccctttttgctgtatgttttgtcagaaggtagaagattttattcatcttttctgggactgccagtttgtgagagcagtgcggagctctttcctgcaggaatttggtgtcaattttgtcggctctagcctctaggagtgttagagcgacgatcgaggagttcctcctccatctgccctttaaagataaaggtggctttccttgggtggttggggtgtgtgctattatttgggacatataaggcgagaggaatgagcggatttttaggggtagggagagggagcatagtgagatttggtttttggctagatttcatgttttcctttgggctttgatttcaaagctttttttgtaattattctataggtgacgttttacttagttggtcccccttttgctagttggggtgttttggtgggctgtttttttttgtatgcccatttattctttcatttttttctcaatgaaagctttttattttataaaaaaattgggggttgtttcgctctttggttcacctggctttccattataatttgctttcgtctgcttgtgtgatctacaaatttgtgtgttagttcataatggatgaggtgaagcatatggtggtatctattgtgattctcctagcatcaaagttaatttagcacaatataaatggacctaattactatgattgacgttgaacaattcagttttatttacttattacttatatggatgatcatattactgaggatcctccaaaagatattaggaaaggcttggcttctcaatgtttctcaactctatcttcagattaagaattccagagaaaggaaagttaaattttgacttcccatttagtgttagtagtgtggaagtcgagttttttgaaaagtcagatgacaaattgaaccaatagtggcagacctgaatgctttgttctagtgtgaggaagatctggatgtgttcagttgtcttcagataatttatctcaagtttagtcctgcagattcctgcatcatctgaaggccctggtagctgaatgtaatcttgtcttggttctattttgcttctcatttcatacagcgttggtgaaaagttcgatagttaattgaacttatttaatcgaatactagaggattgaaagatccaaaaaaagatcaaccctcaaaagattttttggagacagaatttggtcttggttattcaagattcaaagaaaaaggattttgactttggcggatttgtgggttgaaaggaatcaaagaatatttcatgactagttccttgtgttagatattatattacatttacctttactcatcaacttaagcttttgggtcaattggtgatttaagaccttggttaggtggattgttatgaaattactcgtagaagtgctatatttttgtgcatccttctaagaagactttaacagttacaacattcagagttcatcttgattttcaccttatctgtgggcttggaggcgatgggccattttgttctctttagttcttttgcttttgttgataagttttttgttctagaataggttctcttgggtttcctttgtattagttgacattgcgatataggctttgagttggtctcaaatggaaagttttgtaacgtttgttaagggtcttaggggggtgggtgtcaacatagttgtttgtttgggtgttcctaatgtttcttagatctttagctcattgtataattctcatatactttgagctgtcttattgttatattaataaaatagacttgtttcctttttgttaaaggaaaattcggatttatggattattagtattttccatatttgtatttttcctttattagtactttggtctctatttattcaccaatgtaataggttattatggatttattcaatatattatataaaattatcatttttcaaaaaaaaattgagaattccattgagagtgaggttgttggtttggtagatcattgtaattctgtgaaggtgctctttgaatttctatagtttggaccttgtacagttgtacttatatttctctatagaagggtagtttggaccttttacttatatttctctataaatacaacatttctctcctcattttggagaacaatcatttcttagaaaaactagaccttttggtttacaccatttattctctctcaaaaaaaaaaaagaaaaaaaaaagaaaagaaaaatcataatcctacccttcaaaatgtaaacaaacattgctttgagattgtttatagatttattctcttttataaactttttatggtaggtttataaaaacttaatcaaaggatcaaattttgtggaattagacagttgtctcatgagtctaattgattcttgggtagatggccatcatggattgaacctaataagatttggacccttattaagcttcatgtttcactttcgactttaacttgaaatttttttgcaattattctataggcattatatttcttgatgattcccttttttgggctttatttttcgtatgtggctattctttcacttccttttcaatgaaagtggctgttttttttttatagaaaaatcatatttgatgtactatataggtaatgtgtgcaatagtttccatttatctaaagaggcaacttcatttttttttaataaaaaacaatttcatagatgaatgaaatatctgaagagttacaaatgatcggggttacaaaagattcctccaatatgatacaaggaaatttaagttgtatattgaggggctgtatatttttatagcaaaatgagtattaaaaatagatgattgaaaataccttttgtaaactattatagtatatatatagttattggagcttattagtcttttgtcatttattatcatttactattcttattttagggttttcatgtatgcctatatattttgaactttaatgtatttgagggatgggttctctcatatttgtgtcttatcttactagtaactattctgaagattctatttgtatagtcacttcttttagttggattccttttttgtgagtttgactatttgtatgcccttgtattctttcatcttctctcaatgaaaattgtcattagagccgcaggctccaacaaagcctaaaatgatttagaactatcattaaaaatatgcgaggagaaagggcaaaaaataatatggaaacaaatgttgaaacaaaggcgatcatttaatttgtgtcagtgtttcctatatgatctcagtatctaacataagaagtgaccgactccagggtagtatgataaagaatattcgttaggattaggttcttttcatttggatagttatccatgacaatttcttaggattttttttctttttgaaaataattgcagtacagtaattattccttcccacttgcggtggccat

SEQ ID NO: 7778 - DNA, 1706 bp, Cucumis sativus
  Intron number 1 from transcript Cucsa.040640.1 (locus Cucs a.040640) derived from phytozome v7.0 (chr-ID scaffold0052 9; pos 67794 to 69499 reverse strand)
caaatacaatacttcgactcaaagtggtaagtttcttcttttcttcatattgtcttttcctctccctttatacgtaactttacatgtcagcttacagacaagtagctagttattatagtttacgattatatagtttaaggtgtgattaatttaatttggattatagtacgagtttgtgtaaactattttaatatagaaaaatataattaaagctacaacaaaacataaaaagtaataaatataaaatattaaaaagttagccgtagttaattagaaaataaaaatagtatttacaacaatcagaggtaattattatagtcttattaaattattgtccaaacattttcttagtgtggaaggaaaaaaattgattggaataataggtgaaagtttttatctttcttaaccagcattgtcttggaaaacgagttataatagttttcttattcgtacgttttggcctagatcgatgttgagatgagaaatgtttgttttctttaagcaatgattaagtgcaactagttttatacattatcttttttcttaagattttttttaaaatccttttttgataaacaaactacccgaaatttggtagtttttcatttgactgttgtctgggttatgccaatatgttacttatacgtgtaaaacatggaaaactagcaaaaaaataaaaaatatttatacttgtgtattgaatttgtgtcattttgtgatttttttttagcatgaaacctaaatagtttgtttttttctattaaactattttattatacttaattctctttttctataactactagtgacttgtaaaataattatttcttgcacttccaatgcgactcacactctgatcctttttcatgttccactatatctaaggtatggacggtttgatgaagatttgaaaacataaaagatggcataaaatttgaaaagattaatatgtacaatgttcacttcagccagattttaccataaaaattttaaaagacaaagaaaaaacgttaaaatttttattcgaatctcgattgtcaatcataattgaaaaaattatttcaacgaattctgttaaagagtggaaagtgtgaaaaatgaaaatatttgagttgttatttgtacctttttatactttcaatttaaaagaattttattctgtgtttggtagattccattagttagggttagaccaaattgttagttgactatcatatggataaaaatcaactatcaacaataaatttattcgaatcaaagagttaggtaaagtttcattttcgatttgtcattttaattagtttttaaacttagttattgatggttgttgccttgatgattcatcatcaaacactaggacatatgatattataaaagaaaaaaaactttaaattaaaatagataaaactctaatgaagcaaaacaagaaaaaaatgatagctatgtttgtgattgttacagctttattataagacatattaggtttaaaaaatgaatgtttaaacttgtcccctacttttcacaagtaaataataaatcaaatttaaaataattaaagaaaaaattgtactaatgatccttaatgtctatttggtgattgaggtttgaaaagaaaattattataactaaacttgaaagattaaagtgtgattaaagatgaaatagactcaaacttgattttgagtatatttagaattgttgtaggg

SEQ ID NO: 7779 - DNA, 1161 bp, Cucumis sativus
  Intron number 1 from transcript Cucsa.380570.1 (locus Cucs a.380570) derived from phytozome v7.0 (chr-ID scaffold0384 1; pos 32639 to 33799)
tgaacagttttcatcccaagaagattgtgctacaggtaatagctgtttcacgttttttattaatggtaagttaaaaaggatattgtcggaaacaaagctctaaagttatatagatgatgtccagagtttagcaaagcttcgattcaagtgttagacgcagggcactgggtaatggtacttgattcatagtataggaaattttggatggttgtagttgcctccatgcgaacattatgcatacactattttctttaagtttacagaattttttatatagtatgtttattctgtgctgtttcttattaaaagaaaaaaaactaatgtgtttatattgaacatcatattagtacctaagatttattattttaaatataatgcacatacaggcttgccttgtgatctcatgtagtggagtaagatgattattttctgtacttgagcccaagttaacttgaacactcacgaatgtttgtgtatatatttcttagaagataatgtgtattgttttgtttgtttgcaaattgttgcagagttgctttagaaggaggtaaagttatcaaaacatactatattgtatggttttatcttcttaaaagacatgtcttcttgcttttctcctagaagaaacgaaatattgtaattgtgccacgagattagttgagtcatgcttaagtcggcttggatacaacaatacaaaagaagtattatttccactaagatccaatgaggcatcactcataactaaccacgtgtttatggtactgctctcttggctagttattatgtattacatccttttgatctaagaaactaatcaactggaagaggcaagagctttgttatatatgcatgattgtcaattgtcaccagtgatttcaaactgagcactgtttataaattataactacaattcttggttaagtatagatgtaactttatgatgattgtgttatagttgactgaatgaacacttacagagttgtcaaaataagacatatcagatcgactcttcgatcgtaaataattgacttgtatgattaaagggctagctgtttactctttatttgaagtggctaacagagggttttactttctgcaattaacacattgttgacatgtacatcagtttcaagagaccatcatccatcgtcactcttccaa

SEQ ID NO: 7780 - DNA, 951 bp, Cucumis sativus
  Intron number 1 from transcript Cucsa.093900.1 (locus Cucs a.093900) derived from phytozome v7.0 (chr-ID scaffold0091 9; pos 154146 to 155096 reverse strand)
cttactggtaatttcttcttcttcacatttctatgatatcgattagtatataagtgttgaatgtatacaagataagatgaaatggtctcaattcattagattctccctaccgatttcgttcgtagtttcctgtttagtgaaaatcatgcgcgtttgtttaattctcaattcgaggaagatgaaaggaaaggtaaattattgtaaatgcaaaaactatttaaattttttacaaaatatatgtaaatttcaaattttatatcgatggtagtgatgataggaatccatcactgtttatagaaaccaaaatataattcttcttaatttttgaaaagtatggttttctttttcgtaatttgttggcactttttaatggtttttcaaagcaagtttgaattctaaccaaaattgcaaaatcaatataactttttcatattttcatgcattataccatattttttgtatacttttcttaccgatataatttattaccgatatacttgtttgatctaaattgtgatatattttacatatttttatgcattataccatatttgcatgcaaccatttgtgtttagaaatataagtaaaaattgactacaatatatggaaacatatatagatggaagtgtttcaaaatcaaaattgttaggttagaatgttattttcaacttagttttataatattctctttccaagaataacgtgtcaaatagttaatatcgtgctcatgaacctaaagatgaactctttccttataaataatcaaactatataacgggctgagttagttaggatctatttaaattggttttttaagtgatcaaatattttgttacactttgaaagtactttttaaagcattttaagagccgatccaattcaggatttagtttggaagctaaacaaaaatagtgttgacaactcctgacacttgaattgggattaatgtag

SEQ ID NO: 7781 - DNA, 2787 bp, Cucumis sativus
  Intron number 2 from transcript Cucsa.087560.1 (locus Cucs a.087560) derived from phytozome v7.0 (chr-ID scaffold0088 8; pos 131989 to 134775)
tatctcgcgccacagctgcggttggctccccgaaggtgcataactgataatttaattctttactttcttcatctgttatgtgctacatcaaaagaatttagatcatatccataatttcagaatgaattcttccgtggacaagaaagagttgataattttctggaagctgattttctatttgcatttggttttcgttggatgaattttagctttataataattttcatggatcaagaaaaatcaagtttaagtgggagtaatgatcaactgtattttgaaatagtgatatctatatttaggttcaggggtcacattagccacagtgatctgatgtttctggtgaatgaaatatctatgctttattctatgattgaggtagttaatgtgtttgagtcattagaacctacaccatgaaaagctttcttgttttgaaaatgaaacctttcgttgattgaatggaataggggccaaagtgcgggcacccaaaggtgattacaggtaaagatgctaatgggagacaagataagaaagacttaaaatgttaaaagggtgtttatttctacaccaatacaaagcaaataaccaaatcacgaaaaagatcaaaacgagtagaatcattacgaaaaagacggttgttccaactctcccaaagaagccaaaagaaagcttgaatgatcgccatccaaagcattttcttgcgaccagtaaaagggtgacccaccaacaaacaagatagattatcaaacatattatgggaaagaaccactggccaaccgaaagcatcaagaatatatcaccaaaaataggaagcaaagtacaatgattaaaaaaggtgggcagcagattcagaatgagcttcacacatatgacaccaagaaggagagataatcatttacggcgtacgatcttgaaggcagtcagcaataccactatgactgagctcccacaagaaaattttgattttctaaggataacaatccaaccaaatagccgaatagacatccgaagcagggcgaatatcatttctcgccaaaccatccataagagataaaaccaacaaagaggaagaaggtccgattgtccaaatccaagaatcagcaacctcacgaaaaagacagattgtaaatgctgtgataaagccatcctcaacaattttagattctgtgagattacagtgaatacgcaaatgccaagcagcagcatcctcgacccatacatcagccactttgatatctggaaaatgagccaaacgaaagagacgagggagaacatttgagagaataccacaactaagccagggagccttccaaactgaggttgatgaatcattgccaagatgatgctgtgtgcggctggccaccaaatcagtagtttgacaaagagtctccacggagatttggatgaaccccaaataggcgaaggccaaatatagttaaaaagagtagtattgggccacaatgagttgtctccacaaggcattagattcctgcgaaaaccaccagatccatttggcaagaaaggcatggttgcgaacacgataattaccaatacccaaaccggccatcagacgatcacgttgtgtagtctcccagttaattgtgtgcataccatccatgccttgaacaccttcccagaaagagcatgaaaaagagataagtaataagttggcaagcaagagagagaagcctgaatcagcatatgacgaacccctttagatatatacgcatatttccaattgtgaagcttatgatgcatgcattcaataacgggatgccaaaaagtagatgtagagttaccacctaaaggcaagcaaggtaagtagaaggccgatgaccaagcttgcaaccaaaggaacaagccaaagagtccatggtggatgaacctaaattattacccaacctaaattattacccaaaagctcactctttgaaaaattaatagtcaaaccggaagtcgcttcaaagatatatatcatctcgagaagatgctgaagagcaggagtatttgcaaaggaaaagattaaagtatcataaaaaattgttaatggctaagcacaaaataagagtcatcaataggatgagcaacaatgaggcccttggataaactatgatccataagacggctaagacaatcagcaactagaatgaataagaaaggtgaaagaggatcaccctgtctaatgctacacggagggataatcttaccttgaggccgaccattactaatgattgaaaaacttgcactagagatgcacccacgaatacaagaccgccaaataggatcaaaacctttgatttggaagattatatattcaattttattctgcaactatattggactacagcctactggatcgttgtacaataaatttggcatctacatagtttaaatattgttgtgcaaagtttactttgttaatcaagtatttggatctgatgatttgttgttatattttcatttctactacttcagaaagatggaagttgcaaattcatatattactatccataagtagatgagaagaagtttgaagtggtcagtagaaagttgaagtcttctttatgaatgatacactgaaacatcctttgcttccaactagaatgaatgtttgtagtttccatgacccaaaattaagtcctaaatttctatcttttaagtttaaacttggaaaatgtcaatctacacatcactttgatgagcatgctcatcacctaccaaattatttcttgttttgattaaaatatcaaattgtcattaataacacactggtcacttgtgttcatcagc

SEQ ID NO: 7782 - DNA, 2085 bp, Cucumis sativus
  Intron number 21 from transcript Cucsa.395520.1 (locus Cuc sa.395520) derived from phytozome v7.0 (chr-ID scaffold041 00; pos 1060939 to 1063023 reverse strand)
aagtggtaacatgttttgctcatttggaatattggcagaatattgctttgtagcttttttgcatgtttaaccaacaatctttttccttttttttttttgtgatgaatattgaatactcacatcgtatataaatatacaaaaatcaactaattaacacttaacaattttgaaggttgctgtatcttattcttgtctacgaagatatataaatggcatttgttaacgttccaaagagttttgttctctttcggattgataattgtttttctttccattttctatctttactttagaagtagatatcctactcaaaggtattgtctaatttttaatgaaagactaaaaacttgataaaaagataggatattgatgagaagatagtgcgatattggaaatggaaaagagatggctctgggtcatgttaaagattcagtgaaaatattttggcattctgacaggatctctatgggcaatgtttttttttaaaaggagccaaacttctttattattaatacaagagagctatacaatgaaaataatagggaagccaagaaatgtgggggagagagagagatagataggataagtagatgtacccggacttctcaactaggatgacaccccatagcactctcatcatatccaaaatacaaagaaaaaaccaaagtacaataaacatactaaggtcatgaaaaaaccaaaggaacaaccaaaataacaacagaagctaccaacggtagacaaaagcaagattgaaaaataaaaacataacggcagaaatacatataagcaaagcaactctgtttgtatatctgatttgtgagccaattccacttcattcagaccaacactttctgcaagcccatcaatgatttctaactctctcaaaagcctttcctctttctgctttatatcaatcaaatgagtagcatgccaatttttaacagcaagtttcactttacgaagctgctcatgaagaatgaaaccagcccacccaatgcctagggggcgattttcaagacttcctcaataaccttgttgcactattttatcaacgaccaactattgcaaaatctgaatggggatggcccccatagtactgcacctgcctctaataataaaggaaagtgatcggagaaggttcttgctttacaggtcactcttgagttttcaaattcatcatcccatttactgttaataaaaaatctatccaacagagaccttgcagcagtgccaccctctcttgaccaagtaaatttgacattttgaaggggaatttccattagattggcagattctataaaggcattaaactgtctcatccctcttgtgcctttgccaactggaaacttctcatagacccatctactgatattaaaatctccacccaaacaccaagcctcttctccacattctgtaatttttaataattctggccaaacaagtttcctctctctataaccacatggaccataaacattggtaacccaacaacacttcttgcacgaagttacacattttattgagagggaataacgtcctcttatgatttccaccactgtgattttacttttatcccatagggtaagaatgcctctggaagcgctataagattccactgattcccatcctacatccatagaactccaaattgttttaatgaaatttacttccagaatttccatttttgattcttggattagcaccatgtttgggtgatgattttttataaacttcttaagagcggaacgtttatttggatcttttaggcatcttgtgttccaggaaatgatcttcatgggtgaaaattttgagcatatacattacactgacttctatgggcaatgtttagccttgtggatggtgtattgtaaaagatttttttttttgtgatcttatctttacttcggttcttttctacttctggtttgtggtagggatgggaggcgggctagaaaatgtgaaaatgggtgtaaattttggcggcagacaaaaaagaaatacttatttgtgtgcaaacatatgctcatgtaaacatgcaagatttatttttaatttctgattttgtggatttcttaggttgct

SEQ ID NO: 7783 - DNA, 1673 bp, Cucumis sativus
  Intron number 3 from transcript Cucsa.252560.1 (locus Cucs a.252560) derived from phytozome v7.0 (chr-ID scaffold0222 9; pos 1476133 to 1477805)
agttctaatacaattgatctttatctccatcgtaggtaaaccatttactttgtgatgccatctatttgatctatggttcctcctataaaaccattatgaatgaatttccattttcttactaaattagcagatgcttacagctgtttaactgcactgcactctcgttgtgacgtattaatttggaaaatccagctttcattaagaagaataatagtatatagagacgccaactacaaaaaatttaaaggtcagctaaaagcagggaacaaaaagatcacaaagaacccccctgttgctgttgataaataacaaagggtaattgtaaagaagttttgtagtatgaaaccaacaaagaagcgttaacatgcacaaaaccccattccctcttcgacaacctatctaaccccatagaagttattggtttctttgctaatgaatgccccatagaatgatgaaagaatccttaacgatgaattcaaagtgacttcatccataatcccttgaatgctcgatctctgggtgatggaaatatcaaatgcctgccacatataacccacacgtggaaggcaaaagggtagtcatggttattgatcaagatttttcgcacttgtacctgacacaacagttcataccaaggacaagagtggatgatgtaaacaaagtttaaggagagaactttattgattctgtcaatagaaacaagaggtctcagaatccactcagccaatttatagacaaaggccagatgagaccaaagaccgataaaattaatccaaacaaccagctggatacagatcagtaaaactgaagttactcacgttaagacttaagtaacaaataaagatcttcaagaacttaaatgatattagtaatttagtattataagaagccccccaacaaaagagacaagactaagagtacaaaatgtcctacatcacttaaagaaaatagtatcatgacggaactgtacacaagaaagatggatacagtcccttaagatcttgaaacattcaaaaactttcaatgagaaagagagagcgttgtcctatcaaatgctcttgataacaaaagtttcctcctttgactgctattaattaatgtagaaaaattagctgatcgaagagaatttccaatcaaatttcttcatttaaaagcaagacttttttttaatcgataatctcattcaggaattcctagtgagatgattaaaagtcttctctaagtctatctgaaaagaacttccttcttcctaacaattctccaaagccccattgcagtactttcttcttttcattaccatttctcagtgaatgcattaaatgcttgcagtttttattttattttatttaaaaagaaagaaaaaataaaaaacaaataaaagaggcctagatttgagtgccgagttcttttagaactcaaggatgtctacagatcttgttcaagtaggtcagatacagttgctgagtatgaatgctgggtttttgtagtgcatattggcatttaagcagtatgaagcacatttttgtagggtttatccataaacatagatttccatctctgtcttttcatcttgatttgaggttctgttttgactctacaaacgacaaagaacttgccatctttatgtttcatggaagaactagtaaaacaggaatctttgaatggcagatttt

SEQ ID NO: 7784 - DNA, 9692 bp, Cucumis sativus
  Intron number 1 from transcript Cucsa.357660.1 (locus Cucs a.357660) derived from phytozome v7.0 (chr-ID scaffold0357 8; pos 907063 to 916754 reverse strand)
cgcagagacgcaaactcggtcaatatcaacagcaggtttcaattcatcccctgctcttaatttactcatgtggttagattttttaaattgggtatgaaagaaactggattggaaagaacttaatatgttttcaggaattgctcgcgatgctataatctatgtttctctttgggcagttagagtagaactttaggattatttaatccatttcgtgtttacttatccccataattgttcttctctatttctccatttgcttcaaaatttgagttttgcagttcggaaacttctctgctattgagaatgcactaacctttatatgatgtatatagcttatatcactagagtagttttacagttactacgtaattcttggaaattctatggagatctaagacctattacggatgaatgatgatgtgttataaatgccatatcttctttactatgccaataagtttagaatcatttattgttggttactgcatgtacttgctggattagtgcagatgtcagacctaggtttgggtttgtgttaccaagaattttatttcttgtgattgtaatttctccctccttttgaacgagaaccttgtttgttgtaattgtgcagattattatatcttttttagatcctttctttctcatttcttttttggatattgattttttgtattctcattttatctgcggaagttggtttctttattagaagtaaaggaaaaaagaaatgtaccatgaatttagataacctatatgatagtgtgatttgggcttgtaagatacatcatacattgtgttggatattttataatagtttttttgggtcatgtaattaatatatatatatatatacaagaaaatctctgaaccaacattcccaaattgtcttgggtttttcaaaatgatgatgaggatggattttattttctccctttcaagtctcatatttcactcttaagctcgcttgcttgataggagccttttcaagtgaaatgttgggcatggaaaaggcatagttcaaagtatagtaatgaatgacattgaaaagaggtaactttcaaaatgaaaaagaaccagggagcgcaggattcgcgtcttgtaggaatgaatcccttttaaaggaagggaagtgattctacaatgtggagggctgtgcttctttctctagcgtcaacacccagactccacccacataagagggggatggggggcaaagaaattgaaaatatttctttcacacccacagaaactatggaaggtctgtgcattgtggatttgcacttaattgaagattagtcggaatgatgaagtgttaaagggcaaagaaaagaacatgctaaaagaaacaattttgaacttggaacttattcaagagtctattcaagaaagcatggaagaaaatcaagttatggctattgttggaggcttattataacaaaagccatccgttgatttgatgtgatgtaatggcatgcatagggggttcctactggataacaagtaccaaaaacacctccattgattaaagaagtggctaaagcatagttacaacttacaaccaaagattccaaaagaaaacatgatcgttagtcattagaacgtgaaaggatctatttgtcctttttggagggatggcccaaaagagtagatgtaaaagacaagatattaccccggtcttgggaaatgccaaccgaacatgtcttctaaatagttctagcactttgtagcagcaaggatcgaagaaattgttattggtataaatatcggtaacccaaatttacgaatatatcaatggatgttttgagaaaaatcacagatatcacaaagatttataaaaatattgtgaatttcttagtgacaattcagaactagtctttttaagtaataaacgactttaagcatataaatcattaattagaaggcaaaatgattgataatggaattatagacaataatgaagaccgaaaagatggttaagaactgaatatttcattaataaagtctaggttaaatgaaggtcaactacaatattcaatagtttttgtttaggaaacggagacaagcccctttattaataataacaagagattaatgctcgaagtacaagagaattatacggaaagaaaaaggactaaaacaaatacaaacaataaccaaatcaaactcagcaataatagcgagctaatcaaaatcctctaatccagaacaacaaatgaaatctacagtttggctagatacaaagtaattaaaacagattgtcagaaggaactcaaagtaagctgacaacttgcctacaataagcttcgagatgagtccaaagggaacacaaagagaacaataaccaaccttgctgaatcttcactaagatgaaactacaaaactgctaaaaaacaataattgttcaaccagttggaaacagttcccgagccctgctgctttcattcttgagagagtactagttttgaattaagtgtttcaagagacttgaatcccaatctgtttatctgaaaccttcaaatcacacaagtttcgctatacaaatttcaacgtggctgattattgaaccaaaaaggtgactgaaatcagatcttaacagaaaactagtttgcattcatctacttactagtttgcattcatctactagcaactttaaataggttggaatttcggaatgcttagactaagaggggtttccagaggtctattttccaacgttcaattcctcttcattttgaaacaaatcattgagattagtttctaaggggtccttcaaagaatgatcctccagcccatttggcttccccgaatgatcaacttcttcactgctcacactaaaaagagagttaaaatctgaatcacatttctttttggatataggacctggagtttggcaaggggagccactaaaaaattcttaacttttgaggaaggtgaggaaaaaacagaatatctaaagtgcggagggcatgagctctgaagggactgatctggttgaaagagaaggaacttgaactcgtgtacaatttaactccaaagaatcatggttttaatctaaaatcaattctgcccttaaggtactttgaattcagaacgtctaccctaattgaaggtgaagaagcttggcttagggtatctttgacctttaaaaattcagaattttgaggattttggtttgacaacatctttgtctttactagagcctttttcaagatctccttcggcctccttctaacaaaatgcctggggaatgtcttgaagggaagcgggggtttcttttttattttttatgctttttggatgtacttcataaactagatctggtcgaggatgcatgagatgaaaaagataaagatgcagatgaagaggagaggcttgggacttttgtagaaggagctgcagtggctgtgggcacggacttggccttagcggaagggacaattggacgctgaagaagcaggagagtgagaccttctaattgcggaacttggggcgactgaactcttgtagttaaccaactggatgagcttttgagctaaatcaaacggattaggttaaatgtctcttgggtttttcgatgggcaacaaagagggagtaacctaaaatctctccttcttctttaaaggcacctcttcatctttcatgtcattgttccctccaaaaacaaagtaattgttgtttaaacttcgtatcttagtgagattcttagctgtgtgagcattaagtatgccttttggagggaagaaattaatgctccgtaattaatggtcgatttctctaaatacaatattcagtagtaaaatgatgatcttggaggtactggctcagcattaacataatttacttggtaatggcatattgttcccaagtcatagtatgctcgaagttcttaatataattggaagtatgccatccatgagtctcaacatcaatcccgatgctaccaattgaaggataccttggatcaaaccatgttccatctaaataaggatgctccgaagaatgtagataatataggggctttgagtttgagttttcatcactttcatgtggaagttgtggtcttcatgtgtaaaccgatgtgttgcacccgccaatataaccacaaaaaccataccacttaaacgactatagctactatgagaataaccataattattgtcagcgttataaacatattgttgatgtccatttttactgtccaaactcatcccctccatactcatccccttcgaacttgaaactagtgagtgagtcagcgttaactcgagcaccaccatgcacagatattctatgattaaaagtttttcctattgctccaaatcttggtccaccagctctatggccatggtcagagtcttgtgtggcatgcgtgaattgagattctctagtgggtgggccaagttattcgttttgttttgtgcttcaccggctccatctcctttgtcactaccgtaactaccatcacgatcatcatcatcgtcaccttcactttgtagaccttgactttttttttttatttaaacggaaactggcctctttattaatgataaaaaaagactaatgcttgaagtacaagagaggtatactaagagcacaaaggactaacagaacaaatacaacatagtccaagacaagagagagcataaagaaattataatgagcagtgcaggaccctctaaaaccccatcaaaatacgaaataaaaacaaggcaaaatgaaagaacttttaacaaggagccccaagacaactgaaatctagatcacaaattgctttaaaaaaattaaaggatgaatgtgaaggaagacaccatgaataggcaaccagccatggaatcctgtgcgcttgaagactttctgaaatctttcatatcattaataaaaagtgcacatgtactgctgagaaccccatcaaagctacacttaaaattctaaaataaggaagaagaaacaggaaaataaaggaaaatgccaaacaagaaatctctcccttaacaaagatctttaacttgcttcaaaatccctatgaatacgcctggagaaccaccgtattacaatttttaagcatatatgcctgaaaaactagaaagcctgtcttcttttagtgctcagcccaagactatcccacatttctcaacaaaggacttcaagtgatctggaataccacattgttgagcttgtaatggaattcctgaggtttatttttctaaaattagttcttcctcagtttgaaagaaaaaatttagattagtttctaaggggtccttcaacaaatgatcttctttctcatctaatcttgtcaaatgatcatcttcctcactgcttacattaaatggagagtcaaattctgtagcgggcttctttattgatgagggaatcgaagataagctgggagagactctcaagaactttatctttgagtttggaaaagaaatgacagagtatttaaaatgtagatggaacttgttctgaataactgatctgtttgaagtagagggggcatgaaggtgggcacaatttgtcatatcaggattttgatctggaatcaaccttgccttcgtaaatctctttttacaagcctccttcaacctctttcttctaacaaagtgtttcggaaatggtttaaaaagggtcagaaaaagctttgattttgaatgttctttagcatttgctcttttccctgatttggtcgaagaaaagaaggaagaagaagaaaacaaatcggctgatgggttgaaacttgggactttacttaagggaatttcaaggggcaaagtagctttcccctgttgaatagttttcacagctggatcgaaacaaatggcttgagagggagatccagacttgtttgaatcaagattggcctttgggttttccatgaacaaaaggggaggctgccggatctttctcttttgaccttgactttgttgatcatgaatctgttggccatgactttgttgaccttggtctaactgctgctcttctaaagtacttgtacggtagtatgtaaacgcttgtgtcactcgaaagagtcaccatcactatttggactactacttactacctcttcacgtatgacacattcaacatcaatgcctaaatcttctacaacactagcaacatgtggatctggattaccttaagcatcattgagatgcacaggcctaacccacatataatggatcgttttttcaaattgtttttctttgaaatgaaattttgaatagtatattgatgtgaaaattcattttaaaaatttaatataggttgtttttaaaaaattcaatttaatgaaggtaaatcttagattagaaattgcgagaagaatttggaatatgttgattttcaattttggaaattgagggtatggaatatgttgatttttggatagatttatttggtagtttgaaatgaaaaaatgttttatttaaaaagttggaaaagttgcagaatatccgtgaaatatccatgttatatccgcgatatatccacgaagtcttgctgaaatttctccacatatccatgtttgttggaacttgtctggataatattcatgaatagatgtatcatctatatatggcgatacttctcgaattttcaagaaaaatgaagttacttgccaatctctattcaatacctccatttggagatatatctgtgatatatcattgatatattgcgattttttgaacaaagcagagggcagcagctgggagattataaagccatgggatgtctagggagtgttgatgcaggagtttgtgagttttcaaatgaacaactttaccgctttgaggtaccaaccagaccagacatatataagtttgagtttgtgttcggatcaatgggacagagggccatagagatagactttgttggaaacgaactgtctttttccaaattccagcaccaagagtcatttctatccaaggcagaaaaagggctgtaaactggacgaataagtggcccattcttcaatctccatttatttgagatttcttctcagatggagtgtccatattttggtttgagaacaccaaattccagcatcaggagtcatcttgattgtgggaaggacttctaacaagaaaacctaggaaaggatttttgctttcttttttcctttcattattcattcaatggaagttaggtgtcccgaaaaaattgtggaatgaaagcgtgattccaatgtagacagtttattggagggtggggcatttgaatggacgccttctcctttccctttttgcaagaattggttatacaacaaagaatgttgccaattaatcaaaataacatcgacaaattcaattctcaagattgggccggatttgcaatttctgcaatttgaaatcaaggacttaggaaatctgaaatatttctttgcaatggagggagccagaactaaagacggcatcttcgtacctaagtggcagtttacccttgatttgccaaccgagacagatatgttgggatgttgtcctactgacacctccattgaattcaactgtaaactggaaaatttaggtgattaagttccagttgataaagaacaatactagcgccttgtgggtaagttgatttacttgtcccattctcgaccaaatattttctttgctattagtgttgtgagccacttcatataggctccctatgtgaaacacatggaggccgtcaacagaattctgagatacctgaaaatgactcttggtaaagtattgatgttcagaaagacagactggaaaactattgaggcttacgctgattctaacttggcagggtcaattgttgacagaaaatctaccttcgattgttgtacctttgtattgggcaatcttgtaacttggaggagtaagaagcaaggtgtcgtggccagagcagtgctgaggccgaatacggggctttgagtttggggatatgtgagaaaatttggctccataaagttttgactaatcttcattaggagtgagaaaccaatgaagttattctgtgataacaaggcatctattagcatcgtcaacagttcagttcaacatgatagaaccaaacatgttaagattcatcgacacttcattaaagaaaggcttgacaatgggagcatatgcattatgtgtacatttcttcaaggcaacctctcaccaaggggtttctgaaaccaaactttgacttttatgttagcaagttgggcctcattgatatcaacgttccaacttgagggggattgtcagagttagtgagcttggcacagggagattttccctaatactttccttcggaagggttcttgtgcaaatcattttttcatagtctttggaccattctccattaggtgatttcttttcgatcatttggaggattaaagttcctaggaaggtgagattctttacttggcaagttttacatggacgtgcgaatatgatgaatcgtctcaccaagatacttccctcgcttgttgggtcattctgctgtatctttgtagaatggtggagaagatccaaatcatgttttttttatagcgtgagtatgctagtttagtttaggagcatttgctcaagatgtttggcttttcatgtgtttgctagagggactctaatgctatggccaaggagttcctgctcaatctgcctcacggagagaagggccgctttctatggttagttgaggtgtgtatgatcttgtgggttttgtgagaagaacggaagagtgggttttttgatgggtcgataaggaccctagtgatgtttggtcccttgtcccctttcatgtttcttttgagcttcggttttggaaaccttttgtaactattctataagcattattttgcatagtttgagcacctttttgtaggggtgatgtctttctgcacttggttttttttttgtatgcttgcgttttcgttaatcttttttcttaacaaaagcttttcccctcacctccctaccccttttcttaaattctttcaataaaaccatggaacttcagtggcatctcataaaactaatgtattctcttttcaaataaaagaaaaactttgaaccttgaagttatttccttttatgacattccaacatcaaggattctccttattcaaaatactttttattttccatagcttaattcgaatgttttcataagctcatgtttaattatctgcgtttaatttattcaaatgtacatattgatgaattattgttggaatcctttccttattagaatcctagaatatttatggaaagattatgggaatattttccttatttcctaaattttttcttttttattcctttgtatactctatttattctccattgtacctattgtattattcattagaaaataataacaacaaacaatcgtggtttttctcccggtactcgggtttccacgtaaattggtgtgtgctctttgtctccttttaataattattaatattaattatacaatattttaaatacttttttatgtcgtttataaatctttgatagaattatgcatgaccacaaattatcataaagtaaagttccattttaccatgagcatacgaccaaaaacctattaatatctctaaaggaagtcagatattacccaaaataacttttgtctgtgtttctttcataggaatgcaactattttttactttgaaaatgaaataactttttcttgttttcacatgtcatttttccttagcttg

SEQ ID NO: 7785 - DNA, 3817 bp, Cucumis sativus
  Intron number 6 from transcript Cucsa.390880.4 (locus Cucs a.390880) derived from phytozome v7.0 (chr-ID scaffold0403 1; pos 86653 to 90469)
gagaaaggcttgaacttggatctttaacttctggggtataatcttctgattgattctttgaaactttaaatgggaatgtattgattttctttgtattttctactgatcccctgctgacgggccttttttaatcaagtcctcttacgttttaatgcataaactccatttcctgcccaaatttatttattctcttttctgttaaggccctagtgtgctttcagtgtagtgtctttgattttaaaattctatttagtccttatgaaatcattcctaacatcataaagtttaatagtttctttttcctagtctttaaccaaaacttaccagaagtcatttgactttttattttagttaagattgatttttaaattgtttaatagctaataggtatgtaaattcttaccaatatattaaacaaacttcaggatttggttgagaattttgaaacaatgcgcaaatgcttctgatacaagatttatagtttaattcgaaaccatacactatagatttggtttgtgtgcgattgacactcaagaacaaacaaacattagaagacagaaatatagatgccaattaatatacgtattgcaatatcaataacgaaatatgttatgccttggcacattctagagggtgggtttgacaatcctctgccaaattctccaaaggaaatattacaaattttgggactaatattacataattattcgccctttgctcttgggtctcatcatcctcactatttgtaactgaaagccctaacaaacatactgtacaattgctaacatacccctcctaataatcacaccaatattctactaatatcctaactagagatcttacatagtggtttggtcaagtcacaaatgttcatcttaagcacttatgagcatttgttttttcatattaagttcaggtgaaatcttacatttatttgctagcaatcagcaattatcccgttaactagctacacaagaaaatacataaaaatcaggcaaaacttggctgaaaagaagaaaaaaaaaaggtaaaagaaaacaaaaactcaactttgcacaacaaactaaagctctaatatattcactgttctcacattatgtgaatcaagtgtcccaaatcatcacaatcgctataactccaattcctaaaagcacagcaagaaacttgtaatttggattgtccacaagaactgaatccctaggggtgtatccctttgaaagcagatggtttatggacacataaatgaacactccacaagccaatcccattgagattgcaaatatccaatctgccaccgcaccttgtgtcgtggcatcgattatgattccgattgcaatgccaatggggctcgagatggcgaaagcaaaggaataggcagcactcgacaacaaagggcggtttgggatcattcggaggagagcaatgcccatggcaatggctgcaaagaccttgtggagggagattgtccatagggctttccaggcatcggctttggtctctgcaactccaatggcgatgccttcaaagacggagtgaaagcacaatgcaacaatcagtaaaatgctgtccccaaatgaacccattgttgtgagggcttggtgtggatgtgtatgatgcccattgctgccattttggacctgaattacatataaaataaattcaagttgctggtatgaataaaatgggtgttcggatagctttgatggctacatttttttctttcgaaaattacatttttaacccatgcttcaaaataacttttaacctgattattttacattaaatactcacttttgatcttgattgataataattgattagcttctcattaactttccatcacaactacatctaattttgaaatttcccttcatgaacatttctagttaacgaaaagttaatgccatagaccaaaatgggcattaacgaaaactcaagggtgagaatgtttaatattgaaacttaatgaaaataattcaagactcaacgtaaaaatataacatttggaagtgaaaattgaactcaacacttgagaataaaagtgcaataatttgaaacctactgactaaatgtaaactaaccaaaagtttaaacaccaaaaggatatggttcccatttttttctaacttctatctgcttactttgaagattttatttatcaatcagtttaaaagtcaatggaaaatcatctctcaaagatttatgaaaaatatttgtcatagttaatttgatggtttgaaaactgattttttatttattcattattaaaccacataaaaaaaaaataactgttcaagaaaaaaaaaggtcattcccaaacataatcatgatttggcatttatatttatatattttaaaattactccaagctcttatgataataaaatttattatacaattttttatttttttggcaaagataaaaataattaggtatttagaaatcataagcatgagatgaagtgcagtttacctgaaactttgagggtgaagttgcagctcctgcagtgaaagaataccacaattattgagagctctatattaccaacaataaacatacttttattctttaagaaattgggttggaagttggagaactgattgaaaaatgtttttaaagaaacaatttttaatttgtttatagaaatattgattttttttcttgcgttacttttagattattgacgtttgttttggtagttgttttatcggctaactatgctgttgagttgtccttgatttcttcttccaatcaattttaaaataacaaaatgaataatgattacaagtaactcgtaaattttaaaaactgataaaagaatgagcaaacacatgcaacaccaaaataatcttttaactatttttaatataattctgctgtataagtttccaacacaaaagaattttaaaatatattttcctattgaaataaaaaataattatttaacaaaccgaattagatttgactctccaaacaaagcaaagggtgagcatagcgatccattagaaggaaacatagaaaaaagagagaaaaaaaagttgtgtacatttgttcattaaaattaaatttctaaacttttaaaaattaactaatagccattctttatttttttgggttaaaaactattgcctactatttcaatagttttcatttcgttaaaagctaataagtttattaaatttaaaaaaataatgggtagacaaacataaatttcaaaaaaagggacttaaacttcgaattttggtcttatgaattcaaataataagttaatagacactacttccttactttatgttattgcttacgcacaaaaaaaaattgaattcgggtgtgttttaacaaaagtgaaaaccatgattacaaagttgagaagaaaccatcctaaataataaaagacataaaactaaaagcgaaaaatcttaatttaatgacacacctttaaaggtttataggccaaacaaatacaaaaactgaatgaacttaacttgtaatttaataattaaaagtaacaaaatgtttttgaaacactaaagttgcaacatcataattagttaatttattatttaaagaaaaaaaaaggcaatagaaatgtgttggaatttggatagttaaatcatggattccaaacaccaaattcaatggtaataaaaaaaatgaacaaaacaaggaaaaaaaaaggggaaacagctttcagaaagtgatttgtaaggcacccaatatttttatgatttatttacttatcaataaatttgtcttatttcacttttggtcttttcttcagattctggttcaaagcaagtttaggaaaattacaca

SEQ ID NO: 7786 - DNA, 1536 bp, Cucumis sativus
  Intron number 5 from transcript Cucsa.086700.1 (locus Cucs a.086700) derived from phytozome v7.0 (chr-ID scaffold0087 3; pos 113902 to 115437)
caataccagagttttgttgaccaaggacgtgtaaggcattcattctacttgttggcttctcaacatgtttcttctctgtttgttgacattttgttgctataaaagaattgtttttagtttgcagatcagcatgtgaatgtaaacgttatggaataattaaacctagtacgttaagccacaagtttttactctttatttgctatagaaattagacaatacactagttaggaaagagaatatcaaataagaggagaacggaccagtgatctaaatcaaccttcaaaattaaggggattaaattagaacttcccattggttctaatcaaacaaaggtagagaaaatatatactaattcgcagcctagagagaggtgccaacgcatgctcagtagaaatcttttctatctgaaaaaagttccctctttcttactatcctaaatttctacaaaatgtcaatagtcaaaacatagcacttgtctagatgatttagctttgcgtttagggttgggtaaatctcccacaaaatgtaaaacattgaacttgttctagtgaccctggcttttttctttagagtaggattattgatagggaggaggtgctcctccatccccaccttccacaacaaggggcaatgccgcgtggcattttctttcttttacttttatggttgaagggaaacgggaaaaagttttaagagcttgaaaaaacttgggtggagttgtggtcgatgttgggtttagcatctctctttggccattaatgactacgactttttgtaactattctcttgatttggttcttttaagttgacttttttttattattattaaaattaaatttactataatctaccaaattaagcttttagattgattagtgacttaatatgatattagaaccagaggtcctgtgtttcaacttttgtaatttcacttcctctaatttttttttaaacaagcacagaactttttattgataaaatgaaaagagactaatcttcaaaagatggagattctacacgggagtgaggaagaaaagtgataaaagaagaaaaataacgatccacagttacaatgaaagatacaaggcattccaaatattacatataacctttgaagagaagccaacaaatgtaacgacctagcttttctaaactaagttgtggtcgttttcaaaagtaaaaaacaatgccaaatcctcaaaaacgatgtttgtaaaacagaagtaaccaaaaaaccattaaaaggaattagttgttcaggccctaagtaaaacaatgaaaacaatatgttcataataaaaccatctcagacatggtatagaaaacataagaaaatcatgaaagatagcggaagaaatatcgtagcgttcctcatttggccagtcatgggtatataaaataggtatttctctatcctaaaaaggcaaacacaacatacagaagaataagttgtttttcttcacgttgctttattggcatttagtatcctgagagaagaatgaaaatgttcccatttttctgatttgcaggtaaaag

SEQ ID NO: 7787 - DNA, 1625 bp, Cucumis sativus
  Intron number 2 from transcript Cucsa.057800.1 (locus Cucs a.057800) derived from phytozome v7.0 (chr-ID scaffold0061 4; pos 133494 to 135118)
atctcaggttagtttgttatattctactatttctcaagttagatcgctattgcgatgttaggataatgattttggattcataattgatcattctgtgattataattatggtgtgagatctattgcaactctgctcattttctgtagcaataatggaaggggcaaacccttatgaggatgttgctttatcaactatcacctataagaagagaaaagtgtagtgattacactagttgagtgctaacatattgaaagtgccattgatgactatgagggggaaatcaaaggagcctctttgagattagaattgtaaagaaaaagtgagtgggccgtaaccaaaatagaatggataatatttagatctttgacttctgtcttatgcattgtgatttaggtgtgctacacgtgttgtcttttgtgatacaaacttacagtagacaacaaggagacaccggtttattgaggaagagagtaagctcttagacgtacacactgaggctgaatatttcgtatattaggttaaagtggttataagatagttgtaaataaagactaaagacattaataataaaccaaatacaaatcgttaaaacagaaaataacaagggcttaattgataatttagtctagctaagatctttacagtataccatgcatattggcaccttgaattgtgggattctggcccttgtacagaatggtttgtataagggcagggcagcatgattggcatgttcttttatgcagagcaaaatgggctagaactcgtagtgtgtttctctccattctgttcttgatttctgcctttgccatactggggatgagccgaagaggatattatttgaaagaagaaaaagaatagttgaagtaattaacatgagaatacaatggaagttattgactttctggctggtaaataagggattttgcttttgtgtaagagatgaggcaagtgttagacttctagttcattcatttgatgtataccccctgcaattaaaataccgcattgtctcataacaaaagaatgtgtagttgacttttttagtggctatcctgcccattttttctaataagttccttcaattttaagataatgctttccttttccacaagccaagatttctaataagtgaggccttaagcattttcgtagactttgttgtgatagcaactaaagtttgtataatgaaagactagcctatccaaatcactgttctagaatattttatacttcaccaaaacatccttctaggcacatctgcattaatatgtccttttcaatccgaaaggtgtcatgataattattcttgtaatgaaagctttaatgcttttgcacttgacatggatgttttctggtgatggtcattatatggtcgtttggtttatattttattatgattcattttttagtgaaggaattgttgttatactctctgtaaatttcatcattaatataatttcatttctttaacataaatgaaagtgaaggtatttcagaacctacaaaggacaattaacgtgatcttctcctggtttatgtttttaaatttgtagacttaatccttaatccttaatccaagtcccttgtttacatgtcaggggtggccgctcaaggatcttaag

SEQ ID NO: 7788 - DNA, 1544 bp, Cucumis sativus
  Intron number 5 from transcript Cucsa.228220.1 (locus Cucs a.228220) derived from phytozome v7.0 (chr-ID scaffold0193 3; pos 181948 to 183491 reverse strand)
gcgtgcaaccattagagtattacccccgcaagattgtaagcctgcttatctttgtcttgttctgtagatagctaagtctctctgtctctctgtctctctctccccttccttttatttatttttaaaaaggaaacaaacttcgttaacgacatggaaagaaactaatgcttcaaaataaatgacataaataaataaaaggaatcaagcctcttcattgattctactgcatgccaactcaaaccattttcgagttggacagatgagagcttttcttgttcaagtcagcaattttctcctcaagacacagtgacactattatttgcattcaattagcttggaagatgaggatgctatggttgggatatgatgaggatactatggttatgtaaacctagtttagatagcttggtgcatctactaatcctgtctttcagtttccatggctcattatatctcgttgtattctgagcaatagtctcttttcattttatcaacgaaaagtctattacgtttcaaaaagaaaaaagggaaaaaatctgctagcaacgtatttatcaaattaacccatatcagaaaaggatatttttaataaacaaggccccctcaatagttgaaacacattggcacttagagaaccataaaaaacccgaactgttttggacaaagaaaagatgttaaaccagcatttagaagagaaggggcaaataaagaataaatgcattagttgctcactatccttcaagcacaggggacacactgatggcagtaaacaattattgggaagttccctttgcaaagtcttggagcaattaagaagaccgaatgccataacccaaaccagaacatttattctccttgggatgctggatttccaaaatgctttaaagcaatcattttccaaaggggaaggaaaaacatgattaatcaaactgatttgttctttagtcttaaattgatcatttaacctatatatctttacaaattatttgtaacgataggatgtggaaaattccaaagatgaatagaatttcactctttaaaaattttcaaatatcaatatactgattttcaacaatttctctacatttttttcttccctttattttattttattatttttttaaaaaagatataactttccattgatgaaaggacaatagacttgacaaacttgacaagggagggaaatttaaaaaaaaaccagaaacagtaacgaaagaatgaccttacttgaacaagatctgttctctaggttgtacagctgtgtctttgagttctaaagaaaaataacgaaagaacaatactaaaatagagcatgagcataataaaacatgaccctattaggcaatatatagtaatgaaataacaataacaattaatttcttaactttaatggttttggattacttattccttgtttatgttattgaaaaacattcttgtttttttttcacccatttttattataattatcatttttcgttgctattacttctaatgttgtgttaggttacatttctacacttcgaaataacgttcgatct

SEQ ID NO: 7789 - DNA, 724 bp, Cucumis sativus
  Intron number 14 from transcript Cucsa.337070.1 (locus Cuc sa.337070) derived from phytozome v7.0 (chr-ID scaffold033 56; pos 201120 to 201843)
caggtatgtataatttgtctaaataaccattgattcgtaatatttctggaatactatttctcttttttttattattcatagttttttgtttgcttagaagtcatcactcatgggataacagcattgttttttttgcctagcctagatttaaaattttggatttggctggatactgttctagatttgtgtagttatttggcgaagagataccattatcaatcttttgtttgctcagtgtgacctgtccatttttaagtgttaaatgttttacgaagttgttggggttgttagcaagaataaaatttaattgataaatgttgtaaattacatgtaaaaagaaaaagttacttttccagattttaaacctccagtcttttgcaaaggcaacatacacttttagttaaaaagttagatatctcgtttattatattcttaccaattgtagttaacatggacgtacaaggggtactagcatacatatgacatgacatggacatgatcaaatcacacatcttaaaaaaaaagtagaacattggatgtcgtgtatattttattcttaccaattgaagtagcatgttcaacttcatgggtgctgatttcatcaaggaaaaagcttttgtttcttaaataaaaatagaaatccaagtggtcgttgagaaagtgtaaatgcttgctttggaatcttgcagttatatcctccggaggattggctagttggttcgtc

SEQ ID NO: 7790 - DNA, 1647 bp, Cucumis sativus
  Intron number 14 from transcript Cucsa.114410.1 (locus Cuc sa.114410) derived from phytozome v7.0 (chr-ID scaffold009 62; pos 256672 to 258318 reverse strand)
gggaacttgttcgggttgttcggcctggtattgaggtgagtttaagttcccttttacatatcaaattttagttctttgggtccatttgataattaaatactttttcatatttttcaaaatacaagttttcatttttactaagaatgttatttgtcctttttatttattcttttatttgatgtctgatcagaaaccgtatttgaaaccagaaacaataccccctcccaaagaaaaaaatgttttcaagtatttgagatgatgtttttcggtttcatttctttataattgtgctggctttatttcattcattaaagtaatttgtttatcttcttaaaaaaagaaaccaatagaagtatatataggtttactaatggtatcgttgtaatctaagagacaaaaagagaactctttgtaagaatcaagtcaaagtttttattatcaattaaaagtcatgaatactagaagacaactctatatttatggagaattgaaaaacaaattaatcctaatcctaattaatataaaagctattgtttttataggaaacacaaaaaactttaataaatcaaggagaccagtcctaatcctaatcaatcaaggatgctcatcctagtcgattaaggattgaccaagatatccaaatgaccctaaccctaatttatcaaggtaaataatttaatcctagtcaattgaggattgaacaagataccgatatttaccataatcctactacataagctatctttactctcataatctatttctaaatatatatttaaattctttaaccacattttagaaaacctgattaaatttctgaaagtatatgtacttttatttttaaaatttggccaaaatttcaaaattattcttttgagagtgaaaaaaaaaaatcttaaaatttgaaagaggttgctaaatatatagattttgcttcagcagtattcttctatacaaacaaaaggttgcttaattagcttaatcttaaaaacaaaatcagaaaatacgtttcaaagagatcataggttttgcttcgttagtgatcaaaagtagaattttgtgaattttttttaatcgaaaataaatcttttcattgcagaaatgtgaagagacatgcttaaagtacatgggaacaataacaataacatatgcaaatacaaagaaatacttaggcatcacccttctaaatacaaaagagtcaatgaacatagagttgtattttgtgcttttagatgtttttggtagtagtttagggtttaggaatagtatattaatcacgttttttatttcttttttagtgtgattctatatcttcaaatttttaaatttaagatttggaaacactaaaaagaaacctacataacagacattcactaattctattttattcaatgaatctaaatataagaaacaatattcaaattgtatatcaaacaagctcataaatttttggaatttggaggcttataaaatatttaagaacgattgaaagtgtgagtaagatactaaacaagcttatatttcaaataatagaaattagaaaataaagaatacaatggatactcatagtgctttaaataatttctctctttttttttcacaacatccttttccttttccaggggcaaggtttcgacttcaaacagt

SEQ ID NO: 7791 - DNA, 5098 bp, Cucumis sativus
  Intron number 13 from transcript Cucsa.055320.1 (locus Cuc sa.055320) derived from phytozome v7.0 (chr-ID scaffold005 98; pos 62147 to 67244)
cgcatacgattgatactttggttttcacaccatttgtaagtttgaactttgcaaacactaaagaactcattatcatgcgtgcttggattaactttcttgtgctagatgtgttaggggcttatgaattttggaatgatcatattgttataacattatcttgtttcttttccttcaatttggagttcagtttattctcaccttattttaggcttgttgtcttttcgagaatcagtggatacttctacctttcaaaatttttaattatgtaacaagcctgaattaaaagaacccaagcaaattttagaaaactactttcatccaaaataacaagaccaagatcataattgcaaaaaaaaacctggtgatggaggactaaaggaagacattaatcctaacctcctcccaaacctccttgccagtttctcaacctccctgaaagttctattgttcttttgcaactgaatacaccacaaaacaacaaagaagcctgcctgcgcaagattgtgcccattcccttaagagggagattcaaaagcacctcatccaacaacaaacacaaacacccatccctgcctcgagcaccacacactaaacaagattctccaatggccccaaaagaattgagcaaactgataatctcataataaatgactgaggtcctcctcatggctcctacaaagaatgcaccactaaacgaaatggtggaagaatgcctttggacatgatccaaggtatccattttcccatttaaaacctgccacacgaaaaccttaacctcattttgaattttaactagcattagagaagtagtttgaataaccaccccagtgttatgaggaagcatcccttaaatttaattaaaagcattttacaaatcctaaattgttatggccaagtatgactagatagatagtcatataaaagtataaaaaaattcaacaccacagttgacacttaaacaaaacttctaaaaagatatctttaacatcactacgagtggtattaatagaattaacttattcgataatttttttaatgtctcaataataaaggtttgattctcattagattgctggaggcagctcttctccttttaatcttcattaaatgttgtttttattccattaattaatatccagatttagtgggttttgtcttaaattttttgttattatgagcaagttttaattttttttgctttgtttcactttatgtactttgagcattaatctcatttcagtaaatcaatgaaaatcttgtttccgttttttaataagggtaatagttcaaattgtcacagctcaaaatattattcctttagtcatttgcattgtagcgggcgtagcgattttaagccttgtgtttttccaaaggcataagtctcaaggctaaaagttaagagtagacatacatctcaaggctaaaagttgagagttttgcctcgagacgagtctcaatctataagcctcaatgacttcagtttgttttgaggttctatggtgttggccaaaatcctctcagggttttgactgaaagccaaagctagagtgcttaggataaatctggcaaggcctattcgttggattctttggcaagagaaattctggagtgttataagataagttgagctctcctttctttttgcaaccatgtacagtttacgacctctacttggagtgcccaacataggttgttttgtaactactcgatggtcaccatcaacttagattggaaggcctttatgaaatccttcctttgggaggccggagttggatgccttatccccttgtaccttggtctgttttttttttttgttttgaaacggagacaagcttatttattaatagaaaattcaaagtacaatagaattatacaatgagaataatagtgacacctaaaaatagaggatcgggaggtcaccaagacatctcaattaggttgacaccctcttagcgccatcatcatatcccatagaaacaacaagagaacatataggtaccaaataaaccagaaggcaaacaaccatagaaaaacaaagaaatcaaaacagagattaaaaatagaacccaggggaaataacagtgtcaaaacaggccaccaactaccaaaagaaaagtatggaggagataaaattcctaaaggcccccaaacatgtaaaatcctatagttaacaaaacttgaaatgatttcctctaaaagaagtgaaaaatgtaaagatgcagagtcttgagtattctgtggattgcataagattatcccccattaaagtggttggtggatgaaagctgtccagtttagacatatacatatatcctgaatagaataatctttgaattctgcattcaaagagcaccaggcggctgtgttcctttttgtcgtgtccaaagtgtccacccagctcctttccttgtgaaaatgcactgattggtctcagaccatatttctgccaatagagcttttgccatgtttacccaaattagtctcagcttctttggcaacaaagggcccctcaacaactggaaaacattggagcttaaagatccatcgaaagcccaaaccacgttaaaaatagggaaaatacttctccagcaattgaaggaataggggcataaaataaataaatgtagtaaatcctttaagcatagagggcacatcgaaggcagcaaacacttgtaggggatttttctttgcacgatcaaggagtagtttaggagactgaatgtcatagtccaaattaatatgttgactctccttggtctggtggtcttccaaagagttttatatatatctttgtccagcaggttaatgaccatcctctactatcttccaattttgtttctcttagaagagaggaggagcagcaaagattggaagtccaggatttcatcatttttcagaggtctacgaaacactatagacattgaatctgggtgcaccttggtctgtattttggatattttatttctagctttagttgggatatgttgttttggtgttaagggagtgtcatcctggttgaaatgtccgggtgcatcttttgattccctcacttactactctctaggcttttttattacgctcattgtataactctcttgtacttaagttattattaataaagtagtttgtctctgttttttaagaaaagaatctgtggccatgtcccaatgaaaagcaactgaactgttaggaagcatggctagattttattttatggctatttctatttttatttttattattaataaaccagaaatatcaatgaacccggttattgaaattgcttaggatacccttttttagtttagcttctagaatctacctcttagatcaaaatccctcttactaactggaataaaaaaattagtagatctgttccgcccacagtgggaatgggcctagggtttcacttataatcgataatctgatatcgagtcgatttcatgattataagttcattccataccaggccagactggaatagggctagtccgcccaaaatgccaagcttaaaaggggccaatacctcaaccttcatccatattcttgagattgacccaaagccttcttcgaatattcccagaattgctctgagtatgccaatcaaaagcttcactgccatgaatacttcttatcacttgtctccacagtgcggtatccttctttgtgtatctccacccccatttagcaaggggagctgtattttgagtgttgataccatccaatcccagtcccccatcaagctgagaaggtgtgaccgttctgcaccagatggtttattttgctaccagtgtgcccctcccaaaagaaatttctcattagctttcctagagtagaagctggattttctggaatggcaaatatagacaagtaatatgttggaaggctggccaagaccaaattacataaggtatgtcttccacctcttgagatgttgaaccttttccatctatccaattttttgtgtaccctgtcaatcactgatttccaaaagtctttctgccttggatagcctcccaaaggaagacctaaatacagaaaaggaagcttttccgctttgcatcctaattttcctgccatttggagtaattcttcatcccccacattaactccactgagtgtagacttgtcccaattaactctcttgccagagcaccattcaaactaattaatagcttcctttaacttgatggtctgttttgtgtggagttttgccccttgcataacattatgttgtttttcatcatctctctctcacacacacacccactctcacacaaaagactggttataagattgaggaaattgtggtggactttttgttttgagacatggagagatttctggaggcttgtcctttgctatcttttgagttgtgtggatagggagaaatatcaaaacgttttagaggggctagaatgaggcatacattgaaaagaacctaaaacttgacgacctcatcatatattttctatacctgacaaccacatttaaagcttgttgattgaaattcacaaaagttaaaattgctgtttcaaccattaaacaaggaacaagtgttcaacctcaaatatgaagctttgctagtaaaaacccatctttttgtcactaaatgtgagatttttttttcccatttctttcttgcttcgttctcatgcaatgcattaattctactactttgacatgccatttttatagaattcaattaaatatttgatagttctgtccgtgggttctgcttgcctgtccatctaatggtgaaatacttagtttgagtctcagacttcccataagcatcttgacatggcatggaatgatggaagttttgtgtcttgaatcttgaacacttgtgagaaattcactacatgattcattgtccataatttgtactttgagcattaatctcatttcacttcagcattgaagaggcttaaacatttttctgaagcgatctacttcaccattgtatgctcaatatgtacggtactgttgtggatggttgcatcatactgaaattatgatcttcttttaaagttggagtttgcggatatttacactatttctgccactattttggcagatcaaactttcaatttat

SEQ ID NO: 7792 - DNA, 5255 bp, Cucumis sativus
  Intron number 13 from transcript Cucsa.365430.3 (locus Cuc sa.365430) derived from phytozome v7.0 (chr-ID scaffold036 11; pos 3170844 to 3176098)
aactgtcgcggtgtaattttttcaagcttgttacggttagtaaaggctggcttaaattctagcatgttttaggttttttttataaataaaatcagaaaccatgtatctgttaatttatatcacatgatgagaagtagtgttctttgatgaagttatagttagccactagacagcatagaggaagacactttagactaattatatccttcctgctgctaaggttatcattatcatgcatgttcttcctgaataacctgaaatttagtcaggttattaataaggaaccatgatgcacatccatttttgttcacctgaaatagggccttagcagagtgaaaatgattgaaaaaccaagcttttatggccacataagctagcaacatgggtcgacgataacaaagggcctaggcctacaaaaggtagcttgaaaggagccaaacatgtacaaacttcgatataagaaaggtgtccaatccaaaagaacaatggcctaatgagtgaacaagtattcagacacatgctcagtatggtgttgaacttggccagggactaaactttccttcaaaccaaatgctgcatataatcgccagaaagccggccttcccacttgaggatggggggtgaattagaatgtcttctatcacaagacatcaatgcctttacgtggcaaacaaatcccgaaaaccttaaacaagtagtctcaaattggataagcgaagtatcaactttgaggtaaactgcccaagttcttagacaatcctatggagaatgtattaatgctacctcattaagaaggaagagagcctttgaattcaatccatagggttaacactaacaccccatgtaagatctgccaagcaatgctttgtcttggtgtaactgtaaacacacttttttctgaccatagcctctttaggtgtttgggttcttaccccatttgtttcattttatcaataaaataaagtaaggcctgcccaatcaagaatctaacattttggaatattaaccttccattggggggggggggggtagggactacaaagaaggcttaacatgagaactgcaagcgaatcttttggaaaggttaggaccccagcatgaatatcccaaccctccagtcgatgaaggtattatccagaaaacagttgtatttgtccatcagcctgcttgtctttctatcagacaaaggtcgacgaaaaggtgaactttgttgactgtccttccaactgcataagatgatgcctaagaatgagtttgaaactggattttgagactaaatcacttttatgtacatatatatgtatttatattacagaaaagcacttgaagtgtttttgtataaaagcattgcataaaatagtggtttctcttatttctcttagaaagaaaagtgttttctttaatagaagaaataccaataaaatttggaaaatacaaataaggaaaaaataaatacacaaatatatcttaaatacaatgaagatataaacaaaaaaggaaataatcaacacttcctctcaagctggtttgaagatatcatccttagctagcttgtcaattaagttattgaattgccactttggaagacttttagttaaaacatctgcgatttgttctgctgttggaagataagggatgcatattattccttgaacaatcttctccttttgaagtgtttatcagcctcactatgtttcgtcctatcatgaaggactagattgccattgctgccttgttatcacaataaatgtgcacaggttactgagaaaatttgaattcttccaagagtttcttatccttatgccctcacaaataccatgggctaatgccttgaattcagcttctgcacttcttgcaaccacactttgttactttgccaagtaactagatttcctctaacaaaggagcagtaaccataagtggatcttttattagttgtgctacctgcccaatcagcatcagtgtacacttcgacatttaggtggttatgttttttaaacaatatgccttttcctggagtacctttcaaaatcttaagattctataaacaatgtcaaagtgagctggtccaggagtatgtatgaattaccagtcattgcaaacacaatgtcagggcgtgtatgagtgagatatgcaagtttccctacaagtctctggtacttttctttttcagcagcagcttccaattttatattctgctcaatgggagttttagctaccctgcaaccaagtaaacatgtttctttccatagataaaaaatatacttcctttggttgacaagaatgccacttttggacctagcaaacttcatgcctaggaaatattttaaggttcctaagtatttgatttggaaatcatcagctaattttttcttaacgaaagtcactcctgtctcatcattgcctgtaagaatgatatcatcaacataaaatatgaaaaccataaccttgtcagttcctatatgtttatagaacatagtatgattagcttgactttgactaaatccatagctcatgactgttttttcaaaacgttcaaaccaggctcaaagagactgtttgagattgtataataatttctttaacttgcacactttgttaatctcgagatctaactcaaatccaggtggcaagttcgtaaatacctcttcttcgagatccttgttgagaaagacattcttaatatccaattgataaagagactaatcaaaattaactggaacagatagcaaaattctgatggtattaattttagctactggagcaaatgttttcttgtctttaggtagttcaactatgtcccatgtgcaattttgttttagcttattcatctcttccattactaccaatttccaattcaaatcatgtttagggtttcctttatattccttggaacaaacaagttgattattttggatgtgaaggctttacgactgtcagacaatctgtgataagaaagatagtttgcaatgggatatttagtacattgacaggtacctttcctatgggcaattggaatctcaagatcagagacattaggtaaggaattctagcttattcatctcttccattatcagactgaagaatgtggattttagtttgaaattgggtctcagtcatattgtaaaatcaaacaaaaatcttttttatctctgatttttttgttaaaggataaagccaagttaaacgagtggtcgtttataaaggtaacaaaccaacgcttaccactaggagttttaaactttagatggccccacacgtcagtataaattaagtaaaaaggtgaggaggccttgtaagaattgggcaaatatgtggatcgatgatgttcagcaaaaatacaactttcaagatctctaaataaaattggaaacaaatatttcaagtaaaagaaatttggatgccctaatctaggaggcctaagcattatagtttctttaatagaacatccattacttaagccctgagctattttataactaactgaaacttcatcaaagtaacagaagccaccaatcatcttagcacgtccaatcgtctcccctgagttatgattttgaaaagtacaatgagattcacaaaagacaacatgacagttagcatcgttagagattttaataactggtaacaagttgcaggctaattttgaaacatgaagaacaaaatgtaatgttagttttgttgtcaaaggaatagttccttttcctgtaatagaggtgaaactacaatcgacaatgtgaatatttacattgcaatatataggagagtgattcgaaaagacaagaaggactagtcatacgatccgatgctttggaatctatgatccacagagaggagttaaggcaagagagggcttgagaaaacttatctattgtgccaaggaaacgctaggatcatcagatgatgaatcggtctttaacaacatcaggatttgatcaatttactctttattaaatgggttgttgtccacaacagtagcattagaggcatggtgatgagaatttcttcttggttagaacttctccaatttgcaggttttccatgaagtttccagcaagtttcacgtgtatgtcgaggtttattgcaatagtcgcaccagacataagatttttcatgtgtcttgttggattggttagatgtcttcaaagcattatttcagtcaccaaagcaaaattctcaactgaatcaacaagcttttttgccactcataacatgtgactttcttccctgcgaacttcagaaaaaacatcattgattgatgaaagagtagtttttccaagtattcgacctctaacctcatctaactcaacattgaggccagcaaggaatttgtaaatatgaccatcttctacagttttcctgtaatgcttttggtcttttgtgtagttccattcatatgactatcccgtaattccttggctgtagtaggacatgtagttacaactgatgtcttcaaccatggaatttactagccaggtcatgatcattgagttttcagcatcccacccggcaaatgaagggtcagctaggctagaagcagttttctaaaactttagtggtagtaggtttggtgtctgtcgtatcactaaaaaacaatcccaagaggaaaaaactgaagttctggaaagaacaaaaaaaccaggaaaataataatgaagagaatcaagcagcagcggcgaaggacagcgaccgacaacggcggaagaatgtggctagacatggtggaagtgactcaaacttgattggccagtggaaacaggcacctccctaaacgacctgtgataaaaaaggagcaaaagattgttaaacctgattccagcagcgagttcgacgatgattctggcagagaagtggcaatcgtgctctgaaagaccgatgaggatggttggaggtcagaggagagggtacaaacttagtttttgaaaaaattagggtttcgctgcttcgatacaacgggtaaaagagtaggttctcatttctcttagaaaggaaacgagttttcaatgcaaattaagaaaatagaaataaggaaaaaaaataaatacacattttaaatacaatgaagatataaacaaaaaaaaagtggaaataatcaacagactgtcttaaaagtggttctaagttctaactaggtgatcaaatacaaaaatcatttcaaactgtacctcatcacttcaaactttgagattttttcatatgagtcattgtttccgcttgcagatagaaggcgattggctgaattgttgcagcgcaac

SEQ ID NO: 7793 - DNA, 1493 bp, Cucumis sativus
  Intron number 1 from transcript Cucsa.116590.1 (locus Cucs a.116590) derived from phytozome v7.0 (chr-ID scaffold0099 5; pos 490487 to 491979)
gcgtcttggttcaaagctgccgaaggttcgacgttattcagtttctattgcttacatgtgctcgtaatttcgttgatctgaatcggtttttaatcaattctagatttgtattgaattatagcttttaattttttcatagattctgaaattcaatgaattcgagttttatgtgttactgtttaagaattatcgtctgagtaaaaatgctattgacttatgatgacattctgagttgaatttcgaatcagtgttgtgattgaaaagttatggagagtgcattacgtcggcctgggttctttcccccattaattcatttaaacttgcttccaacctgagttcacctggtttaataaatgatgaatttaggttttcgttaattttcgttctgatggaatcataccaaggttcttgttctcaagcttagttgtgagtatctaataaagagatcccaattgcagatataccaaattaaaacttcttatttgtaactttccttcatctttagtatattagtaatggtagatattgaagcattgatgtaattaaatttaccgtaatccatgagttcaagctttttggttcattcgtgatttaaaagtagatcgatgcctaggaatgaggattacaatttcagaagttcaccgcgggagttaacatcaaatttgagaaccattgttataattctaagtttcataataattaaaatttctgcattaattttattgtctataattttgaaaaccacccgttgctcctgcattctatcgatttgaaccctccctaaagtaacaaaatcaccacaaggtttacgataggagtgattaacaaaatcattatttttttttcttgctttctaaaagtaagttgaggtgtgagtttgaactttgaatgagcatcaacctttgtactttctcagttgattgttaccatcgggtgttggctattaccttaattttgaaaagtcatttagagtttatttttcttttcattacttttactgttgcacatatctatatatagttcttatggagaaaaggacttttcatattgttgtctcttggagattatgtccatgttttttgagaaaaacagaagttccacttaacatcttttgtttatgcaaccttatggtgatcacttggaggttatatccacatttttttgagaaacatagaatttacatgttatagtcaatcggagatcatatctatgtttttcttattgtactctaccttcccacatttcttttttagatttgtaatggtcttatatacctcctcttattctccggaggtgcccggtaatatccttcccggggattagtgagaatgggctagcaagaattgggcaatgagtcataaaaagatgttataaatacctttgggcgtgcctatttagccatctatatgtagattgctcttgcatagaaatatcttagatgtcatttttttttgtcaggattgtttgaagtcgtagatcgaaaggcaaagctt

SEQ ID NO: 7794 - DNA, 5031 bp, Cucumis sativus
  Intron number 9 from transcript Cucsa.291810.2 (locus Cucs a.291810) derived from phytozome v7.0 (chr-ID scaffold0276 6; pos 412682 to 417712)
caagaaagcttatcaaggtctatcctaaaacctcaataacctatttctttttactcaactatttttaatgtgatttttaatcgatttactttttattgaacatgaaacaacaaaaaatattttgtcgtttgacaaaatctattaatgataggtgttgataaatatttgtatttaataaataaatagtatacatgattttggtagaaatgtggaactttttttattgaaagaagtatcaataaaaatgtgggtgttttttatgtacacattgatttttgtagagtttctttgacatcaaaagttgttggatcagacatgttgtcccttgaagttgttcgcacacttgtgaataaacaaaaaagactgattttttaaaaaaactaaaagacaaagaaaaatactagtatacaaatgtcgtttttattgaaaaataatatatgtttgattttttttttttttttaagaataggtgtgtttgattacattaattggtttagaaaatactaatgaaaccattaaatttcaaccaataatatgatattgtccactttgagtatacaccttcatggttttgcttttggtaccatcccaaaaaaaggcttcatatatatccaataatatgatattgtccactttgggtatacaccctgatggctttgcttttggtaccatccccaaaggcctcatatatcaatagagatatagttgtttagtatacacccttatagctttactttcgggaccatcccaaaaaatctcatatcaatggagatatagttgtcatcacttatatacccacaatcatccatttatctaatcaatgtgggactttgatcgcattacaatcctccccacgaacaagttcacattacaatccccccctcccccctccacaaatagtcatccatccgccaagctctatctaagtgaactcctcttcttggagcacactgtacatccaataaagtctaaccacgaatctcatcatgacctacgtttgaggctttcgaggctctattacatctttgttcgacacctaaggatcatactagcatggttaagttagaggcatgactctgataccacttgataggacaacaaacctcctaaatatcttcacaatgacatgatattgtccacctttgggtatatacccttatggctttagttttagtaccatctcaaaaggcctcataccaacaaagttagttgtcctcacttatatacccaagatttacttatctaacctatatgggactctggtcgcattacatctttaattcttctatgaaattaatatttacgttaaaggtccttttgttttaactagtttttcaaagagaaatacactttactccacaacttgcacaagttgctgctattacaaccactagaatcgtccagatcagtaaagtgaattttatcaaacaccttatgttcatctttcatacaactacaacctcagtacacttcaatcaactttatacccttcaacactcaatccacccttctttcaacttcaaccaacttcaaattacaacataaaattcaacaaagaagtaaaatcaccataatcgacattagcaccttggccaataaactccagagcatcaattaccttaccatctttgcataaagccaataaatctattacgacagaagactatatgttggtgcaagtactgaaacatgcagtgaaacaacttaaatggaacttggtcgcctggtgtgaacgcctagactaaacatgtaaacaagtgaacacttggatgttgaacgcttaacatcaaaacaaaaacttcttagacgtaaggttgagttatggatcacactcgctttaagatattttgtggctttgtccagagtgcaaacagttcataattgtctcgtcgtccttagtaggggtgttcacggttcgatttgattcggtttcaagctaaaactacaccgaaccgcaaaatgcaaaaaaaatctcatactaaattgaaccgaaccacacgtttgtgtccaaccgaatcaaaacttaactgcatatacgattcggtttcggtttggtttaaatctcatagaatcttagaccaccaaagcattgagttcgataatttatctttttgttttaaattccaaaaaatctcgggccaccaaagaatcaagttttataaaatttccttttctattttagatctcagtggatctcgggtcaacatatttaattgagctttagaaacaaaacttttatgaacgtttctttaaattcatttaatttttttaattgaagcggttcgatttgattttaaaatcgatttaaaacattaaatcgaaccgcataagaaacgatttcaacataacacaactcgtaccgaaccgcaagtaatcgattttggttcagtttcaattcggttcgactcagttttcaaatattttattaacacccctagtctttaggataaaacaattagaaacttgatcaaagttgcaccagaatcgattgaaaccaacctacactctgaatgacattacttagaaaaaaaatagagataagttttgagagagaattttgtaagagatgtatttttaggatatactgaaatgagaagagtggagaactatatacagaggtgagttttgtaacacctcaacaattataatagcattaacgatcgagataatgcctcaatgtctcaaagactcatcgaattgctgaatgcctcaaagacttatgatggcagcggcgcacatggagatatcaataaatccacacttgtctatctcctcaacctcttcaaaacatggataacctaagcaaaactaatttttataataatatgcataagcaaaggtatctatcaacttgaacctttatgttgcgtatatgatttggaatatagtagagtaactcttagctttgaactctagctttaacaacgtctctccacacaacattattcaagtgtagttcaaaaaagctcgtgctttaacacctagcacgcgtctatctcagtttagtgcattctctagagagttttcttaaaattccataggaagttgtcctcatttccacatccacaaaggtgagtctatcacgagtactcctgtagttaggtactccgcttgacatcaattatagaactcattaagaacaaagttcaaccttttcatttgctttaggatatatcatgttactttcttaagaagaatgaaactcctaattttctgacatgagtctctccatatgatcactcttaatcagttcataccctttgaacttgtttcttgggatctccagtacaagttaggtttacctcacgagtgattcattttctatgggcttcaatcccatttttttagaggtttcaaaaatcttctcttttgctagtccttttgtcaaatgatctgttaagttttcatcagcctatacatgatccactataattgcaccagtagcgagaaacactctaatggtattttctttatgacgtatttggtttggttcacgaatggttaagttccttcctcttcttagtgtcacaaattgtcactaatcctctcgtgatcctccatttggtttggcattttagtactactggggagggatcccctcagccttccagaaatatcattgacaatctgccccattttggacctccaaattgcagatgataatgacttagctttgtaaaaaagtatcattccttctacatctactctcaaatgaggtttttcattgatggtgatgataaagaggtagtgtgtgcttggttctgtggaggtggatggttgtgtgacctattgttatggtgtccttggtgatagccagatgcttcaccttctccaccatggccaccctgtcgtccttatttctgcgaactcgatcctctccatctgaagttagggtgattccttcaaccaagattgtaattgttggagtatgggtcatgcctgatgaatgcggaagttttagtgttttgtgggcatgaatctgtggtgtgagggccactgaatcccacgcatccaatatcctttatttgttttaccacatgacctgatcctcttgcggccgcattaactttcgttaacgccatgaattgcaatagattgttcgtggcggtcatttgtccttgcaacatcaccactaagttcttatcaaaaccttcgtcattacctcacctcgttttgtgtggcaagagccaaaatcgttacctccccattcttcttgattgttggacatcgcgtccagtgtcaccttttttttgggtgtatgtccttgtcagcatatcctacttgcgaacacaacatcaacaatctattgtataaacttgatcattattgtttcacacaccacacccgtctgaccatatggacgatggtgatgctagtataaagatatcaacaaatccacatttgtctatctcctcactccctttaaaacatgggtaccccttgaggcctagaagagactatcagtgcataagggtgaccatttgaagattttgatgacaaaaaattgaatcgagatgcttcaagatttgaaattggtagtgataatagagtttctagtgcgacaagtgcttgaatgatgggagaggaaagaagagagggagagatggaaaagaagagaggagaggaatatatatatatgtgtatataatttatccaactcattaggccatgccaacctctatagtcagctaaatttaattgttttattaccgagagaattagggactaaaattgctaatttaaaatattaggaaccaaatgtatctatttttttaaaaaaaattaggaaccaaaaagtagttttatcttttttttatcattattaatttcaaaccaaagcaccttcaaccacaaacaagataccactattacaaaatatgtattatcaactttgaagtcaaaaattcgattacccataagataatatgtttaacttatgtgcataaataattatttaggtatattttttaaaaataaaagttatattattttgcaggattagaattgttgttcatcatcagatatcaacaa

SEQ ID NO: 7795 - DNA, 806 bp, Cucumis sativus
  Intron number 1 from transcript Cucsa.391730.1 (locus Cucs a.391730) derived from phytozome v7.0 (chr-ID scaffold0406 2; pos 145207 to 146012 reverse strand)
ctttgtgagcttctctttatctgaattttcttttatacatttttctattctgagttctttatggttgattggttgatgccatgtcttttgggctctttctaaaacttggttatagcatcttctgttgtgggattttgtaacccattgcaaaatttaacacgttgtaaatttattttttgagttattggtgtgaattgtttgttcatgtcctttgaagttaatgaaaatgcgactggttagagttaccaaggtttgcctttatagcgttctggttttggttccatacttggtgggtttgtgcttttgaagaggagaaaggatgctaagattctctatactcttgatgatgctttaaagaaagttatttgtatctgtatgaaatgttattgctcaaaaagaagactaaaataatcgtttaaaactttttgcgggtacccttcaaattttcagttacttccatcttaaaatctcaataaattatgatccccacagacgactttggagtaagtgaagcctccctggagttagttagatgggctatgagcataatgcaagtagttgagttctcgataacaaaaaagttgatcaaagacaaaagtcaacagttgctcccttcagtttctcaattgttctagtatagttgcatttgctgtcattataattagttctggagtttatttgtaaattcaagatatgttgtgctctatcaactaaaaatggtagtttaaatatgggaatgaagcaattattttatattgaaatatcattattatgatgcagtgcagcttcatttccaagagttaagg

SEQ ID NO: 7796 - DNA, 4260 bp, Cucumis sativus
  Intron number 9 from transcript Cucsa.142930.1 (locus Cucs a.142930) derived from phytozome v7.0 (chr-ID scaffold0107 9; pos 1234531 to 1238790 reverse strand)
ttcgacaggttccaaagtctgatcaacagccgaaggtctgtaatttactgcaaatatagagttcaacagaaagtgtttgtatgtttccgcagagaaaaattcttcaaatatttagagtagatgttgtgactttataagaaaatatgcctatgtgtgtggacgtgcatatatttgaagatttgcagtggtaaaactattttgacattcttttccttttttcccttcaagaaagttggttttataaagaggaaacgaagcaaagctgaaattggatgccatgccaaaaaggcaggttaatcccacaaactgaagccaccaagatcgaatttccaagaaaaggctccaagaatgaatggtggttgtgtactctataaaactttccttcctccctctaactggatgctatgaagattagtaaaagaaacacatcgtgcatggaagtgtggctgactgacagattaagctctatactgatgtagcaggaatggggtattatggtcaaatccttaatttattaggattaggataagtttatttggtttattaggattagaattagtttcttttattatttaggattaggattaagtttcttttattaattgggattaagattaggattagtttacttttgttcagtttctcttattaaaaaattaactgtagtagcgagtgagttaaggtaggctctctttcctctttctcctctttaccttcccttcctcttcttgactgctttatccttccggcaacctcctcccactggcagccacatggaaatgaaaagctgtaaaattactgagtcattctactgtatctggttcaagcagattttcaatattgaagatgttggtttttgcagaattcttcaagtctctaagaatcaactaagatggtttgttactgaattgtcgagttgtttcaaaatgaagaacattactttttcctcattcagaacaccctgctcaaactgtgattttatgctttcccctcctccacaatcccgagaatagtagatgatgtattagacaatgaagattccgtaatcagtgttagtagcgaagatctatcctcagaagaagtggaaggagccaagggtgttgagaggcaaaaagcagaggaaggggatatagatgcatttggagctgaattttcaaatgtaattctctcaccaggaaaaagagaaatagtcacgacagaagctagcgacattccctcacacctggtttcgttccttgaaaaatgtgtaatcactttaatctgaacagattagagaaacagaggaaactgaggaataagtttgactggtcacaggtcagccaaattacagaatctaattgtttaatctattctgtcttgtcagtagtacagaaaaatacgaagttatgatccatgaagatcctgtcctggaacaccagaggaattcttgaccattccaaagaattggccatcaaaagactgcttaaaaatatcaatccagatttggtgttgattcgggaaaccaaacagaaagagattcagttcaaatcttatccaagctctttggagtgcaaaaggaattgggtggagttttcttgaagcccatgtaaaatcaggaggtttattgactatgtggagtgaaagtaaactgtctgttatggatgtgttgcagggaggatattctttatcattaaaatttagcacattgtgcaaaaaagagtgttgggtaactaatgtatgtggtccaacagattatagagaaaggaagtacatctggccagaacttctttcacttatagggtactgcacagaagcttggtgtttgggaggggactttaatacaactagatcagttgcagagtgatttcccgagggcagatcaacatgaggcatgaggaaattcaacaaattcattggtgagtcaaaacttgttgaaattcctttaatgaatggggaatttactttggtcaagagaagatagatcagcttcaacattgttggacagatttatagtctctttcgaatgggatgaggcttttgcaaacacaagagtcaaccggcaagtatggatttcatcagaccactatccaattttactagaagcaggggcttttgaatgggggccttcccccttttgtttctgtaacagttggctgttagataagcagtgctctcagatgattaaaaattctctatccttgaactctctaccgggctggatggattttgtaatatcaaacaaactcctgagcatcaagggacagctcaaagcatggcattcagatactttaaagaaacagaacggccaagaaaaaaatctattaacacccatcgaacaggaagaatgtcaattagatcaactggagtcatccaatgggattcaccttttcttactctccttgaaacccgatctgctaaccttatatagaagggggaaaagggacttaattcagaatagcaaattgaaatggctgatattaggggacgaaaattggagttttttccattgcttcctagttgcaaaaaaaaaagaagcttgatccccactacctctttctcggaaattgaacatttaatacttgacttctacagtaatctatgtgcgaaagcagaccacgcatgttttttcccctccactactgattggcctgtagtctcaacggagcagaacaaagagcttactgcaaagttcagcatgctggaaattagaacagctctaaaatcaacttgattgaaactatgaggttttgacttgcagtattccttcagaggagatgtgaactacccttagtctcttgagtagtaaggtgacttgccttaagatgacagcagcgttcaaccatgttgtctcctaagtgcaaccaaatgagaaagaacctgcggttgtttgggatgctaatcttctaaagcttagtaaagtgaaggaaggaaggaagaattgactaagacaggtaaagcaagatgcacagagaaagcccacaagaccaaacttggctattcgtcaccttggtgaccaacataagaaagaaaactcaaacatttttggtttcaaggccattctgtaatgggaattatgaaaaagtgagttctcccaaaagtagacaaaagaggagaataattttttttgagagaccaaatagaagctttgtggtagtgatgccccagagtctgctttccatcatggagaggcaatttggtgtacaccagttgtgttacgaaagacccacacaataaacttgatgtaggagttataactaattgtttttttttgaaacggagacaagcttctttattaataaaggaaaatgagactaaagctcaaaagagaattatacgaagagcaaaaagtaaagacaagcaaccaaacaaactgcccaaagacgacctcggccaatacaaggaaaaaaacgaccaaaacaaaaaaacgcaaagaacaagctaaaaaggcgaaaaccaacagaaaaaatgaagataaaacagaaccaaaacgaagagatctaaatacaaagcataacaaaataactttctcaaaaggaaaccattcggatctagagactagcaaaaagatgcaaccggagaactcaaagctaacttgccaaagtagtccaaactcagaggaggaacaaaaaaatcttacaaatatcagcatcagcaaaaggttgtacatcctatacaacgctttaacacaccatgttgaatcttcaaattgatgttccaattgaaaactcatcactaattgttgattatcagttagttagcagatagtttaatcttctgttgaaattcttaatttccaaccaaccactagagttagttatgttgctattagttagttttattttctgttaaggtttgttatccgtccagctttctcctttgtataaataagtcttttgacttccctttcaaatcaataaaaagataaaggaaactaagtattcttgagtttgtttagatcaaaactgtatgctgcaagtaaactaacaaaactggtgtagtttccaaattgcctctccatgatggaaagcagattgtgtagtttcataatgattaatgtcaaggaatcatatgcttatctgggattatatttatttattcagtttaatttttgtttcatgtgatatcataaaacaggcttttggtctttattagtgaaaagtgctgtgtcttttcaaaaaggaagtttgtgtcgtggaaagtgaatgtaaagtaagtaatagttaatgtcaaattagatccttttcatctcttatatgttgttctttattcttatatagctgg

SEQ ID NO: 7797 - DNA, 3143 bp, Cucumis sativus
  Intron number 1 from transcript Cucsa.363840.1 (locus Cucs a.363840) derived from phytozome v7.0 (chr-ID scaffold0361 1; pos 1435500 to 1438642 reverse strand)
ccaagcgcgtttatcaagtttggaaagggagtaatgtgagtttcttataaactctgctttttttttctttttttttcccgatttgattgcgtttttcttcatctgggtactctctgatttttcatatttcgacggaatttaggtgggttatgtttggattttgtattggttttcattttcatttgatggagtttggatttttggtccaattaggtttcattgggttttgtagctcattgttttgatggggtttgattagtaagtggaagcaacgaggataaattccaaacttcctttcctgtttttgttttgtgtattacttttcttggcctagaaattgtcgagctcaatggctttagttgactagagagcttgctttccgttcttggaagcaaatggagttctttagatcataagtactcgctccctcagttccttacatccctttcaaatttttgctacgacgaaagagcaatttattgcataggaataggctttagggagattggacaggccaagtatggtgtagtcgtttatgtgagtaacgtggggcctcaagacattttaggtgacgtggcatgcctttgttatctaaaattgttggtttagagtttagtacaaaggtggagttttctgaggccaggttccggtttgtaccttttagcttggacgtgtgtgtagacttttgtctacgttatgaataattgtgagtctcttggaaggatccatattgacggtgttttatttatagacaagagttggaatggattgattgtgaatagaactcggattttttttaataacaggtgtctttgactaattctgggtgaaattaacaagatcatgggaggccttttggaagattttcaaactatgagtaaaaagttgtgaacgcatatttcaagtaccatttaaattttaatggatttggttttgtttgttcctcatatttaagctattaaataactatatgtcatcaattgtcatttacaaagaaaccagacccataaacctagggataagcatctccgtcacggatgttaacatgggaagactgttagatccaccataataagaatggaaataagttgaactctgtttagtttagtggtttggagagcatacctatagttgtgcccacagtcaaccacagtttgattactccaatgatggaaataagattagcttcttggttaaagtatcagaatggttgaatggagcacaaaacttgacatggggttgaaccgttgaggtcagataacatatcaaagatgttggcaagaattagtttacactcttgctgtcacattcaaggtagacatgtttttgtatgtatgtccttttcttttttctattctatgtcgttctatcttgggcttcaaacaaagtctataattttgctgaccggaagtcataatatatttatattgatgtttaggatggtacaccacaatttcacctttagagaggggggttctctcctgattggctacaccaatattacatcaaaagcataaccccaaaacagcaacttaaaatacttttatagtgacccctcctaacgtatgtgtgtctcaacaaaatcaattattaaataggagaatttcccttactactcctcccaacgtatgtgtgtatcactggaggtctaacacatgccttggagaagccctagattgcatagtgtgttgctgttaggatactgcctaccaaaaatactcagggacactaaaaacaacaaagaacactaaatatagaaatatatatttcaatatcaatgaagaaactacaatatacctcgatacattttagagggctgataatactctcccaaattttccaaaggaaatcccacaacattcttcacaactctaaccatactctctcatactacttattaccaaaaaacctaacaaacttgatgtctaattaatagaatgtccctttctactaatcatactaattatcccaatatattcctaactaggagccttacagttgctttgctcttgcggattcttttagcttcttggattcatctaagtcttcagtgctgtggtaaaactacttcaagacttgaagcttttgaggctattcaaattagttaacgttttcaggattataattttggcctccttattttaaatgaaaatcattttcagtagttatggaaattttcattagtaaaacccctcggacaccccagcattcaatgtatctgatattgacaatattgcttgaatgacatgtaaaaatgttgtttatatctatcttacatcatgtgtcagttttctaaatctcatcctgattcctgaaatggaaggaatcatatagaaaagttggaatctgaacgaagatattgacagatttacacttttacgtatggtagttgcttagacttcaaactcatccttcttttcctccatatccgaaaatcatccacgcatttgttaggcaccaattgtatatcaaaattggagaaagggtaagttggtagatgcagggagacaagatcgttccatgaagggaagggctttgagcgatttcttattatggggaccatcaggttgttaactatgatggactggagagacaggagagagagagagagagagtttaaaagtagatgttgttatatttcctttttcatgttgtcagttttaaggtatttctcatagagagaagggagaggcctcagccttctcaacagggtggtagtattgtaacgcctttgggctattctcacttctgatatattcagatgccttaccttgtcctcatggtttaatatggaattgaattttttgttcagttgactgatctcttgtgactcttctccacttttgcgactgtggcatctctaacgttgaattggattttttttgtaaccttttctcataaattgaaatactcattcagttgctttattattggtttccaagtaaaaccatgtttgatttcattctatccgatgagagagattcttgttttatttggattaagaataaccgtggaaagtttctgcttatacaattgtattttcctttgtctaaacatatgttttattctatacattttctgaaaacttgtttgacacctctcttgcagaagtttatccttggaggaaggctaatatttgggcc

SEQ ID NO: 7798 - DNA, 775 bp, Cucumis sativus
  Intron number 1 from transcript Cucsa.162040.1 (locus Cucs a.162040) derived from phytozome v7.0 (chr-ID scaffold0114 4; pos 1778985 to 1779759)
actataaacggttttggtaaatccatgcaaacttttttcatgcaattgacgtacacaatttagggttcatttccgtaacgtatatgcatataattaatttcatgcatgaaattaattggagttaaaattatcataatatataggtaataggttcaatcattaatattaattttaattttaatttggtatttattccaactgattatatatcataacgttttactcaatttttttctatgtatactcagaaaaaaaattacgtagtatttaaaaatgaaatattagaagaatacattttttttaaaaaaaaatggaattaagtaaaagtagatatagtttactaacaaagagtctaaaaattatgaaatttaaggctttaaattgatacaataatttataataattcttgaattttggagaatatataaatggagttttgattgtttaccaaaatttggtagaaatttagtggttagttataagatttagaaagtattaagaactaattttggacattacacaaaatgttgtaccatttttaaaacaaagtagattattaaattaattcgagactaaaaattaaaaagatttgcttaaattgttttttgttttaaatcttccatttgtgttttgagattatagaaatttgatggttttatgatctaatcacactaacaattgttatatatccccaaattgaaaattttctacaaattggatatattattatcattgtagttttctttattatttatttatttatttggttgaagtg

SEQ ID NO: 7799 - DNA, 3811 bp, Cucumis sativus; identical to SEQ ID NO: 7753
  Intron number 1 from transcript Cucsa.228180.2 (locus Cucs a.228180) derived from phytozome v7.0 (chr-ID scaffold0193 3; pos 135315 to 139125)

SEQ ID NO: 7800 - DNA, 1185 bp, Cucumis sativus
  Intron number 5 from transcript Cucsa.096960.1 (locus Cucs a.096960) derived from phytozome v7.0 (chr-ID scaffold0091 9; pos 2405366 to 2406550 reverse strand)
ttggagcaagaattcttctttccaaggttcttccttttgcatatttactatgtacaattaatggatcattttagtgttctacctaatatctttttccactgatgaagacacaaaatttaaatttcattatttaactcgttcattctatttcacatgaactcgtataaaaaaatcattttaaatgatagaactactaaaaatatttacaaatatactaaaagatgtctatctatcattgataaactatataaactatatatatactgtaacagactttattatattaacaaattttaaaaattattgtttgtacgaaatattagtatagtagcttttttaaatgcaatgagctataaagaatttttgggattggaactctctgtttatttattttagaactgttataaagaatcattttttaaatgtagagtttggtattaatttacatcttcttttgtttttgttgagtattttattttcactaatgcagctttttaacactgtgatttactttatcatgtgataacaaattttaaaaaatttggtgttttctttaaggcaaaacactttttaataaagtgatctttaaaacaataaaatcactttttaattatttgggatcaacattttttttataatatgaaaatgtcttttacaacatgtaaagtcaaaaaaggtatcttttggttgattttcaattgtgattttgatactatcaattttaatttaaaaaataaattatttcaataataatgagtgtgtttgataacaactaatttgaaatagttttaacgtgtattttaaatatttttatcacacattttacataaacacgagttttacaaaaaaaaaaaaaattaaagtaatccaaaaacagactcgtaaataaaatgtgagtctaaaccactaaattataagacatttcttttgtttgtttttttcatcgaatattgataggaattgaacttccaactttacaaagataaaatacgtcttatctactaaattataatagaatttagacaacgttcatactctttttcaaattgatagaatattaaatagtttggtatggcatattgtcctccttcaataaccatgtgttaggtttaatctttgatttatataaatatatatgtatatcaatttttcaggcctttttgatccaaaacgtgaagtctcttt

SEQ ID NO: 7801 - DNA, 8111 bp, Cucumis sativus
  Intron number 9 from transcript Cucsa.012730.1 (locus Cucs a.012730) derived from phytozome v7.0 (chr-ID scaffold0016 4; pos 453787 to 461897)
attcccaagattccagcatatttcacggtaaaaaacctctgatctaatttcacttgcaatgttcatctctaacttttttcagctggactgagatagaaaagaaactgtccttctatctaaatgatacaaggaaggctagtgcatctctgaattatcatcttatagaataataaaagtttatcataagtagtgggcctgaggcaagtgatttatcagaattgtttgaaaagtggaacctttaagatttagtgtttcttggtcagtgcatcgattcaagatgttgaaatgaatattcaagaatatcacccttgctgtatcggttccgttattttttaaaacatttcccaagctggcaatgtatttgaaagttataattcaactgctatgatactaacgtggttattgggtggagcggtcgtgcaaatttaattatatatcaccaacattcccctcacttgagggcttgaaatattggaaagacctaacaagtggaatcaattttaccttgcttgtgggcttgaaatatttaaaaggtccaacaagtggaaatcaatttcaattggggaggaaacgacaatgcaggagggcttgaacacaggatctccctggatcacttgctctaataccatattaaactaacaaatcacctaaaagcttaagttggtggttgaaagcaaatttaattatatatcaccaacaagcaaagcatattattgttgtttttaaatggagataaactttatatgaggaagtattaaaggtggtaaaagaaaatagacaccgagttacgtggaaacccatgtacctggagaaaaaccatgatctaactttcttattattatctcttatgaataaaagatactaaggggaaaaatatgacaacaagctaatgataaaaaagggtgaactttccttggaccaagcctactaattctaacactccatctcaagttgggatgtggatatcgacgaaacccaacttgctaacacatgaatcaaaactctgtctgagaagctccttggtgagaacatcaaccttttggctcgagaggatgtaaggaatgcatatgctaccattgtcttgtctttctttaataaagtgttgatcaatctccacatgtttagttctatcatgttgaactgaattattggcgatgctaacagctgccttattatcacaaaataacttcatcaatacttcatagtcctgatgaaggtcagataaaaccttttaacaaattttctcacacatccccaaactcatagtcttgtactcaacttcagctctacttctggctacacccccttgcctgtactcctccaagttatgagatttcactagataaaggtggatttcctatcaacaactaactctgcccagtcaaaatcagtatagaccttgatagctctcctgtaagtcttctttagcaacaatcctttaccaggaattgcctttaagtactttaaaattctgttaattgcctctatgtgttcctcatagagatcttgcataaactggctaagggtacaacataggagatatctagcctagtatgtgacaagtacaactttcccataaggcgttgatatttttctttctcaatcggaactttatcaccgaaatttcccagtctacagttgaagtcaataggagtatcaacaggacgacatcccagcatacatgtttcagtcaacaaatcaagggtatattttctccaagatacggagatacatttttctgatctagctactgccatcccaaggaaatacttcagattcctaaatctttaattcaaatttatcacccatctttttgttcagttggatgatctcgacggtgtcttccttagataaaacaatatcatcaacataaacaatcaacatgagaatctttccagtcttggagactttcgtaaacaaagtgtgatcaaattgcccatgactatatccttgggacttgacaaaagtagcaaacctatcaaaccatgctctcggtgactgttttagcccatacaagatttctagagtttgcaaactcgatgatcaaactgggcttcagaccctagagggggctcatatagacttcctcttctaagtctccgttcaagaatgcattcttaacatctagctggtaggggtaaatttttattcacagcaacaaataacaagactaacgatatttagagtctataactgcagttgtcaatctttattcacaactggggaaaaagtttcagagtaattgacaccataggtcgaagtaaacccttttgcaactaacctggccttgtgtctgtcaagagttccatttgtcttgtatttaagtgtgaacacccatttacttcccactgtttaatgccctttaagaagagtatagatctcccaagttttattcttttcaatagctatcatctcttttataactctagttttccacttagagcactctaaagcagtgtggatatttttaggtatcatggaagagtcaaggttggttgcgaaggctctaaattgtggagatagactcataggaaacatagttacaagtgggatgttacttacaggtcctgattgctttccttagtgcaataggaatgtcaagagaaggatcatactcatcaagactacctaaatgatcttgttcagtcagatatcatccgtttttgctctgacctcagattcatcaatctgcccttttttcccatatcttcaggaacaacgatatcgaacatgtcattcacgctcattttacgatcaacacatgagtcaataggattagtcatactttgatctcatggaggttcagagtcttggactacagccgactgatcagtaggagactcaattttctttttgagattcctcttatagtcggttttaaagggaacttggtttgtaggtagcaccatgcgatgaggatcaaggttaggtaagataatagaggtaggattggtagactctaaggaatagttagactcttcactcacattctccccttaaagatgactaatgggaaagataggtcaatcctcttgaaaggtgacatccatagtgactaagtatttatgagggtggaaacattaaatagctccgttgatgaaggggataccgaacaaacacacatgcccaagctcgaggggtgaatttagttggttaggtctagagctataaacataggctgtacacccaaacacacgaatgggaacttcaaaagtgatgcgggtagagggatacgactcattgagagaatctaaaggagtttggaggtggatgacatggggggcatcctattgatgaaataagttgtagtaagaagtaagaacatcttcccacagaaaagaagaaagggaagtaaacaacacaagggaacatgctacttccaaaaagtgatggtttttccgctcaacaacctcattttgttgaggggtgtaagcacacaagctttggtgaacaatccctttggaggatagaaactgactaagggtatggttttgaaactcacgagcaatttttgcattgaactgcgtttctacagtgtgctcgaagctttggaatatagaggaaacctcaaatttatcagtgataaggaagaactaggcaagatgggtatgatcatcaataaaggtcacaaaccaccgttggccagaggaggtagtaacctttgagggaccccaaatgtcactatggataaggatgaacggttgggttgtcttatatggttgtgagggaaaggaattcgatgttttgtttgaatatacatattgcaagataaaaaagagacatcaattttagggaatagatgtggaaataattacttcatgtactaagggactgtttgggccccagtttctcactgttgggttaggttgggttaccataaccctaatccttgtttggggcccaatttatggaaaccctagttttagggtttctataatccccctaaatcccttccacacttctcctcactctgccataacccttcccctcactttgccgtaacccgtgtaataccccgattttctgcaacatccttccctcaatccttgttgtctttttcttctttccccttcctctctgcgttttcctctttccctttcgcctctccattttcctcattttcccttcccctctctgtttcctatctctgtcatgattcgtttctctcctctttttttagtttatgttcaagtttcatagctattatccgaaacttgtgctctgttttgtgccaaatgaatgacggtgacgaaaaggagaggttagaatagcgatggcagctcggaaagtggttcgtattgggattgccctagtgggatttggacttggggttaaatgagattttcttagcaattttgtttgtgaattataagctattttttgaaaaatagagagagatgctgtgtttggagctctgtttttggggatgggattttgttgaaattattgggttttgaatattcataatgtgttaagttttgtggttggtgagaaatgggtatcaaaggaatttgctttccagataggaatctttgagtagaattatatttctattttttgaacttcacatttgggttaggtgtttatctattttaaatcatttttggtctgtttagtataatggataaatgtataactaaatttctctatggatatataggagggttttttgttataacttataattaaggtttcttattgatgtttaatttgtaagaacgggagaaacataaagattatttgtgtgtgggaaaaatccctttttcgttggagtttaagcaaatgggatgaagagaaaattccaaaaatatacgaagagaagttgagtagaaccaaagcaaactcttgacatagcaatttgcagttctatgaacactcttaattaaagatataaaattattgtcaatttagtcaactgaataaaccttgtctacaaaaattatatacataaataagttttgagaattctccattaaagttgtgtttgaaataaactaaaaaatttaattgatatgagagtttgattgtttaataaaattggttgtgaatgtatttattaaaatcacttcttaattaaacattcattcttagaattttttttttattcataatttgatgttctttaaacttctaagctaaattttgaaaataaaataaaatattggatttaatatgaatatatcacaacactacctacataatctttttcccaaatacatattatcataaaactatcataacactatctacataattctttccccaaacacatcttatcataacactatcataactctacccacataactcttcccccaaacacatcttatcataatactaccttcataaacccttcccccaaacacaacttatcataacactagttttatcataactctaacccttccataacccaacccttttcccaaatgacccctaaaagtttgggtgacccaaccggaaatgctacacgtacaatcttgtttagaaatagtaaatattaagatagtaaactagtcctagaattactactagtagaggtgtcatcgttaagaagatagagtcccctgctatgttggacagtgctaatcatcctccctaagctcaagtcttgaaaagaaacaaaatcaggtaagaagtggctttgcagttcaacttacgagtaatcttgcttatagatagtaaattataggaaatcctaggtgcatgcaacacattttggagagagaacccctcaaacagaaaagtttgtcccttccagcaattggagctaaggaactatatgctattttgatcttttcattactagcacatggaatataagaaacaaaattctcagaggaacctgtcaagtgatctgtagtacctgagtctaggatccagggatttttcccatcgacactgataagattaagggactgaggcatgtgtgtttgttgggtattcccttcaccaacaaggctataaatgtttccaccgtcttcccgtaaatactttgtaggtaggaccatgggacgaggatcaaggtcaggtaaggtaacatgggtatgattggtaaacatgggatgagatggaatatgtagtttccaacattgatccttagtgtgccacggtttcttgcagtgatcacatatagggatcggtttcccgttgttcttctcactatcatgggtagaggatctagcaacgaagtcagtagcaggagttataacattcatggcattcgtgcggtcttcttcaagacagatttcataacacacttccatcgaggaggaaaggggtctttggcctagtatacaaccacaaacaatgtcaaacttgggattgagaattgcgagaaagtcataaatttgatccaccttttcaagtctagcatactttatgctatcattcggagtatcctatattgtctctctacacaggtccatctttagccagagtagggaaagtttattgaagtaggaggttccatccaaagttccttgcttgtaatcgtggacttatttcctcactgtatacaaatgggagacattctgagactttgaattgagtttttaagtggtgtccctggatccttcgcagttgttgcataaagtagaggcttgcctctttgtgatttcatactattaatcaatatggatcggaaaaatgagtctccccttcttcaaaaacgttcatgggcatcgccgggtgggggatggagagtctcctctacaagaaaactgaattggtgacatccttgaagaaatgctttgatcaattgagaccaggaaaagtaattatgatgaccattcagcttctctcttggaaagatgtatgtagatggtgccaaagaactaattttataatttgaggacaaaatagggtgcgaagttatcgggttcttaaaatacatcagtaagtcggttggtttggattgtgtcgaagtttcaccaacttcaaaccttgatttattatggagttgattgatcctagtgccatagatatgcagctgcagtaaagaattagacaacaacgcgtgaaataagggccgtggtgtgtgggtgtgcggctggatttgagaaatcaagtgggagtaagccggctgaatggtggaggaattggatggtggcacgtgggcgtacacgctaggcagcgattgcacgtggtgaaaaggatgggcatgtgcagctggctctaacggtaggatggaactacacaccgcggcttttgaagttgttggagtagtttttccattgcaaagacgacgacgtctgcgttcaatccagcagggtgtggcttctcgtggctagtgttggtttcatcaagttcaatgtctagggtttcatctttaccccgttctgatactaatattaaaggcggtaaaagaaaatagacaccgagttatgtgaaaacccgagcaccgaaagaaaaaccatgatttgactttcttattattttctctaaagatatataaatagacaacaagctaatgataaaaaggaaaagacaaatagggtaaatttttccttcggcgtaacctactaattctaacccactaattttaataggaaggattcaaccaatacccttagtgagacatgttcgtcattagtcggagaatttgtaaagtccaaatggttttctcgtgagtcaaaagttttaagtttattttgtgacctacccatgtctaacacacatcggacaattgttagagctgctgtgttataccgtaccgtactttttagcatgttgatagaatattttgatgtcccctctctcttttagtttgtttttataaaaagtaaaggtaagtagtaggaagttgttttcagaaatttcttttcttccgttttctctataatacaagtgggaaggagggatttaacccacggaccttttggtacttagcacatacaaataacagttgagctaagcttttgttggtaccttttttccatctttgaccgaaatacgatacttcttgaatatcataggtttttctcctgattcgtaggatcgtagcactcaatccattggttcatatatctgcgttggtggttgttagattgacgcatcttctgaatgcatttgtagggaactggagatcttacgaccgcacttattcttgg

SEQ ID NO: 7802 - DNA, 2771 bp, Cucumis sativus
  Intron number 4 from transcript Cucsa.242310.2 (locus Cucs a.242310) derived from phytozome v7.0 (chr-ID scaffold0204 7; pos 2068953 to 2071723 reverse strand)
taatcaggtccataagaagtattcgatacgaaaaggtaagtattttcccatgagatttatttatgtttcgctattcagtttaacatgtagaagaatagggttttctcatttgtggtacttgtagttacttgtaaggggaataatttaatcacttgttgattgataacattgagtattaggtgaaactagcactagaaaaatatatcaggttcagattttctctccctccccctccccactttatgaaacatggccaataagcttgcataagttttccccactcttcctaatcgattcatgcacaaacaagtttatacttatttagatatttaaaggtaataatatagaaaatgatactaaatgtgcaacatgaccttcaaagatattgagcattatgctaggcttagatttcaaagacattttgtaattgtttgatagacgcttttttgtttagtttgagtcccttcttctagttaggggcttcctttccgtgtgtttggttcttttgtatgctagtgtattctttcatttttttttcaaatggggatttctatataaaaaaatattggagatggtaaaaatctttcaagcatacttttagacaaaacaatgcttcaccgaagatgtagaaggagaagaattcgaacgattgcttaaagtttttctagcgatgattccagaagtatctatacttgtggtcaacacatggttgctgtctgggaagaggttggcagtttggatattagataggagtgaagctaattcatgaaatcacatgatcagtaaaggccttcctagagtgctcagacagcaaaccataaatttttttacaaagggcttcaaaataagtatgggaaattgtgattgaaggtagtagcctccctagagtgctcagacaacattggatcatcttttatgagtttttaaaagtcctcaatctccctgatcgggacctgggagtaccttatacctggaggttcgaaggaaaaaatgccataatcattttgatggaaggaaaatattttgcaccttacattcccaatctccagacctctcactcagatagtcagatggttcgacacaataatcctattaaccgtcagttgcttctctccttcaccctttcccacagataatttctagtactcttgaccatctgcactttgacgtatgcctggattttggaaggaaattgaaagtactgtgaaatttcacgtttgcatgtcagtgtgaaaacaagagaataatttttaatattgatctgaggtcaacttcttgaacgtatacacaaaggccttcttgtttattaaactatgaatttattgcctgtgaactctctatctagtaattgtgtgtctgtccttgaaatccatgctaagactgcaccaaaaatgagataaagattcaatattatttaaaactttgctgtttgtgtttattttttattttgatgatataaccatttagttacttttcctttcattctctaaatattgtgtactcatttttgcaaagaaagatttaataattgtattattatttatttatttttcctttagattgacttttcttgggaccaaaactacttctttttatttccacataacttcctcttatatattgactggagactactgttgcatggaaatagggtttattttatatgcgcgtgtgtgaatttcttaatcttttttattaatgaaaaattgaattagacttgatatattatttggagataacaaattagtttaatactgtaattagtgttaattttttatttttcaaagataagagaccatgctttcattgaggtagatgaaatgatatacaaggacataaaaaaaggtagtccaagatcacgatagtcccccatactcaattaaatggaggggccaatccaataaaataaagctaaagttacaattacgaaaacctgttgtaacaaacgcccacagacacccacaaaggaaatagatctaattgtatcccaaagttcctctccaaactgatccaccccatgaaaaattttactacttccttttaagccagatagcccaaaaaggccacaacacatagccaaaaaagaaaagaaaaggtgaaatacccctttttgtggattgatttttttttttgtttcccttacattctttcattttgttctcaatgaaaagttgattcttgtaaatagaaagaaaataaaaaagtaaaaaggtgggttcaagagtatctcctcaaactgttcactctatcacgagccaacacaatctcaagagtcctcaaagaactgcaattagtgttttcagaaggtgaggtcctatccaagaaaacaaaagaaatagtgttttgaagaagttgtcacttaaaatttgtccacctccattttttattttataatttgtttacttttcgtcactaggactttttgtaattggaagcttgttctcgttcttttggacggagtacttttctgttatttgttttgatgtctttttgatcggttttgttttttgtatgtcattgtattctttcaactttttttgtggaatgttgggcttcttaccatttttttataatatcaattattttccattataaatttctaatgtgtttgtcaactgacaagaggcatgttatcctattcaggggattgcttttaactgaaaaatcctgtacatgaaggaaaattggtgccatgtgtttatgcaaattttattgtttgggatttaatgttctctttatgtttaattacgcagacacaaaacaccaattca

SEQ ID NO: 7803 - DNA, 3381 bp, Cucumis sativus
  Intron number 1 from transcript Cucsa.126330.2 (locus Cucs a.126330) derived from phytozome v7.0 (chr-ID scaffold0101 7; pos 251899 to 255279 reverse strand)
gcacatagccgatagatttcctccggcactttcaggtaacagatcttgaactgcctctgctgcctctggaatcagtagctcctgaatgtggttggattataatctaaacttacccattagttgtcctcttcaatattcaattgtgtgtctcaaattttaaaatttttgtttctaaatttgtttaacatgtaaaatcctcctttttaagactcgcgctgctttcaacaaaaaaaaagtttgacatgatcgaattgagctacatcaatttacaatgtcaattgtctgataaatcttccaaaattcagcccaaaatttgtttttgttgttaatttctctttcaaaacacatcagtttcttgcctgatatatattttataactgaggtgaatacatttagatctgatatctcacctctcaacaactaattaaacaaaaatgtttaagatctcactgtatttacgttgtttaccattttaatcttaagatttgaagatcaaattggttgtatgaactccccatttatagaagcgtctttgttctgtaatctgaaatattctttctaatgagcataaatgtagctaatatgcttctatgtcgattctctcctcatttacgtttttatgcttgttttatttgttgatttcataacaaactcctcagatcccacccatataacaattttttttaagcttatataaaaactgattaaagaaaatagaaatttgcagataaaaatggagacagtttgtcaaatttaagagtaaaaatgaccctatgtgttgagttcaaatggtcaaggcagaatttgatccaaaacgtccaatttaattaaaagatcatcagacaagaaaaagtaaataaagttacctgtgcaatttcacatgttaggatatgaccttctttgctccatccttgagcacaaggcaggactagaaggaatgaaataaaaattaacaccaccaaaaataccaattttcccattttgttgagttgaaaagaaatgtttgcacaagtctatatgtatctatatatatatatatatagaaagagaggtgatggttgagtacaagttattagtattgaaatattggcacatatttaagataccataatctgaaacttgcttagagttgaacgccaagcaagttggggaattcttttaatgtgcatgaaatacatgactacaaagttttgttttttttttaatgatttgtaaactttcagatctgaaggggaaattaattagaaaaggattgtgtgtggaaaacgatgaccttatttttattgtgattatttggtttctctatccaaactaatgttttatattacgacaagcaacgacgactctccttcagtacctcttttgttttttaatctaatgtttgtccctcaattatcatactttagattttggactgaaaataatagccctttgatattttaaatgaaatcatgtagtggccaaataaaaaactgtcatatggtgatttcctttttatttactcttttctctttgttggagtgtaagcaacatattagaggtcaacaaaattatagccacaaataacaactcttttgtaagtccatggattctaaaaatataactcttttagtctttaaattttaagaataagtacacatgttaatttcaatgaaaaaaaaagtaaaaaaattgaaagatccaattcacccaagacaatacaagttgctcaacaaaaaaaaaaaggaatggaaaatttgttttgaattcatattatactatctctattaattatttgatagtcaatgaatgatttggacccaacatgattattgaaaggttttttaatttcattgtaaatgtcaacataaatactatctagaaaaacatattttcatatcaaataaagattaatagaggaaatgaaagtcgtaataacacaagtcgttttgttcacttcatgaagatacaaagatacttattttgcttgtctctccgtgaatggtgatatcttgacatttttttcaacaacaatatctacaacttcaacttttagagttggcatgggaatttcactctaaggtaacacttaaagtttcctaaaagacaatacatattacaataccattgttcaaagttggcttgttacaaaaaagagtcggcaataatattggctaaatattactaatccaagtgaggaaaagaaacattatcctaactcacactcataaattatggaggtaattatatattttcttttaaagaaaaacattttaggatttaattggttaaaagactcattttaaaggttttaaatggcaaataatataattggtttgcattttttttctttttcctatgaccacacgtctcttctcatctccacatgatttttcttctccagcacctagcgacaccaattgagatgggcgagagcgacaacaaccgtgtaactacgagaccaagcaagactaaaagatggagagagactgagtgagagtgacagtaccaaccaagcaaggttgaacaagagggacaacaaccgtgtgagactgagaaatcaagatcaagtacactgagtgagagatcaagatggagtagactagagagagctagacgagtttctaagggttattgcacaccttctgaaaaactgaccattcaacatttcttctccatcttttggtcattcattgggcggactattatttacccgaaactttttttaaaaataatttaccgaaaattcacttcgacatgctgtgaacactcggaattcacgggatcgctgctgaacaatttctgggtcaatctcatatttctcagtgatttgaccagcgcgccactgacgggtaactttccgaccgaagtatcacaaccgattgtagcgaaccattccgattcgcagtgagtaatcaaaattttcattttttctgttcattcagatacaacttcccctagatcgagatgaatcggaaactctactccaaatcccaaatactgaccgtcgaaagctgaaaccccaccttgatttcaggtaaattcgttaactgccatctaatttcctttaaattatccattaggatttgaagctgtacggtgtatattttccaagggcataaatttccctttatgtttgtttttgcaatgcaattgaacgtagtccatttttatagcacactatgttggttatatgaatgaacaaaaatagctatgattagtaattatgtttgaaggtatttgcttttgcggattctcggaattgtttccccaatatcatttggagatttaagttaaaacgattattcgtgggattgggcttaatgtgagtgcttaatagggataagtatcgatgttgtttttgcagattctgccataggttttctttctgctggggcataa

SEQ ID NO: 7804 - DNA, 3753 bp, Cucumis sativus
  Intron number 19 from transcript Cucsa.178510.1 (locus Cuc sa.178510) derived from phytozome v7.0 (chr-ID scaffold012 27; pos 758672 to 762424 reverse strand)
aaaagaatctgtaccctgttataatttcagcgcccgtgagtatttctatatcttagttatttcaactttttttttccctttcatatgttcacttcagcggattcctttctgactgtggatgacatcatgcacagagttcatcggtggatttttttttattgtctttgtttctggttctatatgaattgacttaattcttttttttaaaaggaaacaaaactctttattaataaagctcaaagtacaagaggattatacacaaagcaaaaagagaatctaaggatcaggaggcacacccgagcatctcaactaggttgacaaccccttagtgcactcaaactaacaaaagtaattaatccatactaaatcagcacttcttacaaaaagattcaatgcaaatactagtacagaaacaaaaagaccctctagatgaattctataaacagatacaaactccataaaacatccaacgctggaagaaagctctccaattaaggactatgtcttgcaccgagtaatccttgaactctttagagataacacaccatttagaggcattgagcctaactacttcaaatcaatcagaccaggcggctaccttctcttgaaaattactctggtttcgttcaaaccacaactcagaaaggagtgcttttacagcattgagcgaaagtaaattagcttgtcttttcagctttatacctaaaagaagttgatgcacatcgctgagtaaatctttatcaaacacccaattcaaaccgaaaaagtcaaacagttttacccaatatgtaaactcaaaggggcaggtaaagaatagatgctgtaagtgctcactggctgccaaacacaaggggctgattgatagagataaactgtaggagggcaattcttgttgaatcacttctgcacaattcaagtgcctttttaatcattatccaaaccagagtgttctgtgaatttgcacaaagcttttaccaattctctcaatggggggatgacatggttagatgtctaacaagtgatttgacagaaaacaactgatgtaattcaagtaggagtaatcttttctcaaatgaattctctgcctctaatggctaagagaaggggtatatattaaaaatgtgtaagtagttacaagtagttgatataactgtttttatgaaacagttttaacagttaacagtttaaacaattaaactgttttactaactattctatattacatcaacaacccgctggaatcaagagaccaaaacctcttattcggactgtctttcacctgaaatcttgaaatcaagcagtaaagattgaaaatctgcaatttcatcatccttgagaagccttcggaagaaaggagcccacgacgaacaattatggtcccaatgatcagcaactgaaccattaggaatctggacaattctatggagatctgggaaccctacacttaaaagggagattatcaatccaagaatcaacacaaaaagtaaccctccaactttcagccaagttttggaaagatcttgtttattttcttaaaaatgaaacaaaaatttcattgatataatgaacagaaacttattgacctaattaatatacaagacctccactttctttttcttttttacttttttccttttttttaaaaaaaaattaatcttcatgagatgagagattgagaaaaaccaaagaagataatactattgtgatagaatgaagagaaaacaccaaaaaataaaactcttaaggtgtggaagactatcgcacctcattgtgctctcaatttctagaatcacgggagatgtcaggagaaagtattgtactattggatttttggttaaattcttgaggaagcattctaggcctacatatatatatatatatatgtatgtatatatatacttgactagtttggggttgaacccatgaggtaatagagatgggattgctttttaccgttaggaaactcaagaggaagatttgatgaagacatttgcttggggaaatatatagttgttagatattatatttaatttaccttcacctactagcttaaggttttggattgattgaaaccttcatgggttgacctagtggtaaaaaggagacagtctcaatatctaaataataggtcatgtgttcaattcatggtggccctacctaggaactaattttctacgagtttttttacatccaaatgttggtcaggcaggttgtctcgtgagattagttgaggtgcatgtaagttgacccagacactcgtagatataataaaaaatgctttttggttgaattggttatttaaggaaggtatcgtcaaagtaggtagttcagaggtcctgtgttcaagcttctgaattgttgttttttcctcaattaaagttgatttccaattgttgagcctttcaaatatttcaagtctacaagtgaagggaagtgttagtgatatataattaaatttgtcttcgtccataagcttaagcttttgggttgaattggtgatttaagatggtatcaaagtaagttgttgcaagatgtccttggttcaataccatgcgttgttgtttcttctccaattaaaattaatttccacttgtttggaccttttttcataattcaagtctactagtgaaggggagtgttagatattatatttaatttaccctcacctggtatcataagttttttggttgaattgatgatttaagatccttaaggggtcttagagtacatattcagccagtttgattgtttacatgaaatatgcttactatttaaggacagataaataaaagaaatgaaaaaggattgccagatcaactactgaggcaaagtttaaagtaaaaagacaaggaatttgtgaataattggagatttttgaagttgagtggatttgaaaattgagaatataaaactgatgaaacgagtttgtgatgacatagctattagtatttgcagttactcagaattcagttctaacctgataaacattatttttctttatttataaaatggaaacaaagtggaaaatattggggaaggtactttgtaccccaaccattttcaagatgctagctgttgtaagattacgacaacggtaaggatgctaatagtacaaatctgcttgagcaaagtgttgaagaaggaagtggattcgttaccactgtattcaaatagttattcttgcattgctcacatattcatttcttttctatgttcttccttctccaatcctgtttctattagctgtgaattatgaaagctggtcgctgtaaggtggaaaattgtacttttccagacaataacaaatcatcattataattatatgtacttaaatttgaggggaaagaaataatctcttactctattttcacaatcttaggtcttcttatataggagaaagacctcttacatttatggaaaataataataacaataaagtagaatatttatcaatgaatgtttttacaatggaaattccaacaaatattgtttttcatattcagtttaagatggatttcttcctataaatcaattatatactcttcatttggaaagatagaattttccttttgattactattgatgttgattcttaccccacaatatgatgatcaactcatgatttgacatctgtggaacctaatttaatatatttatgtttttctttcctattggagtgcaaacttatgctgtaacagtgatgtcatatattctgcaggttcagaagccattgaatcaagtgctttcatcaat

SEQ ID NO: 7805 - DNA, 926 bp, Cucumis sativus
  Intron number 4 from transcript Cucsa.242210.1 (locus Cucs a.242210) derived from phytozome v7.0 (chr-ID scaffold0204 7; pos 1990977 to 1991902 reverse strand)
tcccaagaaaagactaacagcccacgaagtcctttgtaagtttatatgctcggtgcatgcagtcacggaacggaaaatttttgcactaattttctgaaaaaccgagtataatattatttaatttgatttcccctatgtagttaaattgatatgtttttcagtattatttgttagctgtaacgattattcttaatgatttttatttgtgctgccaatattggaacattttatttactctaaaaaaaatctgttcagatataaagtatactagccttgggccttctggtgtcctaatatgaagttcttgtagatgtttttttttgttctttgaaagacaagaagagaattagctgctggatactggcccatatataaatatttagatcagttggcattcatatagggtaccaagaagatgtattagatatgcttggtaataataataatgagattaggaaatgaggactcgttttaatttactaattaaaataaaaagggtattctttttatttataaatctattgtatatttataaatctattgtatatcgactttagaaattttgaattatataaaataaatgaagtctaaattcgcttaccgggacctttagccagataattatgtcactttggtcttcctctcagttcatttgtgtgtaaaattgtttttgttgacggtccctgtggatattgggctagagactcttcaaacttcttgtgatgcttacagcatttctttgtggtttggacgattaagatataagattgagattgccacttcttaaatatttctttgtgaaatatgatgttaagttgttaacgctgctgcttccttcaatagaaactttcttatcttaagatatctcaatatcagtatgcctaattagctttctaatagggcctttgtgattttgcaggccatcc

SEQ ID NO: 7806 - DNA, 1144 bp, Cucumis sativus
  Intron number 1 from transcript Cucsa.097400.1 (locus Cucs a.097400) derived from phytozome v7.0 (chr-ID scaffold0091 9; pos 2654677 to 2655820 reverse strand)
tgggtgtgtcttgcagcaacgtttttggcttgtgggtaagctttcgactgttacctacatttcgattggcttcaaatcagtttattgcttcattttccttttcgaaatggagttgagtgtttaaattgttattctcagctcttgaaactctttttatttttattttttttgtgtgtgtgcgtttaggtaaatttttgggtattagatcaaggttcagcaaggttggacgtgttttggaatagttaggacttgattagtgtgtcttagatccgtctttgacttgtgacagtttgttggttgtagttttgggttaattcagagtgattaattaagggtaatggtagattttggacaatactatttcgattgaaaaacatatcgggtttcgattaaggttgttgaactaatttttaacaataaagcatgatgtttgatcatggaagtggatttttggattgagaattatagggttgttgatggaagtggtttccacacccattccacaatgtaaatatatgtcttgactgttttgatttgataaatggttgaaaatgtgttttgggtgtttgaaaatttgttttgtaccatttgagtttattgaatctgcttatgatgttgtaaatgtttttctactagaaaataagttttatgtgatttgagaatcgactagtattttgtattcttttagttgattttgtcgaacaaaagtatatgactatttggcattgatatggatacgagacacaaatatgacatggtacaaacacaacgatatgtcaatttttaaaatctaggatacaacacaattaggggaagtctttatgctcaggttagaattactactgctcactattggatgaaaatgtcagttttcaagcttccggctataagtttcaattatttttatttaattttatgtgccattattgtgccataggatgtacatgttaatgattcttgactctttttcatgccattatgttcatgtagttgtaatatatatattattttggttccgtttgttgctcatatgttgatgggaatttaaataagtacatccctcacgcctatagaattgctttatgtttttctataagtaaacttgtccaagaattgaaatggagttttgattctgtcaaaggat

SEQ ID NO: 7807 - DNA, 6090 bp, Cucumis sativus
  Intron number 2 from transcript Cucsa.277780.1 (locus Cucs a.277780) derived from phytozome v7.0 (chr-ID scaffold0260 4; pos 379363 to 385452 reverse strand)
ctagagtatttgaattggatactgtcactcatcaggttcttctcatacaaccttattttcttttcttcttatttgttgctttagtactattatgttattgtccagagggttgtgttgaagaggtgatgtggatggtatttgtcctctattattgctgcctgttgtttatagtttgtcatgcagagactcatgcttgtaacttttagaataaatatagtactctgcttgttctctcataaataggagagctaccaggtcacgtttacctaagaagaaaaaaagtgcttgtcttggcaatttccttccacaggcagaagaacctcttcaaagttttgaaattgatggagccttttaagtaatcaacattgtagttgcttttgacaaccaatctccagaaagcatccttttcatgttcaattctccacaaccacttaataagagacattcttttttggagctcaaaaaagatatcgaagatgggcctaaaagtgttttctttttaatatctgtgtgtgtctgggccagctcacgggacaacctgcctgaccctacaacatttgggtatcaaggaaattcataggaaattaattcttaggtaagtggccaccatggatcgaacccatgatctcttagttagatattgagagtgagactatatctccctttttaccactaggtcaacccatgatggttgatgggcctaaaagtgttaagtgtcttctatgggagattgtatattcttgctttaatactattgataggctccaaaaatatgttcttgactccaaatctcaccatcatggtggtggtgcctctgcaaaaagagtgaaaaaaactcagaatcatgtcttcttcgagtgtccctttgttgcaaaaatctgggctattgtcttcttttcttttgctaccttgttggacaccatatcatgggtcagatcgttgttcattgatcacccattcaaggaaacaaaaaggaaattgtgggatagcataacttgagctgctatgtggaaagtttgggatgagaggaactcaaggatttttataggacagggaaggtctgcagaagttgttcttgaattataattatttaatgtttttttctggtgttaaaatattcaacttcggcactttcaccttgaatttcgttgtatctaattggaaaaacattttgtaaaccctatatgggcctcttttatatcactttggatattccattcatcaaggaaattgtttcttgtccaaaaaagggagaaattctcataatgaagattttccacttccacctcccaaggaatgatgagtcatgatctcattcccattagactaagtttcattttccaactccttgcaactagcttcaaggtctgttgataattgtcattctgaaggtttttctcttcaaccaataagacgttcaaagagacatattttcaagttgattttgaggagtctgataatgagcctattgtaagttctagtcgtgaagacttggatcagtaacattcttcattggagaaagtgaatctccaaagctctcggagaggtttttgatgatgaagctattggagttgctttaggcctaaatcttctccaaattttcaagcatcttcttaaggagatcaggagaagttctcttctctcttaaagcttgtgaatttgaagtgtatgagattcctagccactcattatgaagtgtttaagtttgttaagctacaagtcttatcgcaactgattctgtgtttactccagttttggtactctttattaaaagcagtaaagtaaagtagacatcaatttacatggaaacttgagtatcgagagaaaaaccatgattggctttcttattaatttctcacattaacaaaagattcattaccatcggtttctgttcttacctcaatctcatcaacaatggccttttctaccatatctttaggaacaacaatatcagatctgtcattctcactcattttactatcaactcatgattcaataggattagtcattccttgatcttgaggaggttcaaagtcttggatcggagccagctgatcaatagaggactcaattttctttatgagatttcttctatagtaagttcttcagggaacttggtttgtgggtaggaccatgggatgaggatcagagtcatgtaaggtaataggagtaggattgatagactctaaggtatagttagactcttcactcacactctctccctccttaaagatggctaatgggaaagaagggtcgatcctcacaaaaggtgacatccatagtgacaaagtatttacaaaaaggaggatggaaacaattatagcctcgccgatgaagaggatacttaacaaacacaaacgcttgagcccgaggggtaaatttggtttgattaggagtctaggaccaaaactatggacatacattgtacacccaaacataagaaggggaacctcagaagttaggcgggtagagggacaacataaggaaattgcttccaataggtgacggtttttttgctcggcaaccccattttgtttaggggtgtaagcatatgagctttggtgaactattcccttggaggctaggaaatcattaagggtatggttttgaaactgttgaccattatgactccaaagaattgcaattttagcattgaactgcattttgatggtctgataaaagttctggaaaacataggaaacttcaaatttatcagtgatgagaaagacccaggtaaggtaggtatgatcatcaataaaagtcacaaaccaccgtttcccagagaaggtagtgaacttggatggatcccaaacttcactatggataagggtgaatggttgggttggtttatatgtttgtgaggggaaggagacttgatgttctttggcctgaatacacacatcacaagataaagaggagacatcaactttagagaagagattgggaaataaatacttcatatatgtaaagtttgggtggcccaaccagaaatgccacaacatacaatcttgtttgggaatagtaaaatatgaagacaataaactagtcctagagatactactagcagagtatcatcgtcaaggagatagagtcccctgctatgctgggtagtgttaattatccttcccgagctcaagtcttgaaaagaaagaaaattaggcaagaaagtagcttgcagttcagctcacgagtgatcttgcttataaatatcaaattaggaaaccttagacacatgcaaaacattgtggagggatagcccttcgaaagaagaaatttggcccttcccagcaattggagctaaagaaccatcaaccattatgatcttttcattaccagcacatataatataaataacaaaattctcagaggaacttgtcaaatgattgtagccctcgagtctaggatccaaggattattcccatcaacactgataagactaaggaactgaggtatacctgactgagcagtgtctcctagagtggagggtagactgggactgctttggtttacagtagggccaaatggttgggaagtgccaacaaactcactcatttaatcacgccctgaactttgtttatcattggaggaatgtttcttacctcttgagggatgaccatgaagtttctaacaccgatccttagtgtgccattgtttcttgcaatgctctcatataaagattagcttcccgttattcttctcactgtcatgggttgaggatctagcattgaatgcagcggagttagtagcaggagtagtcagaactgtcatggcatttgtacggtcttcttgaagacgcactttaagtcataacacacttccattaaggaggtaagaggtctctatccaagtatatgaccacagacaatgtcaaacttggggttgagacttgtaaggaagtcataaattcgataagcttcttcaagtctagcatattgtataccatcattcagagtatcccatatcgtctctctgcacaggtccatctcttgccagagtagagagtttattgaagtaggtcacatccaaagtttcttgcttgcaatcatggacttgtttccttagtgtatgagaagcgttttgacgctttgaatagagtttctgagttgcgttccctctccagaaacgtttcagagcatcatcgggtgggggatgaagagtcttctctgtcagaaaactgaattattgatgaccctcaagaaatattttgattgattgagactggaaaagtaattttgaccatttagcttctctcttggaaagacatttgtagatggtgctcaatagctcgttatagaatttgaggataagtaagggagcgaagttatcgggattttagaatacattggcaagatggttggtttggattgcgtcgaagattcaccaacttcaaactctgatttattatggacttgattgatctcggtaccatggacatgcggctgctgtaaagaatcaaaggacaacggtgagtgaaacaatggcagtccataaatgaaggacagtggcagtgtgtggaggtgcaactgactagaagggcggctggacttgggaagacaggtgggagtagacccgctgagcaggggaggcattgggtgacagtgcgtgagggtacgagcctggcagcggcggcgcatggccggtcaattgaagtgcgtgcgactggttttcgccattgggctgcacgacttactctaagggtaggcccactgtgattgtcggcatgttctaaagttggtggagcaacttttccatggcggtagtgacagtgaaggcggctgtctctgtttgggtttcatctacattgtgtctaggatttcatctttacctagctctgataccatgttaaaagcggtaaagtagagtagataccatagttacctagttatgtggaaacgcgagtatcggaagaaaaactacaattgactttcttattaatttctcattttaacaaaagatacaagagtgaagataaataggttataacttatgataaaaaaggaaaggatattatgaatcctttcttgggtcaagcccactaattctaacactctttttgactttgttgttccaattggcttccagcttttcattcgtttatttatttgggtgactccagatccggatatgtattccttgtttgtggttggtttgtatttcactttcttttatcatagtattttcccctgtggttggttggttagttgttttttggcctaatttggattttttttggtgttttgtgttttgtttagtttatgtttttgttttaaggccatgtttaccgaactataatgaaaattgatgtaattgtaatgaaatttcattgatggattaattgtaatgagtttgaatcacaaatgtaaatgagttgcttttgatcgtatttacttagaattttgaattttgttacatttacccttacctctaagggtcaagtggtagaagtatcaaaattcataattttttcctctagaacaatattggtaaccgtagcggtacaacataattttcagacaattggattgagcactctttgctcgtcaatcaatttgtgtttttctcaattacagatttggaggtggatcacatgtgtcattataggtgtagaacacaagtaaacaacactaaaagtatcaaatgaaatccacttttcaacaacggggtaaatgtggcctaaatgtatttctttcttgttcagttccattttctaattgttggttctttttggtgttttccgatatttccttcctagggaggttgtatccctgaatttttttcccgtatgtctatgcatgtttgtttcttgtttttcttaaaaaagttagttggtgcattaggatttaggatgtgattcgttcgttactattgcacctgaatggttgtaagattgtcaatgaattagatttcttcattaagctcaacatccaaattatactttgccaatggctgaagaaagtacgaatcatcctaacttagaaattgtattgtttctaatagccaaaatacatgtgtgtgtgtatatattcctttttgttcttttttttctgtctttatgctgagttcttgttgctcatttactttaaaaaggtt

SEQ ID NO: 7808 - DNA, 2807 bp, Cucumis sativus
  Intron number 1 from transcript Cucsa.321980.1 (locus Cucs a.321980) derived from phytozome v7.0 (chr-ID scaffold0308 0; pos 1798135 to 1800941)
acttctccagtttcgtcaggcagctcaacacttatgtatgatattctgcttacttttattccatattttgaagttttatgttgaattaagaattatttgatttagtttgatctttgcaaattgttagtgtttgatggagtgctaatgagattaagattgaaattaattatggttaatggccatcgggttgatgtttcgttaaaacggtggatgctaggaatcgattgaattcgtgggatggaattggtagtctgcgttttatgttttaggttgcttttttttaaggtgcgtttgttttgtcgtcttgaatgtgtggtcttctttgtaaaataatttaatgtttagggtgggtgttttctctagggtttttgagatgattttagactctaggtacatcaagagctgtatattagaagcatgggcttttggtagaatttgtgggtttgagaattccgagtgctggtgaattcgcataatatacttgcatgtgtcaatgtaggggtcactattcttgggcagtccgtcattcttttgatagttttgtaataggcttcattgatttgttactgttgtgtggatgaccgttccgcccttagttttagtacatgggaaatacagcagttgtctttggtcattttttttctagaaatggaaacaagacttccattggaaacaatgaaaacaagaaatgcatcaaaggtaagagaaaatattacaaatagctcaaacttaatcattcatggaaaataaggccaagcagaagaactctaattactatgcacgggcggaagtttgcttctacccattgggatagttttttttgtaacacactggatgggttttatcgtatatgtactttcatcccatcgatgaaaggattatgttttcgataaagttttacttctatagggaatggaggcagatcgactcttgttcaatttgtaccttctaatgtcccattgtaacagttatctctgatcaaattactttctaaggtagttagatgctgaaacagaataggggaacgtttccattgggatggacgaagtaaccaatggtagtggcagaaattgtgttagttggtatgaagttttaaaaacaggggtcttagtaaaactcggcttttattccttatgatgatagtgagctaaatggggcttatttaaggggtggagtaagtggagtataataaccttatgagtgtttgaagttcttggatagctgttgagtggtggttcaatcaaaatgtagaaaatgccagtgaagacaatcgttctctcatctcttctttcctcggatggtcacttcaagatgtttccttaataaagatttcgaagttcaaggagagagagggtggatatgttattaagaagatatcccttcaactcatatgtggaagaacggactgtcatcccgactgttcatctgtctcttattgactatcttcgaagcatccccttggaatcctatgagcaattattttatgaagatggattccattttctcttttattttccttttgcttcaagtgtttggctaggagtctccttggttatccagtaatttattattaatttaacttgatctttcaaacaaattatttgaagagtagcagagctcagttttagattctgtgcagtaaaaattcgcaagaaaatgtaaatcactcgaggaatatgcgttaagcaagggtatgggagatttggatagataaaagttctgtaagagttttgtagctaccatattctttaaggtcaacctaagatacaaaggatgctaggaagtgtaaggtcagcctaaagatacaaaggatgatggggagtctattcttacttttcctcacattggtacgagttctatatttactatgttttttcaactttaattttattactatatgtcttcttttgctcaggctaatttggtggcctttttaaaatttctcctaaatatcaagtgtagaagttgacgctccagttcctgtagtgtaaatatatgttcagttatctggtgatattaaatgggcttttcctagcataatagggaatttcatttaaggatggaaagtttcttaaatattaggttcttcttccacatggtgaaatacttaagttttcttttttaaaaataaagaaataaagggaaactggatctcattgatagctacattggtcatggtgctacactgcaactacgaaaagaaatggaaagataactcaaagaagaggaaagataaaaaaaacaccaaattccagctcctgactaggaattttgcaagattttcccttgtcatcaaccaagtctcctagaagagagcatgagccacgttttccttctataatttcgtagtttgttctctcaaattgtatacctcctataagcaaacttaaactacctcttggatcatttccccatgaagatggaagaccctaaaaacgttaaaagttccacagcagatggcgacgtttcattaattttggtgctttatttctaagtatgcttacataatagaccaagaggaaacattttgctgtgtttggctttccaaataaacccatcaagggtagtaggaagtgtagcatctccctcgatgaaattgtagagcaacttcacagagaaagtattaaataagagcactcatagttgcagttcctttctgtgtaaatacgtgtccagttatctgttttcctttaatgttcattctttttgcttacccacacgtttccagtttgattcctccaatgtacttggttgtttatattgtttaaccagggattcaggaaagttgatccagaccgttgggaatt

SEQ ID NO: 7809 - DNA, 3146 bp, Cucumis sativus
  Intron number 1 from transcript Cucsa.363840.2 (locus Cucs a.363840) derived from phytozome v7.0 (chr-ID scaffold0361 1; pos 1435497 to 1438642 reverse strand)
ccaagcgcgtttatcaagtttggaaagggagtaatgtgagtttcttataaactctgctttttttttctttttttttcccgatttgattgcgtttttcttcatctgggtactctctgatttttcatatttcgacggaatttaggtgggttatgtttggattttgtattggttttcattttcatttgatggagtttggatttttggtccaattaggtttcattgggttttgtagctcattgttttgatggggtttgattagtaagtggaagcaacgaggataaattccaaacttcctttcctgtttttgttttgtgtattacttttcttggcctagaaattgtcgagctcaatggctttagttgactagagagcttgctttccgttcttggaagcaaatggagttctttagatcataagtactcgctccctcagttccttacatccctttcaaatttttgctacgacgaaagagcaatttattgcataggaataggctttagggagattggacaggccaagtatggtgtagtcgtttatgtgagtaacgtggggcctcaagacattttaggtgacgtggcatgcctttgttatctaaaattgttggtttagagtttagtacaaaggtggagttttctgaggccaggttccggtttgtaccttttagcttggacgtgtgtgtagacttttgtctacgttatgaataattgtgagtctcttggaaggatccatattgacggtgttttatttatagacaagagttggaatggattgattgtgaatagaactcggattttttttaataacaggtgtctttgactaattctgggtgaaattaacaagatcatgggaggccttttggaagattttcaaactatgagtaaaaagttgtgaacgcatatttcaagtaccatttaaattttaatggatttggttttgtttgttcctcatatttaagctattaaataactatatgtcatcaattgtcatttacaaagaaaccagacccataaacctagggataagcatctccgtcacggatgttaacatgggaagactgttagatccaccataataagaatggaaataagttgaactctgtttagtttagtggtttggagagcatacctatagttgtgcccacagtcaaccacagtttgattactccaatgatggaaataagattagcttcttggttaaagtatcagaatggttgaatggagcacaaaacttgacatggggttgaaccgttgaggtcagataacatatcaaagatgttggcaagaattagtttacactcttgctgtcacattcaaggtagacatgtttttgtatgtatgtccttttcttttttctattctatgtcgttctatcttgggcttcaaacaaagtctataattttgctgaccggaagtcataatatatttatattgatgtttaggatggtacaccacaatttcacctttagagaggggggttctctcctgattggctacaccaatattacatcaaaagcataaccccaaaacagcaacttaaaatacttttatagtgacccctcctaacgtatgtgtgtctcaacaaaatcaattattaaataggagaatttcccttactactcctcccaacgtatgtgtgtatcactggaggtctaacacatgccttggagaagccctagattgcatagtgtgttgctgttaggatactgcctaccaaaaatactcagggacactaaaaacaacaaagaacactaaatatagaaatatatatttcaatatcaatgaagaaactacaatatacctcgatacattttagagggctgataatactctcccaaattttccaaaggaaatcccacaacattcttcacaactctaaccatactctctcatactacttattaccaaaaaacctaacaaacttgatgtctaattaatagaatgtccctttctactaatcatactaattatcccaatatattcctaactaggagccttacagttgctttgctcttgcggattcttttagcttcttggattcatctaagtcttcagtgctgtggtaaaactacttcaagacttgaagcttttgaggctattcaaattagttaacgttttcaggattataattttggcctccttattttaaatgaaaatcattttcagtagttatggaaattttcattagtaaaacccctcggacaccccagcattcaatgtatctgatattgacaatattgcttgaatgacatgtaaaaatgttgtttatatctatcttacatcatgtgtcagttttctaaatctcatcctgattcctgaaatggaaggaatcatatagaaaagttggaatctgaacgaagatattgacagatttacacttttacgtatggtagttgcttagacttcaaactcatccttcttttcctccatatccgaaaatcatccacgcatttgttaggcaccaattgtatatcaaaattggagaaagggtaagttggtagatgcagggagacaagatcgttccatgaagggaagggctttgagcgatttcttattatggggaccatcaggttgttaactatgatggactggagagacaggagagagagagagagagagtttaaaagtagatgttgttatatttcctttttcatgttgtcagttttaaggtatttctcatagagagaagggagaggcctcagccttctcaacagggtggtagtattgtaacgcctttgggctattctcacttctgatatattcagatgccttaccttgtcctcatggtttaatatggaattgaattttttgttcagttgactgatctcttgtgactcttctccacttttgcgactgtggcatctctaacgttgaattggattttttttgtaaccttttctcataaattgaaatactcattcagttgctttattattggtttccaagtaaaaccatgtttgatttcattctatccgatgagagagattcttgttttatttggattaagaataaccgtggaaagtttctgcttatacaattgtattttcctttgtctaaacatatgttttattctatacattttctgaaaacttgtttgacacctctcttgcagaagtttatccttggaggaaggctaatatttgggcctga

SEQ ID NO: 7810 - DNA, 628 bp, Cucumis sativus
  Intron number 5 from transcript Cucsa.323190.1 (locus Cucs a.323190) derived from phytozome v7.0 (chr-ID scaffold0308 0; pos 2663863 to 2664490 reverse strand)
ttaaggttactgaaagtgctataggtataccatgtattcaaaactatttatttgttcttattggacttgggaaaacgagatttcaatatttattgaggggattggtattgagggactttatctgatcagaaaaacattgaaagaatctcgtgctgttaatctcttctcatacaggtttagtagatttatgtttatcaccattgatataacaatgtttaatcaggatactttaattaaatcaatcatcaagaatagtccctccagctacagtatatagcatgccacattggttcaaaattttgttgtccctcaaatattgagtttttagactgagaaataatatttatagtgtgtagattttgtatataaaacagttgtgtttgaattagtcatttacatcttttaattatttttagatgttctttccttttataattagtttccttgttagtatttcacatgtgttatatttacccattatgtggtcccttttgaagaaaaagagaattattattatttctccaaaagtaacacaacgctttttatagctagcatattagtgatctttctaatatcctctaatacttctcgaatggcatagttttgacactatttcatttccagaatt

SEQ ID NO: 7811 - DNA, 4215 bp, Cucumis sativus
  Intron number 1 from transcript Cucsa.011090.1 (locus Cucs a.011090) derived from phytozome v7.0 (chr-ID scaffold0015 4; pos 408124 to 412338)
accacgtgccgttctcgctaaattttggctttcgggtaagaactaatatattttagttgggtttcttgtaaactttcgaacacccactaagttttggcttgaattaaacattttccatcaagtttcgacgttagacttgaattcttggaagagattgagccgctgcccagctgatagcgaactcgaaattgggcatttagataaatttttggtgagaatctcggttatcttggataggtcttgaatacccattagaggtttgttgtaagaatttatttacccatgattttaatgctaaattcgagtttagaaagccttattgtgctgtctagcgaagttaggatgattttgacaagcttttggatactttcaatgagttttcttggaatttgtttaatactcatttagttttggcatgaacttgagttacccttattgtttaatatgaaagattgaagacttggagaactttgaagcattgatcaacacatctaagttctgtttggacaagtttgggtaaattcttaagttattgatctgttaggttgatattgagattgttaatggatctgaatctctaaagtattgatattaggtataagagcgtattgacatgagagacccaattaagtttggatattcattgtattaagattttagatttcaagtttaacaaattgaaaatggagttttagacaaaattaaggcatttgagaatgattcgagttaaatctaggaagtggggattatggtcattggaagcataaacgagcttgagttgaccctatgaggtgtgttgagcatggttgagtcaccttgacatatggaataacttattattcatataactattctgaaccaaattggggagagcgtattattctagaggatcgagctattgattgttagcggttactttcaaatatttgatatgaaaatttattttagacgtatggttgaatttggtttgtgaataagtgtttggcataacttttttttgacataattgtattatcaatgatgatctttaatgaaagtttctagtttttcatgaattctctgttatgtgaatttgtaatatctgtctttgaacagggtttgatttaattacaatttacgtgagttatgatccaaatgtgattttataatgaatttgatgaattatttggaagctgagataagtagctttggtttttctaatattttgagttcttgaaatttgtgttaaaatatttagtttggatttatcgatgagaatgcttctgttttgcttattaagaaaaactttactttagctttggattgcatgaaatgattgggtatgaaatgtatttatagatgatggtttatggaggaatgtgaagttttgttttcgaagcacaacactggtgtatcatggtgattttacccataggctacgtgaatgtgttttcataacgccacctacggttgtcaggggattctagggttgagagaggttgtaacgtagagatctaggaacctgaatctaagtgaggaggtgaatggagattgtggcattggcttcgggccttgattgacccttggagggtagctctatgtgcatataggagcctagttatcgatgatgtcgaaactgtgattaagttgcaactgttgcaggtactgaatatgtgtgagctcagtttggactcatgttttcttgttgatatggaacatgcgttagcttcttgactgtatattcagtttattttgttgtggtagacggagataaggacagatttgactgtgaatatgcgtgagttcagtctggctgcatgttccctttggatcatgtgtgagctattctctgccgtatattcagtgtttttctttactgtggtggactcggatatgacacagggttcatggtaaatacatgtgagctcggtatggccttatgtttcattgttgacattggcacgcccgtgttatgctttgccgcgtatttgccatagctcattgtgttcgacttggatatgaactggttaatatatttctagacaggcttgttacagttttataataatgtgtttaaaaaactttcctattttaaatagcaaaactatgtataatgattacttaatgaaagtatgtttttacatgccttgtttttttttaaacatgccttgtttttttttattagcttaccactcactgggcgttagctcacattttcaaatgtttttctcttaggtagtgattaagttctaggtgcctattaagccatcaaatgccactcatttctgttagacatctgcgacatcatactacatgtatttgaagagtactattatgataggttgaattttttagtgaatgtcataggatgtttgttttaaatacctttacttttggactgtaatttattttagagttgttttatcaagtttatacatgaaattttgtttggtatttggatgattttgatgagtgtgtggtgagagacttggaacttgtttgaaattgtaaacgttagaagtgtgttctccttttctttccattctaggtgtggttagcccattcttaggggagactttgtcgaaatttttataaggatatttgacaagtgctttgagtagaaccttcatgagggaaaaatctacaatgtggtgtgacagatttggtatcaaagaatggttttgggaaacctaagggttatgagcaagagtttggaaatctagaggttttgcattagatagttagcatgagtaagttgcttggaaacatgctcattgtggtctacgaccgaacttgtgatgctcttgttagtttagacgtgggactaacgaatttgaagttgaagccaaccgtgttgagaagaactttgatgagcggatgatgccttgttcggctcaagaaattgtcgtcggtatgagagttatgcaagataatcccacgaagaacttcaaagttaagtgtttgaaggctttgagagcaacaatatttttcataaaagactaatcccaggaatgtagaatattggttggagatagcatagaactgtttggggccctgagttgtctaaatgaaaggaaggcaagacttgtgatagaccaccaattattttacaatatagtaggaggaaaaagggagcagttgcacgtgaacaagagaagggaaatgaagaaagaagtggaaaccaccttggtggggaccacggttagttacatgggagagagttaaaagggaaagaaggaagggatgggaggggtggttagtcagtttctggaagtggagggctgtaatttcctggagagcagggaatgcagaaagtgttcagtttctgtagtctgtagcaagttatttccattatagtgaagtccttcactgttttgttgttttatgttgaacttggtttatctttgtattaggtcttgtgttgtactttgttttcaagactgtgttagtactgttttctgtaaaagtttggctgataaataaattagtagaacacactacttggtgttctatcagtcccttagtgaggtttagggggtgtgtgctttattgtgagatgtttaggtgtagaggaacaatagggtgttttagaggtttagaaaaggacccaagtgagttttggttcttagtgaggtttcctgtttcattttgggattcagttttgaagcttttttgtaattattctctatgtaacatctttcttgattggataccctttcttccgaagcttcttttcttggattaaggctttggatcaaaacggtcaaagactggtgtggtgagcatgtgtctagaaagtctaatattaggggactcgaggaagaagtacaattcattgccaagacaacctcatatatgctaaaaccaagtatatatattgttccagtacatcctgctttcagttgtcaatttcacaaatttttttattgtctgaatctctctctaagttttgaaacctctatctattcatgttctgctaggcttgtgctcagtaaataaatatggaagtagaattgaactccttactgatcatctgttcgattaagaattgtttttagagaacgttggattaagaaattcagaagtgatttaatgaagtttgtttgtacagtgtatataattcatgcttacagcgatagaaccctgatgttattcttatttttcttatagcggcaatatatatatatatattttttttattgtcatttgaagttgttaattgtatcttgtaggaag

SEQ ID NO: 7812 - DNA, 1744 bp, Cucumis sativus
  Intron number 1 from transcript Cucsa.042820.1 (locus Cucs a.042820) derived from phytozome v7.0 (chr-ID scaffold0054 0; pos 1145530 to 1147273)
tgggctccgaccagcaaggttcagaggctttttcggtaagtcaccaaggatcattgctcttctttcattttcggataatattttaattgtttcagtgttattctgaactcttagaacttttttttgggttaagtttaggtaaattcccaagtgttcgattaaggtttagcaagtttggacacgaacacgtttcgaattagttcggactcaattaacgtatgagtttttaacttgtgaaagtttgttggttctagttttggactaaattggagtgattaattaaggtttctggtggattttggtcaagcacgttcttgttcaaaaatctatgggtgtcaaggtttttgaatcgagttctaatacgtaaacattgtgtttaccgtctgggcatctattttttttttttttcaaggtagtggatttttggacagagaactgtctgttttgattattatgatttcataaatttttaagagtatgttttatatgattaaaggatggaatgaaagtgttttgtatattttttgtggatttttttcaaataaaagtaatatgtgaatgttttgaatgatggttggaaatgtttcaagtgatgttgaattgaaagtgtttctgttttgacttcggttacttttgaaaagttttgaaagattttgaattatttgatttgatgagttatgctactgaaatgtgtatttgaaacttcattgttttgtttcaaacgtttatgaaacaaaacatttcgaatgattcgataggggctatctggataggctaatttcagtgttttggggattttatgatattttgttgtagctcaattttgaattgacagtacatgatctaactgaaagttacttgccaaaagacatgtatgtgttgcactcaaatggcctcacacttaagtatttgatttttgttttggttgacattgttaatcaacatctttgattgaatgaatgactggtgttactgacaggtaactatttctgctgggttacttcaactaactatgcaactttcccactcgatattttaaagtattgtaggattaaaagttttgattttattgaagtattgactgaatgaaagttctgtttgattaaaagtatcaattgaaaactttgtatttgaaagtattgaatgattagtattaaaagcaataaaaatagaaacaccgacttatgtggaaatccaagtactgggagaaaaatcattatatttttgttcttattattttctgataaaaatacaataggtacaagagggggaataaatagaatagtacatagagataaaaaaggaaacaatatttagggcatttctcccaatgggctaagtccactaactctaacaattagtgttttagaaagtatgaaagttctgtttattaaagctattaaaggatactgagtatttttgtactcatcttgatttttcaaaaatgctttttagatgacatatcaggtgatgattatgagcacatgacatgaagggttgtttaccttagaatttgattgtttgatctaaaagttgtttgtagtaacttgcttttactgattgatgtaagttgtgaaagttataatggttatctgtccttatttttttgttttaatacttctattggaaaatatgggcagttacattgattttgttctttgatgttgttgggtttataagcttccctgtgttttagagtaatagcatttaaccctctctctctcagcttcttagcttacctaca

SEQ ID NO: 7813 - DNA, 1528 bp, Cucumis sativus
  Intron number 2 from transcript Cucsa.185740.2 (locus Cucs a.185740) derived from phytozome v7.0 (chr-ID scaffold0127 4; pos 1187262 to 1188789 reverse strand)
ttggttaggcctctcaaagcctccctcgacggtgagtaagcttcctatccctgtgtttaaccaatatatccagttgcactttagttaaacacatgaatcttattttcgattaggttttctgcttacccttttttcactatttggtttccgaatggtctttatgcattttctcgattttcctgcctaaaaaagccttgcattgttagacgttcaatctcgactttaaacaaatttcagtaacacatcagtagagtggttaaataaatccatatgcaaagaggatgctgacattataagacgaatccttatcatttcaaatatacaagatgagtgaatttggcaccatggcaaggataggacaggcgttcaatgttggaaaaatcaagtgacttcactttctctataagatacataaattactcttctcgttgccaattatgttttcttttttgtttagttttgcgggagggggtttcctctgccctgcccttaggctgttcttttggttcttttgatatttatgttttttttaaatgaaagttcataatatctaaatctaaaagaggcaccatctcgagggacatcctggaacctttattttctaatatttaacaatgtaaaagtggatacatggacacattagtatttaatgcaagtcttaatggctgcccttaatcttatattacgcatgtaatataagaaggttgaatgaaattcaactcagattcctttcttagttttacttcattgaattttgattctgagaggagctggcgagctcaaagaactaatgcattccttttattaaaggagtataggatttgattagattgaataagctcctacaaaataaatcttcaagtgtgtacaaattcttggaaattttagtttgatgtctttttatttatctgtatgtacaaatgctattgagtattgagatatcgagttgcttaagctttgctatgttgcgatgagtaagagatgggatttactttctggatttcttttagtacacacatagttagagcactccaaagtgtctgtaaagtgagcaagaatatctgtttgctaaggtgtaaaacaaaaccttgtttatggaattctggaatagtggtatttgacaacgtttttgtttcgtagttggatattcgaggatcgatattgagtctgatcacacttaacatttttggatggggagatggataaattcttgatgctgcaatacaagttccatgtgtagatattgtcttacccgttgttgtcattgttgcttgcttattattaggcgaggaatgaattataatgtcaaagatagtttgtttaaaatgtgaacgactgctgtactgtgactcgattgtatgcagacgacaatgctaatctctgccagctatgattttcaatctcgtgtttgccaaattcatgttcacaattatccaatattcgttttaagataagctagctgaacctctttaatgatttattcatcatgcaacctctgtttggctgaatacagaattcagacgcaaga

SEQ ID NO: 7814 - DNA, 1038 bp, Cucumis sativus
  Intron number 22 from transcript Cucsa.308730.1 (locus Cuc sa.308730) derived from phytozome v7.0 (chr-ID scaffold029 78; pos 729563 to 730600)
atcatttggccaccagtattatagcactatcacaggtatttagttttaactaatcatgaaagctggcagcctcatctttacaatgttaatttctcctatagtctcttcaaagttgaaggcattaaaggtgtaaatcagaagaaacttatttcacaggaaatccacgtttatgttacaaaatcaacaattaagcaatacaaaaaacatatagagattgacacaaagatatttgtagttcattaacagtgtgttagatgatattattagggagaatttttcataatacaaaacggcgccactaggctagagagtttgtttatatagtggatttctttaaatcctaggatcaaaattgtagataactcttaatcaagtacttatgctcaattatgtaaactgaagagcttatggggagcaacacccctgaactcccaccaaggtgttttgaccctgaactccggctcatggaccagtcaacgagatccttgtactaggttgtttgtagtgctaaataccgaattcaagggattccaaccgtatgtgcctcgataaattaggaatagttctggaaattgaatttattcagacgtggctactggaatatttttatatgctgaaagtttaacataactatcaaatgggatgtccttactggcatggtgtttgtaggtgacactaaacttggtattcttctgtatcaaatcaacagattaaactgaaattgcatctggggatagtattcattcttcgtagctttaaccaaattgtcagtggtctaggtcatggatgccagatgccggacatacaattttacatgttcatgcctcttcaatttcatggttcggtttacaatgacatgtagatcccaataacgaaaccattttttaaaattgtttgatgaatattatgggcattggcatatatagttataggacaccatcaaattaaagttaattatttatgatttgtagttctataattctggtcacttaatcactctcttcctttaaaagggaataccatttttccactgtggtg

SEQ ID NO: 7815 - DNA, 1685 bp, Cucumis sativus
  Intron number 1 from transcript Cucsa.348920.3 (locus Cucs a.348920) derived from phytozome v7.0 (chr-ID scaffold0348 7; pos 320992 to 322676)
ttcaaggttttgccatccccatttctgtttacttggtgagtttttcttttttcgattcttttacttgttggggttttagggttttcttttcgcttgtaagattttatcgatgaatgtctgtttctcatttgaataacgtggggtttagttatattcccgcaatgatcaagatatttcattttactttgcatgcattcttgtgttttttattcttttactgtctggttgagcatagctgctttctgctgcttactcttctccacccttctatccaactggattgtcctgaacaatttagtttagctggtgcatgttgtaatgattctgaaaaactgacgagctatgaaacttactttttggagtttggatagccaagaacacagtgcatctttagctattgactatacttcaagaaatatagttacctttgtcattgtcattaaaaacgtaaatgtatgttttgcgacattgcatttaaaatcataatactagttttggtagggttcttgcaatctggcacagaaagtagtggtggttgatatttatatatatacttttttagttttattcttcgtaagtcattgttattggtttctttcacttgatgtttatggacatatttgggagcattcagctggcaggagggaaattttcaaattggcttgtcctgtgcttaaattgttgtcacaacgctgataattagttggtaaatgtaataatatactgtataatatatttaaatacgtacaaatataaagcataaaaaatgtcaataaaaatcaaaatcaattaaaacttagttttacactttctatgttaaaagtgtttatttatttattttcatactttggacccctttttatttttatttttattatatttattatttttacagaggtcaacttttattgaaaaatggaattctcaacattgtgtcctaatatgtttttgacttttagagttttgatatagaattccgtttacacttacaattttcatattttgaacactactatggtatcgtggccaaactttctctttttgactatttggtgctgggatcctcatgaaaaaagttttaatgaagtggttgccatggtttggaactttatatctatgatgtatgaggtcatacacgcctgcatttggctgtttgcttctttaaccacgggagtacatatctagtgatagtaaacactgtgcccaaatatgtttttgacatttaagaggtttcaatatacaatctcgttttgttgttgtcttttttaattctattatgctggtattattttttttaacaaaaaatgttttcaatcttgaaatgttgcttatagatgtgttcacttcatatgctttccagaagcattttggatatttgttttaatatttgaaaacaatgtacagcacatcatactgttacctaacctaaattaagctttactgaatatttttgctacagtatctttaaatagttcttgtccacgtattgctgctctgcctctgcccgcacctagtcaaacatggaggacattcagttttaacttataaaaattatggttgaatagaaatttccttttgttgagtaacaaaaataaaatttcatatactgcaatgaaaatttgcattgcgcttgatgtttcaatgctgcagatttccagttaatttccaagaactatctggaagga

SEQ ID NO: 7816 - DNA, 5736 bp, Cucumis sativus
  Intron number 2 from transcript Cucsa.341120.2 (locus Cucs a.341120) derived from phytozome v7.0 (chr-ID scaffold0335 6; pos 3498402 to 3504137)
tccggtacggatttcgaaattctgagcatgaatttgctgattgatgtcaaaatgtttaaccgtggtttaaattccttcggaatgaaacgattgtcagaactaagaaggaaactaatggtatctactagtagtggacttgtagtgtaggttatagaaatgtggctctatcacatctgtgtttattttgtaggtttttgactttttaaagccagtgtgtagttgatgtaattcaaatagcttaaacttctataacctactgtcgtaactagttttctacttagtttactgatatatttgttaaaactacttagttacaaataaccaacttgtattaagttttcctcaataaataaaaatctcttctcacatcgagagaagatttttcattcaatcaaaaatagacattggtattacaccaaattggtattagagcaccataagctcttgggaccatggctgtgtgacgagtgaatcaaccagcagcggtggacctgctcaaaatcaaaggtagacgaaaaccctgtcctctctgcaagatctaccatgcgtcgcttgctgcccatggacccatctgtggaggagagaattgaagcaacacttcaagaagtcctacaacggctagaaaccttagctcctaaaacatagtacatgaagaacatcaagaatttgttcaaaagaagaagaccgattcaagattatcaagaactcccttcaagaatcaaagattactatcaagatcctcaagaatgaagctctactaatgataaacctcaagaaaggttagtaagtgatgaagatagaaggttctgaccatgttttgatgaaagaagaagagatgtggccaaatattgatgagaattgacttgcctagctacgatggtaagagaaatatcaaaattttattagattgactcaagaatattgattttttttttaaatacatgaacacacccgagggaaaaaaagtgcatttagttgctttgaagttgaaagctagagcattagcttggtgggagcaaattgaagtcaataggagaagaaatggtaaaagatctattgcttcttgggagaaaatgaagaaattgaagaaagctcgattccttccacccaactatgaacaaaccttctacaaccaatatcaaagctgctggcaaggaactcaaagtatagcagattacattgaagaattccaccaattaggggtagaatgaatcttatggagaataacaacaccttattgcttgatttgttggaggattaaagtttgatatagaagaaaaagttaaacttcaacctttcctaaccctatctgatgccatcacttatgcagaatctgttgaggagattattgaacccagtcaagaaatactaccagaagaagcccgtggaatgtcactaatagcaacaaggctatagctgcaaactcttctcatacttaggccacgaaagagcaagacgaagcaagacaattgatccaaatgggaagaagactgaagcaattcccaagaaacaaatagagaatctaatctgagtaaatgcttccattgtggacaaactagccacctctccaatgcttgccctaaaaggagggctgtagcttttctagaagaagatgcagacctcattgaggagcaagaaggagattttgatcaaaataaagagatactgaagcctggtgaaggggaaagactctcttgtgtacttcaaagagtgctaattgcacctaaaaattataactcgcaccagcataagtcttttcaagacccgttgcactatccaaaataaggtagcaacatgattatgacagtggcagcagtgagaattttctttctaagaagttagttactgcccttaaactgaaggcagaatccattccaatcctgacaaaataggatggatcaagaaaggtggagatacacagataaatgggattttctcggtgcctttgtcaatcgaaggaagctagaaagactaaatcgtctgtgattattagatatggatgtttgccatatcttgcttgggagaccgcggtagtatgataccaagctgtccatagaggaagggagaatacctatgaattttagttgatgaataaaaagattgtcctaacgccttttaaccagaaaatgaagaatggattaattcgaagcagttcaacaacgatctcttcatcacttaagtggtaagaagtttattaaagacaaagaatctgatatcttagaccttgttgttgctggccattcttccccagattgctccaaacatgtgccactgaaagttcaagaattgttggatcagtttcaaggatcaatgaagaatccactgaacctccttccctttgagacattcaacataacattgacttgattccaggctcttcccttcctcattgtaggatgagtccacaggagtacgaaatcttgcatcaacgtatggaaaagctactgaaaaagggtcatatccagccgagtatcaacccttgtgtagttccagccctattgactccaaagaaagatgacagttggagaatgtgtgttgatagctgagccatcaacaagataactatcaaatatcatttccttatccttcgaatcagtgatctacttgatcaacttggaggagccttcatttttcaaaggtagacttgaagagtggctaccatcaaatccaaataaggctggaagatgaatggaaaacggttttcaagacaaatgaagggccatttgagtggctagtgatgcctttcggcttgtccaatgcacgaagcactttcatgcatctaatgcaacaggtgcttcattctttcctaaacaagttcgtggttgtctactttgatgacatcaatacaacaaaaatgaggaagatcatttacagcacctaaaattggtttttgaagccctagaaaagaatgagatgtatattaacttgaagaagtgtacttcctgcacagggaaagtttcactcctagggtttattatttgtgaacaccaagtaaggatggatgagagcaatgttgaagctgtggtaaattggccaacttctaattcagtgaaggaagtccaagccttcatggggctagcttcattttacaggaaattcattagaaatttcagctccataagagccccaataactgattgtttggagaaaggagcttttacttgggggaagaatcaacaacaaagctttgatttaataaaaaagaagctcaacagttagttttatttaataaaaagaagcttagcagtcaactagtgcttaaacttctagaattttgtagtccctttgaagtggcagcagtagatgccagtggagctggaattggggcagtcctatcacaagggaggcatccaatgaagtttttttagtgaaaagttgagttcttctagacaagcttggagcacttatgagcaggagctatatgctctcataagagccttaaaatagtgtgagcactaccttttatctataaggagtttatactccttattgagcatttctctttgaagtatctacaaaatcaaaaaagcatcaacatgatgcatgctcgatgggtgtcttatatctagcgttttgattttacaattaaatatctagtcaggaaagaaaatagggttgtcgatgctcaaagtagaaaaggagccttattgactgttctttcagccgagattagagccttcaatcatggcgtaaaccaaagaatactcttgattgaatgtataatctgcctctcaaggtgagaggagatgctttatataggggagattagtacaagtagttggttacattgtaactaactaagtaattttagttaactaatagtgagttaaaacagaaactaaaagacagtttacatcattccacccccctagtatcaaactcgtctcgagtttgtcatgaaagctggaatccatccggtgcattgtagcttttaaggttcgctacaatgaagatttgggctgatgttgaacccttcaggcagttcaatcttgtaggcatttggctcatatttggcaattattctacatgggccaatctgtttatctttcatctttccttaagtttcagttgggaacctcttattcttcaagtgggccattacaagatctcgaatttggaaatgaacctccaatttgatgtggaactacaagaagaagtagaagccatggctgaaagaatccaaaaacttcacacaaaagtcatagaacatctaactaagactgcagaatcttacaaagaggagaaagacaaaaagagaagggaagtccgttttcaaattggtgacctagtaatggcccatttgaagaagaagaggttcctagctggaacctatgaaaagttaaaagacagacaaattggcccgtgtagaataatagctaaatataagccaaacgcctacaatcttgatctgcctgaagggatcaacattagcctagttttcaacattgcagatctgaaaaggtacgatgcacttgatggattccatcttacatggcagacctaactcgaggacgagtttgatgcttaggggtggaatgatgtaattcaaatagcttaaacttctataacctactgtactaactagttttctaattagttcactgttatatttgttaaaactacttacttagttacaaaataacccacttgtattaagttttcctcaataaataaagatatcctctcacattgaaagagaagatttttcattcaatcaaaaatagactttggtattacaccaatactattaaagttgggtttcataagagtaagtttgtataatatgtatgtgttaggaatttacgctagatataaataaatgcggaataaattaaattatatctcaaactcccagctcacaggttagagtcaaataaacaattgacttaataaagcatagtgataaagaaaaacaacaccgagaattatattggttttttccgaactcggggctatgttcagtcttctgcaactgtagattctactagaatggagattgaaaaagaaccccttgaatgcgcttacaaatctctcttccccaaacagtccaacaagaattatttgaattcaagtgccacaactttgtagcttgaaataatctatcagagaaacactcaacccagtaaaaatacacacggtattagagaaacttctaaaattctttctagcgcacacctctccagtggcaagaagattctcacggcttctgccttctcttcttcagcggtgcaattttcttcaattgtgtaaatatatatttatataaatgcattgctacataatgaggtaagcctaataatattgaagaaattaaagaaatcacagcctcaactttcctccttcgttgataagtcaccggaacttgctttccttcaatcataacttgcctatcaattggtgaatgagaatatttgcttactgaggttaactagaagaaaatttggccaactatttcattttaattttcatctctcagttgattcacgaccccaaattttctttttatagaaaagcacacctccttcattaaccaataaaaaaacttgtttattgggctaagaaataagagagggagttttatctcatttttcctaacatgtaggtagacagtggcattgacaaatttatgaactgagtatagacttgactgcttaatttctagttattttgactaacatggatctaaacaaccctcaggagcattttatggttttttaaaattgttttattttaggt

SEQ ID NO: 7817 - DNA, 4223 bp, Cucumis sativus
  Intron number 1 from transcript Cucsa.020120.1 (locus Cucs a.020120) derived from phytozome v7.0 (chr-ID scaffold0028 8; pos 15640 to 19862 reverse strand)
taaagcaacatctgtccacggttaccaggttttcttgacgatctctctcatctatttttgtgggttttgtgctgtttgaattgcctgtttttttcgatctatcttcatgatttatttcttttctttcgttttgtattgatttaggtgtttgtgtgaatgattgagatttaattcatgggaaacatctctggatttcgatctgtttcttatgaaacatgttttaaacattaatatttctgatcagacaattgaaatcgaaatttagaattcctgtattttaaaatttagcttaatctctttccacgaatccacgtgaaaaatttactagaaagtcaatggcctaaacatgggttttttttctttttctttttttaatgatttttaaacgtttgttggttggactttgcatgtgattataggtttccacagcttgatgttagattaccactatatggagctggaactgtgactgtcttcgggatgattttattttatgtttttaaaattaattcaaaaaaacggaaacaggcctctttgttgaaataatgaaatgatactaatggtcaaaatacataataggagacaacagtagggagagaaaaaactaaccaacaatgcaagaacaatgtcaaacggttaacaagagaaaacaatctaacttgtaaaaaaagaggaaataggagcattacgatttaagcttatgtcttgaatcaaataatctgaaaaaaaaaatcttggaaagagagcatcaagaggaagctttgactcgaacaatcacaaaacggtcaaacctatgaagtgacttgtcttgcaagttgctgtttcctttcaaaccaaatctttgaaagaatgggtttgacagcattaacctacaactgatgcgaatgtggttttaaggactggcgcaattaagaactgagacacattttctgtaaagctattacaaaaatcctgatgaaggttaaacaatgggaatagttttctccacaattcttttgagaagtgacaataaaaaaagatatgctgacaatctttatcatctctttagcataatgggaaaattgaggcaaaaaagaactatttggcagtttcccttggaaggatctttgcacaattaagaggcccaaaaatcataacccaaatgacgatgttatctcttcttggacacctatatttccataggtttttgatcattttgctatcaattgaagaggaagaagccaaatgtctaactaaagactttttgtgaacactcctgaagcattcaatgtccatattctggaatcctgcctttctaccactcattgacacctaacattatcaaaaatttcttaaatccagcatctcttcttcttttaatgatcttctataattaattacccataataacatgttcaggtaccaatgataaaaaaattgatccttaggaatcatagtaaatctgagtaatcttggaaagaatgaactcaaggacgaagaattcaaccatttgtgatgccaaaaagagatctagcacctcggcctcaattgaaggaggcataagattcaactttgaataaggcttgagagagatttatccaagggcttcaaaggttttttccaacttttccagatgtgtgccaatcaaaggagccactcccattgatactccttagaactttgtatcaaagagctttctcttcatgaataaatctccaaccccattttgccaatactgccatgtttctgtttttatatcatcaaaactgagacctccttgtgtttgcagttcggaaaccaacccacttgacgaggtgatttatcttcccaaaaaaatcctgcattatcatttttatttctgcaagcactttggaaggcattgtaaaggaagacatataatcaattgggagattagaaagatctgccttattcaaagtgagcctccctctagatagattaaagcatctccttctatccaacttcttttggattttatcaacgactggctggtggctgctaaaaggaaacctttcttgggtggcctcgaagaggaagcccaagatacacaaacggtaatggttccgctttacaattcaaacttgatgcagttgccaacagccattttttttgcaatattcacttcacaaggtttagatttttcccaattaatcttctgcttcgagcacctttggaagagctcaatgattggtattaaagctgccttgaaggtgaggcgccagacctggtccttgagggcattttaaaacactcgtcacacttattaagcaagaaaagaagagaggccacttccctattggatgagtgacgcggaacgtaaaagaaaagacaccgaacttcctcccaaatcaaaagttagagattagatgatttttaagagaggacaaatgatgataaagatgaggaaagacggagcaaatggggctatccctaaccagtggacttgaaatacttgaaagacccaacaagtggaaatcagttttaattaggaagaaaatgacaatgcaggagcttgaacataggacctccctggaccacttgctctgatactatattaaaccatcaatttacccaaaagcttaagctagtggttaaaggcaaatttaattatatattactgacacatctaacccaaggagagagaagggagctcaagcgagatgtccttcccaaggagtacgatgtgtgcctctaacccctttagccacccactcaaaggagtagagccatgcttgcccagaatgattctatgcctcaaagattcagactcaagggcaaaatgccaaagccagttagccaacaaggctttgttatgcagccttaagttaccaatctccaatcctccctgattcatagagtgcccaacaatttgccagctaaccaaatgagattccttctttttcatctattccttcccaaagaaaatctctcataagcttcttgatacttttgcatatagagctaggagctttaaataaggagaagaagtaaacaggaataccgctaagtgtcacgaacatatttttccaaagtgtgtttacctttggttatatgctccgattacccccagtttatctcatctttagtctccataactagtttaggtgtttacttttcattctaggtcataaagtttgggtgtgacgtttcggcattttcatatgcaagcctgccagagctgaaaatgttcagaatgtactataggggaagcataccaattgaatccccgctcaaacattagttgtactctttgcaagcaaccctttttccttgcaattgacagtctttaatgcttatcgtaacgtctatttcaatgtatttctttctttcctgcgttttattaataaaattttcctaaaacgcaaaggaaggttacgacatacgtcgacgttacccacaactcttagattttgatcggctgacttgttcgtcgagttagaacaagtgccacacaatcgtctgtctcgaggttgaaacgctacaattgtgacactaagcacagatctactagaagataatctaccacccttagagaaaaaaaaattccaagaagcgaacctttcatttgcttctgcttggcatcaaaatactcaagttctgcccatagacctttttctttcacaaaatcaggaaaccaagacttcttacagtatctgttatccttctgagtttggaattaataaaaaaaccagctcaaccttgtaccctaaatcggcaactgaggctttgatctcttcacaacattccttttgtaacaacccactattgcaaaattggaaaggaccccataacaacaaacactttggaatttgggatgatgttctatttttctaattggagagccagctttagtctttttttcctgatgtacaaagttatggagtcaatggcattatttgtaattgataagctttcttgtaatgttaggctgcaagtttgatttgtctggaggggcttactacttcgatattcagtaaatttttttgtattcttgtatttttgtattcttaggctgcaagcagtttgcaggcagcctagagggggttttgtgtctattgttcttgtttctgttcaaatatcgacaaaagagttgttctgtttcttattaggggaaaaaaagactatgccctatgttttctgtgcaagcgtgatgggtttcaatagtcatgatgtacaatgccatggtaaaagaagaatacttctaatattgatctttgtggacagat

SEQ ID NO: 7818 - DNA, 1843 bp, Cucumis sativus
  Intron number 1 from transcript Cucsa.258940.8 (locus Cucs a.258940) derived from phytozome v7.0 (chr-ID scaffold0222 9; pos 5665996 to 5667838 reverse strand)
tgttttcgccatcgaagttagttgaagctcaagctgtatggaatcttctctttcgtttttttctcttcttctggttacgattcataaaccttacctaatcgttatacaactgaagtttatttgaagaattttgagaattcttgtgcatttactatacttttttttttttttgaagtcttgagttgtggttgtttgctagggaatggagaacggagtggtttaattgtggaattttgaagtctgaatttaattgttgaagtattgtagtttgttgctgagagaaagtttgagaaaaattaactttaattatacaactgcaaaactttattgttttctggttgtaggcgttgggaatttaaacgactgactttttccttcatctctaactgtaatcccgagggtataagtttgtttcagctggatctttgcaattactcttcttccgaatctctgttgcttagtctctccgaattttctcagtcgtttgtttcagttcggattgtgttctcggccttgtgcccttttgattcgattctgcatttttatgacgaaggaggaagcaaaatttgatgaaataagagaatttgaaacgtgaatttgttaaaattaaactgcaaatgttccagattttaaatcactcgcgcaaccaaccgggggtcttcgtaattgtaacagaatttagcttcttgccctcattttctttcttctctgactcgtatgtattagttttccttggaggggcagtttcgtcatttagcattccagaatttacttttcagttcgaattcggtatcatcatcgagcccttctttgttgaaattccacatgtgtccctttgtgaattggtttttccccagagggccttttccctgctctgtatgctgcgcgcttttgtgtctacagattgatagatacttacgttttttcccctttccgcagatgtggtatttttacaactttgttgtttttttcttctttttaaaaataaatgttttaactttttcttttttgttgaaaaccttcgcggcaatgagcactaacaattattttgactacctgatactatcgtataaacatattattttttaattcagcaggctctagatagtttaattaaattgagctttgtctgtactgaaaatgaagagaaaaaaaaaacctttatctggcctgcggcagcttatgagtattaaaattaactgcaatagtaataattatgagaagtatttggtatcaagttgtcttgtaaagaagtccccttatagacaaagcatttgtggttgctttgaaggatagctacaccctgttctgtgatcttgaaataccaaaaaaaaaaaaaaaacaacatggatggtttagtactgtcagttctatttttaaatactatgtgagactccaagatgtaatttggaagatgaagcgcacaacctatttgtgatttagagacgagcttttgaataaaagaaaacctaggtgagtttggaacccccttcaatatcttaaaatacccaaattgttactttaaaatcattctttctggggagagagactttaaaattcatgacctcttgattgctggttcttatccgtgttccacgtgttagttcaatttagcattcctttctatcttcaatctaactgatagccagttcaaattaagactaaaaacgaagtattttcatcacatttctaaaatcttcgtgcttgatttcttattttcttcttcgctttcctaatttttggattgcttatccatgcagctgcccagctgatcataatcggtgccaaaggtctgtcatattaacagtcagttaaattgtccagtttgagctgtatctgtaac

SEQ ID NO: 7819 - DNA, 849 bp, Cucumis sativus
  Intron number 5 from transcript Cucsa.034580.1 (locus Cucs a.034580) derived from phytozome v7.0 (chr-ID scaffold0044 4; pos 397278 to 398126 reverse strand)
aaaatattctacggcgactacttcaagaattagtggtaagctaaacagtggagcttgtttaattgagttttagatttcattaatcatggtccatggatatggtagagaaactgattttaccattttttctctgtatctgtaattctttaaaattaaacattttgtcatggtagattaatgcaacgcctttgggagctgttgatggaatgaagaaattggatattcttttagaaatctacatattgaaaggaaactctatttgtgtgtctgtgattgtatagttttataacaaattatcctgttcaaaaaagaagagttgatttatcattctaggttttttgtaagatttggacattaacacgatgaaatggaagacgaactcctttacttctcttcaagttctaacttagggaataatttttgttcattatccacatgtcttcaatgtctacattttcatattaaatagaatctttagctgtttctcctgaaataaaaagtatattttttaaatgggacaaattggaattgataagaagaaaaaacagaggaaaattttccattaggatgtgccaagaaatttgaggtcaagaattaagcagggattcaattactctatttacattagtctggctttattttttgttaacgggttggtgtgtaggtgtgtggatatcccatctcctcctcttttatatctatcttttgactaagtttgttcttgaaaaaaaaaaaatcaaatgtggtaccattcttcagcctcacatttttttctagtatttttgcaaataagctgatcttcaattggaattggtgcagtcatctgccgttcaatcaacagagccagta

SEQ ID NO: 7820 - DNA, 915 bp, Cucumis sativus
  Intron number 1 from transcript Cucsa.158250.1 (locus Cucs a.158250) derived from phytozome v7.0 (chr-ID scaffold0114 2; pos 390836 to 391750)
ggagttgttcttgtggagactattggtgatgctggtaaatctatattgcttactcttccattcatcattcaatttcatgcctaaccttctgttttggtttttctatggaggcttgaaatatgatgagaatgcaagtatttattgatctcattgtattgttacggtagcttggtattgttactttcttttctcaaatgtatgcctaatgcataaaaacgtttttgaggcttgtgcatttgggagcaaccctcaaggtacggtacgattgtaaggtttcaaggcaaaagctcatgcttcaatacaagattagaggttcgatagttacatgatgacaaatagttagatgattgatgcttgaacaggatttgttctctaggttgtacaactgtgtctttgaatttcaaatagttatacgatgggtggaatagtacaactaacaaatagttatatgatggcaaataggatctgttctttaagtacaacttatgtgtccttaagtttcaaatagttatatgatgcgtgtaatcaactaatagttgtctgcttcaaatgtggtcgtccaattttgaatgcattgggacatacaacgctggttgtggtaatggatggatatttgatttttttctttttggtagtttcgtaaaatcaaaattttctaattaacttgaggattatgcttcagcactggcccttactctttagaattgttgggtatgcttttaaataagcagaatttttctttttccttactacattgtttggagttactcagttgcgttcttctatcatcaggtttttggcctgttctaattgatgacttcgtcaagcgcatgtacatggttcatccttgcactaacacttggtctgctgacaatcattatgcaggcggtcaggatctaataaagtctcaaagtt

SEQ ID NO: 7821 - DNA, 3052 bp, Cucumis sativus
  Intron number 2 from transcript Cucsa.072750.2 (locus Cucs a.072750) derived from phytozome v7.0 (chr-ID scaffold0076 5; pos 266724 to 269775)
cacgaactgcagcggatttcttggaactgtggaaggtacatctcaaacttagaagagaacatatatatgattatctttactactttgagattgttaattaagttacgattattgaatcaattggctttagaatgatgattatggattactatttttttttatcttggaacttgagtttggtttgtatgtttgttgatcttctatttgtggttgcatttcttattttggtacattgtttgatagcttaggcatcaagggtagaaatgattctaaattctcaactgaatttcactcttcaactttcttacaatttcaagaatgcatagtttgagctaaggtgcttgtgatctaattttcactctgagacatttgttcatgaggtttggtatattattggatttaatgcctctttttggaatctattttttagtgagtgtttagactgcttattgatagtttttagatgtgtatagtggaaatcggatctagattttactttaattgctaagattgacatgcatagtcctaaaccctagactaatttctaattagggtttcgaggaaacttaccttcatagctccaatttcttgaaaatctttacgcaaacttaacctgagcatctactagaattgacctactattcttcggacttagaactgggttgtgggacccaatggatgaaggaattggaagagaaaaagagatggaagaagaggaattgagcatgagagaatttctccttttttatatatatactaaaatgaaaaaaaaaaagaagaaatggaagcccaatttcttatgggagcccaaaaaaacaaccaatccaccaaaggaattgtatgaccctccttataagaaatttacatgctaaattacatctggccatgcaacacaaacaactcaaaatccactttctctagtggactttttgtcttcgttaaatggaaatgtttagtccactagagttagcggaattatccaacaaaatgttggattttttcactaacttttgtcaaagggaaaaatgttcatttggacaaaagtcaaactttgactctttcaaaccaaaagtcaatattttgactttttaccattttatccgtcttgactaatttcgacctcccgagcataaatcagcactcattttttcaaaattaaagtcatatttaaatatattgtcggttaaagtttgatttttcaaagtcaaaagtcaaccctttgactttttataactttgatcattttcatcaatttcgagtttttgaatatgaattcacattcacatttttttatatttaaatgctatttaaacataaatctctatctcttatctgatagccgcgactatatcacacatatttgtctttttctctcttctcacctaattcgaataattcaactcattctatcatactgttctaagtttatttcatctgtgctagcaagagaacctaaatgacctataaatcatatacttcaatgatccaagattagttgactaaactcttttaaactgagctaataaacatttgttaactaacaaatcattccactaaagtcttgtagttgcactcccctcactataaatatatttgtgtctatcttatataaccccatgatcagtaagttaatccttcacaggttgttcgtaacttcgacttggtcaaaatattgtttacccctaacactacatcttgcttcttaagtctcactgatccactattgaacaattggtttaatgcccaacctataaattgaatctatcttagaccaatgagaaggtggggccccttgtttaaaacttaaatacaatccttaaggaaacaacctatgtattaaccataaaacgggtatgagtgaatttcgtcttgcactctgtccctagctatccacacagttttatctctgaaattggaggcttattgggttagagtttatgagctgtcctcacctatgtttatctaaggataatctagtgtgaatagaagttcatagttagcttaagattaagattatgttacctaggttatcaataattgaaataatcagttttaaatagtaaacggtcttataacataaaagtgactatttcatacttcaatcttatgtaaactatttacataggatgccatcactttcatgtctctacctaaacaattcaagatcacatcgtttgtactaattacaaagtgggttgcatccatagtattccccataataaagctcctaaccttattcatatactgtagactatttaggttatatactcgaacttaatctatttttatgtctctacataaaattcaagtttattcaagatagcctcgagactttagtttattggattcaagattatagtattcaattttactaacaaattcttaataacaaatttattgaatagaatatgattttaaattgtaaactacgagttttatgacataaatttcaacatttatgtgtctttttttcttttattattattattttgtattacttcatttttctccatgattgttgttttttattttagaatttagctaaagaattcaacatcgcatataagaaagatgtagtccattgtaagacatggagtgagaaaaatatgcttaattttcaaaaacaaaaataaaaatcgaaatggttaccaaacgggacctaagattgttccttttcattttttttacaaatacattcccatatgttgtaagtagttaaattatgactccaaaattggaaaacaaaaacaaatttagaaaaaatatttgttaagctttcaaaacttgaacttgacttgtaaaaacatggacaaaaaaaatagataatacaaaacaagagaacttagatatagtaagtaggtgtggtaattataggcttaattttttaaaaaactaaagacaaaaaaacaaaataaataagggtttttaagttttaggctattgcacaatcttatgcatagacgattcatctcccatttatcatttttatcagagaatagcaacaaagagtaaccattgactccatacgtacatgtatctagccttgcagttg

SEQ ID NO: 7822 - DNA, 3011 bp, Cucumis sativus
  Intron number 2 from transcript Cucsa.031320.1 (locus Cucs a.031320) derived from phytozome v7.0 (chr-ID scaffold0042 9; pos 308998 to 312008 reverse strand)
tttttccaagaacgttcaaggagtacgtgcctcatgtaaatactcactttgccttttgagcttctaaatttactgcataattgagtagctataatcatctcaagtgaatggtggatactgccaatattttgttttatatgaatctcctagacggtatgaaatctgtccaatttttaaggcctgtggttcactctgtaattgaagaccacacttaatatcatgacaaagattgtttgtgctgattattgtctcttgcaagaacatgataaaagcatccttcaaacagatctatagattctttccctctcatcaccttgtgatcttctcacgctccttaggataattcccttcaccaaaataaccgattgtgggacaattaaaactagttttttcaacaattttcatcaacaggttttgtacattctgataatttcgtggtatatcagcaaaagactgaattcatgatactcatcctagggcttctggtctcttcgggaggagtttttatggatagtgacaagttgactacttaggaggtggcatttggggcaaatagtgagttattataattctaggttataatagttcgtgtttatattattttagtttgggttataaataggatgcatttggtatgtaaactattttaatttggtaaagaaatagtgagttgggagatggtgggtcgtcctgtgtattcaagggggattggagattgacagtcttagaatcttcaatagagcgttgttggctaagtggcgctggcgtttttctcttgaaccaaactctttatggcataggattagtacgagtaagtatgacatccatctctttgactggacgttgaaaggggttaaaggcacatattgaactcattggaaagatattttctttaatcttcccactttctctcggtttactcgttgctttatgggggatggtaaggatacgtatttttgggaggatcagtgggtaggggagaataatcgttgttcattattttctcatctttatcattgatcctcattcaaaaactgtatggtctcggattgtctggttagcttggagaatcttgtgtttttttcttttggtttccattgtagtttgactaatagaagcgatggagttgggcctctcttctttctttctttgcttgaggggtgaaactttagggaggggaaacaggatattcatgtttggaatcctaatcctagtaggggcttcacatgtaaatccttgtttagttttttgattaatcccactccccctactgagttggtttttgacgtgttatggagggctaaggttcctaagttaaagttaggttctttatctggcaagttttgcttggatgtgttaacactgtagataggcttgttaggaagaggacttcgcttgtcgggcctttttgttgcatgctttgttggaaggcggaggaagatcttgatcatcttttttgagactgccattatgtgagggcagtgtggagttcattcctataggagttcggtgttagttttattggctcgaggagtgtcagaatgatgatcgagaagttccttctccatctgccattcaaagataaagggtgttttttatggttggctggggtgtgtgctactatttgggacatttgaggtgagaggaacgaccgggtctttaggagtagggagagggagcatagtgatatttggtctctggctagatttcatgtttccctttgggcttcgatttcaaagcacttttgtaattactctattagtaacattttacttagttggtcccccttttgttagttggagtgttttgatgggctggttttttttttacacccttgtattgtttcgttctttctcagtgaaagctgtttgattcataaaaaaagtgataaggaaatagtaaacattttagcaaagaataaaagaaatgataaatgtaaattagtaaaactgtagcaaatagtaaatactgtagcaaacgggggagtttttgaattagcatttactatagctaatcggaaacatttcaatagtatttagcaataagtggttattatagtcttagatagtctgtctcaaatagttccttaaagctcactcaccttttaggagagaggaggtgaactgggtgtggccattgaaaataaaggatgcattgaggcttgttatctccgtatgtactgcaaccaaatcttatagatcacccttttgccattattttaagaatatagtgattcttgaagtgtctttgtgtaaagaatgctcactcaagctggtttagtgccctgacaacaaaaggaagaaaagagatcttttttctaaacatatgatgttttcttacgcacttcaattcggaacgtgatatggttttgaatgatgaactggacatgggaaagttccaaaaagatctagatagattgtacatgaacggtagttggcattggcccctctattcgagaacttcaaccattttcaaacacctcatagcattttcagtctttgagtctatcaatttgtatgatttcacatttcacatttctatatgatttctcgagtacttttaggattccttttttatatatgatgcatattcgctatataatcattgataatacaccatatatacctggcctactagagccaaataatttgtgttttgaattaaagattgaatggtcttccgtaatgaattgttggtagaatcatgaaaaaaccaatttcttccatattgaaagcaacaaaatatggtctaaccttgatattatcccaattcttttcacacacgactggatgtggattaacgttgctttgaaatcttatcataaaagatagatctttttcatccatattttgaaatgtatttggaaggggaacctgataatgtttgtaaaggaacggtgtattactaagcgtaaattccccctaaaataacttaaaacttctttgtaacgttatatcttaatgaatttatgttttcatttacagggttggcaaacgctcaagttgctagca

SEQ ID NO: 7823 - DNA, 1782 bp, Cucumis sativus
  Intron number 10 from transcript Cucsa.205570.8 (locus Cuc sa.205570) derived from phytozome v7.0 (chr-ID scaffold014 16; pos 626377 to 628158)
agaggccgaagtaggagcaagagccacagtaggaggtcagtatatattttagcatctaattggtcttgggcccttgacacttctgtcttgtattaattattctatgaactttatgagcagcaagtctccaaaagctaaaccttcccaacggtcccctgttaaatctcgatcaaggtctgcttcccccccacgctcacgatcaaagtcatcatctctctcagggtatgtactctcatttgttaactataataatttattcttgtgatctttaagcttatttttattgttatttttaattaaatctaactgcagtcattgtttattatatttatatttatatatttgagtttgttgtcactcaagcagggtctgtttgttgcacccgtctttcattgggcagaatgttagactgtgtgaaataaacaacattaaagtactgaaagtgaactaattcttttgtattgctcaagcacgggtcagcaagggtttaaaatttagcaatggatttgatattacctttctggatgctatgtttttgcatgcggtgttgtggcttgtacaattctcttgaatgtgaaacccacttttttcttccaaagtattggatgcattcttggaatggtggagatgaatactggacaaacttcaaattagtctgggcaatgtatgggaccctctaatggaatgttgggtaaactttatcctatttgactcaagttattactattttacatctgattctattctctttttaataaatcttcgccctggccttcccctttatcaattgtgaatattttttttcaacagttgggatggctaagaaatgaatcgatttctttcattcattgtcctttttgtgtgtgaaagttacttgtttgttttttagatatggaaatatgcggcattctggggattggatattaggatcttgatgggatatgattcaattgccttcaatgcttttggttgagaaggtatgctgttttttagatgggcagctttcaaaaccttctggtacctatgttctaatgcttttagcaatgcaatgtccatgggtgctagattgggatcaaaggagatcatggattgcaattatagagctggatatcttgaactaagtgctatttggacttggaagtcatcatcactttcatttacattttctgctgcaagatttgccaagctataggatgcactatctggattcattgtggactttttgaggcacagtagggaagaatgctcctctccagtccactggtgtctataatatatagtttcctggagatttaagttttctaattttaggtcttcactttggtgtcttttacgttttgtattggcatatgttcttcatagttgaactactaaaaatattattttcccttttctacttatacgttgtggatgaggcgtcaggcttttggatcaaaattggtaaaagaggtgaattttaaatttgagttgtttctggaccttttgcagatcgcgatcaagatccaggtctccggtgcccaatgtaagtgatccctattatgaactagtcatcactggacgtgatattagaacacatcttaaattttatatgaagggctatttctttgttaatatttatttcatttgatatatcttgcatctgcatatggatatggtttacatggcagcgtgagaaacgtactagtaaaagtcccaaaaggcgtgatgctagcaaaagccctagcaggagcaggagcaggagccgaagcaagagcaaaagcaagagcaagagtccttctcggt

SEQ ID NO: 7824 - DNA, 7528 bp, Cucumis sativus
  Intron number 3 from transcript Cucsa.236490.1 (locus Cucs a.236490) derived from phytozome v7.0 (chr-ID scaffold0201 8; pos 240758 to 248285 reverse strand)
gaaaatattgagaaggtaagcattcaattttgtcttgtgcgttcatggaagctttctctagatctattcaacatattaaaaagtaccagcgacgagcttctttatctagcctcatcttgcacctatttctcttcaaataaaatggaactcttttctatccttatttttaaagcttttaacacattctaacccatttgcacactgtacttgaccactactagctatttccaaactttaattttgttcagccgtcacattagtctttaatggatgtctatttttatacattgtagttgtctttaacattcaaaactaaaattacctagaagttcattatttgtttgtttgaatttactcgttgttggtttgctcatgatgatctcaatggcatgtaaatgtcttgacttgaatgttgatcacttgatctatgtatattttttcaagttcaaataataaaagaaactgaatctcattagtgacatgtacaaaatggttatcagaagttggcagccattcttgtaaacgtgttgtggttgtttcccctaatttgatagggttcttgtttgatgggtctatacttggtagttgcttctttcatcttttgaatggaacttggtcttttattgtaaaaatgtacaaaacgttaaattaagttgcaattatcatatatcaatagtttggatttgtagatagtgactgaactaacaaaatgaaagagacctcatttattttgattggaacggaaccttagtagtttccaattgctctttaactcacgactgggttagaaagagaggcctgtacagggaggcaattgtgtgaaggtaaaaatatcctcagacaggttatagtgattgaaaacaatgaaaaggcccttcattgggcttgaataaggacttcagctttgtcctgaaagtagtaaaacaaagggactttacaccataaaaataaaagatgttgagagtaggtcaacaaatatagctacagaattagtagtttaagaataaatgcttttcattttcaattttacttttgacataggtgataagacagaatgcaccagtggggtattaaacaaggtttaggtttttgggattttgtcaagagagagggattgctaacttctcttgttttgttgaaggtcgtactatttcttaatgaactgaacagtttttatgtctttcaacacccatctgaaacccagaatcatgagcaacttttatttgaatgcttacaagatttatcaagaaggatattaacaactcacctaaccattaggggttcgcctggtggtaaaataggagacaaagtctctagtcatgagtttaattcatggtgaccacctgcctaggaattaattttctacaagtttccttgacagtgaaatgttgttgggttaggcgggttgttctgtgagattgtttgagatgtgtgtgtacctgatccaaacactcacgaatatcaaaaacaaatatttggtggtgtgagaaaaagaacaatctctactatcatcaaccaaatctttcaagcctccgacaacacacttactctcaagttaaattgaaatgacttgataattgattagaagacaacaccatatcttgttgatctgtcccacattttgcatctgcttaattgtaacgcatcgtgttaggagagggacatgaatgaaccgagaccgaatttgaatgagagggatcctgaggacatgaacatatagttaagaaagaattaaaagtaactatctatactaacaatgtgcacttcctttttggtggttcaatcattagaacttgaaagttaagcatacttagcttggagcaatcttatattgggtgacctccttggaattttcttaggatgcatgtgagtgaggtcaaatcatgctgaaaaacctgtgttggtttgtagggatagtagttcaagacaagtaagaatgacgttgtcaaatagcaggggatgcatgggagtgctgggaccatcagttaccaaatctgaattttgaatcctggacctggggtgttacatttataaaccaaaattttcaaacgtacatgcttgacacctccacgtatcgatactcattgtaggtcttgaaccgacccttcctccaaatatcctattttgtcgaaatggattcaagtgacagaaaattcaagaggacagactcaatattcgaccaactcttttgataagaagtgttaatggatctgaccttgaattcgtatccttcaattttgaatccgtatgtgagagaagaaagattggagaacttgcagtatctcatgtaggatcagtcatggtcttaaacaagaaagattgaagaagcaaggaaggaccgtttagcagatgttaatctttttggctctgataccatgaaataagagtggagaaagagagatatttctcattaaattaatcacagctttacagatgtatttataaggttgatcagagagttaacccaatacaactgattttctaactactcttattaacaacttagagtaaaccagaaactacttctaataacagcgtgcagattgataattttgaaggtttgatggctggcaaggatatggtccgcactaatcacttgcaatttgttaatcaaaatgtcctccactactcaattgcaatttgctaatgaaaatgttctcacattcctcacttgctatttgctaatgaaaatctccattctacttctcttgtaatgcaaggacccacatgctcaacaatctttcgtaagtgatttgtccttttgaaatcatttttcagcttgaaatttaactggcttagatctgtcataatcggtgttaatatcaatcactcatgtaatgtgtgctgtaatctgggatgtttggggggagaggaatgatagggtgtttgggggagtgaaaagattattgtgaggtttgatcccttgttagatttttgttttgatatccgtgagtgtctggacaagctaatctcatggaacaacccatttgaccctacaacatgggtgtcaaggtaagttgtaggaaattgattccttggaaggtggccaccatggattgaacctatgacctcttagttagttattgagacaatgttagtcccttgttagatttcatgttttgctttcggcttcgattttgaagaccttttgtaactattccattgttatcaatctacttagttggaatcccttcttttagttgagttgttttgttgggctgggttttttctgtaggtcctgtattctttcattttttctcaatgaaagtctttttcttaaagaaaaagatgactcacataaaggaacatgctagagattgcgaccttttatcttgaagtgctttctggacaaaatctttttattttatttattatttttattttttaagtttagaagtcttttgtaattatagcctttctaacgattttcagtaattggaaggtcatcattttttagtttcttgtgggggagggccctctttgatgctaacgccatttgttctggcatccctgcttaccctcctttttcaaaatttcctctacgctttaaggtagtagttttgtcgaataaagaaagtagtagttttgttgaattaaaaaaagtagtagttttgtttgagaaaaagattaggaatttcttgtggaagaggggtggtaggaactcaggaggttgtaatctcgacaattggaaggttagagctgctgattgggggaggccttggtagtagaagcgttttgaaagagagtttatgcttgtgctacatggagttggttttattcaacgaaccagaagctctttacgaatgataatcaacaagtactttgcttagtgatagcatggattaaattttcagtgtacttccagatgctgtggcattgcttagtgatggcatggattaaagtttgaaaggagagaccgaattctcatccaaagtttctttatctttgatgagagacctttattgagcaatttccctcgactgaatcatttaacagactcattttaatatgatgattggttgttttgaggaacagtaggaatgaacttttcctttaggaggcaaggcaactaaatgacagtgtttctcaaacgggatgactctccagttgtctacatgaaattatccttggccaatctcccaatgacaggattagaaaacttgatggttctggaagttattctgcaaagtttgcttgtttgtttttcgaattaaatttttttaaacttaaattttttctttttaattttaaaatttaaatttttatgaaaaatgtcgttgctcttttgctttttccccaaaggcagttctcatttagctttcaattggtgtatcatgtgtaaccatgcgtatgaagacaaaagtcacctctttcccccacggttattttactggcagtaattggtgtttcctatgtttggcattttatggttctttgggactctttttgtggagattatgctttgagaaagattaaaggatcttccaagattctctttaccgttgatgctctttgcatattggtagatgaaggttttccaggttgtggtgcctaaagttcaagaactatttaatggtaaagtttaccttttagtccttggatttgagcttagtttcagtttcatccctgggtttcagaactaatagttttgatccttgaaatttggatctagtttctatttggtcatccaaaactcaaaagtaccttgtctactgtgtctggtctcctaggttgatttggttttaattggtcctttaagtttgaaatgagcttgtaaatgcttcctaagtagagtcgacaattagttgatcatgtgatagtaaagtactcatgatttcaaagtaactacatatttgtttaaatgagttggaaatttattttattttttagatgggaaccaattagaaattaattccaaactctagagaccaattagaaatcaaatttaaaacttggagaccaaatgtgtcatttttgggaaccaaaagtactagttttgataactcaaccaatttaagactacgttcaaaacctaggaacaaaagtttaaaatttggggaccagatatttcactcaaaaccttctgcaccaattaaaagctaaactgaaatctcaaagaatgaagagtgttagctttgattactctgaccaaattaaaactatgtttgaaacctagggaccaaaagtttattttactcattatttaattataatctctccttggttcatcaagttgcgatcttttaatttttctttagcttagggtgattcattttccccgttgtatgtgtgtgtgtgtgtgtgtgaacttggatgaattaaaatgagaaagaaaatacccttggggggcaggggttggacatcccgtcctagaggaaactagttacaaagcattcctcaattgttgatgatcaatggataattacaaaagaaccttttgttgcttcgatactaccaagaagtattaagctgtacgttgccacaaaatgtattcaagtcagacaacttgtcttaaatccacttgtatctctctaactagcagccccaaagaaatgctcacacacaaacccttaagggactgttgtaagatgttccggcatttggatattctcgggcattctaggatgtttggacggagggtatttagagaattttgggtgccctcacatgggtttctagattcccaacatctccattttacttttttgtccttttattttttttattttacacacttatataggaaaattattttaaataacagaacttctgaaaatatttacaaatatgacaaaatatcacaatctacctatgtagaccatgatagtccaagatagactattctacctgtgttctatttttgcagttcatcatggatagaatgtgatgttttactatttttgaaaatagcttagtccctacccacacactaatcttcatttgcattatataattaactagatattcaattttaaatttaaattaatatttattttatataaaatcttaaatcatgatatattattttgttggaaaaaataacatataatgtattactttaaaaagggaaattcaaattgataaaaacaaatatattatataagttcaaattatatcaaattaattataaattattaaatagtcctaaaggccattcttggaacattatgtaaatttgagatatttaataggtaatctaaagatgctagagattgattttttttgaaaaggagacaagcttcaatattattaataaacttaaagtacaatagagttatacattgagagtaatagagaagcctagaagtggtgggagagagaggatcactaggtgtacccgaacatctcagctacgttaacatctccttagcttcaccctcgtcatatccaaaatacaagaacaatactaaggtcttggcgagaccaagataaaacctaaataacaatataagcttcctacagtagacagaagcaaagctgaaaagtaaaaactcaacaatatagatacaatttaaagcccgtcaaaactacaaaagcacaaattctgaactaacaatcgggggaaattgcatttaatctcttcatatgaaggccagtccagttgaggcatatgtcatgtatggagtaatctttgaattctgcatttgaagaacaccaagctgaagcttttcttttagaattgtctacaatgtcgacccagtccctttctttatcatagaagatgcgttggtttcgtttaaaccaaatctctgctaggagcgcttttatcaaattaacccaaattagaaaatgtttctctataattggaatacattggtgcttaatgaaccattaaagacccaagctgttttgagcatagaaaatatgctaaaccagcagttagatgagaaaggacagaaaatgaatgtgtattaggagctcactgtctttcgagcaaaggggtacactggtggtggagattgataattccgtatatctataattctggatacataagattcagattatctatattccccaaaaacaaacaacctcggaagggttttagcttccaaccaatgagcatttgcatttgaatcaaccaatgatcaatccaacaagaagccagtatccctcatcttctgtattttagactctatgctaatggaagtcttagtcccatgtaaaaacaaagatggtatgtatatgtcatagtgcttgcaatgataaaatgtcctggttggcacacctttgcacctttgaaacctatctcttgaggcataatctgatttccttttgatttttctgctattcttgctactttaatttcttggagatattctcttcacagttttgtaatcacacttcggttggtgtgtcatgggttgatcaaagttcttttggggggggggggagttggagagtatatgttgtaaatgaatatgcagatgagacgtaatattatcacaaatagcattccccttgttctcattcactcatccttattgatgcaggttcttgacagaggagagaagatagaacttctggt

SEQ ID NO: 7825 - DNA, 3205 bp, Cucumis sativus
  Intron number 3 from transcript Cucsa.119910.1 (locus Cucs a.119910) derived from phytozome v7.0 (chr-ID scaffold0099 8; pos 1865296 to 1868500 reverse strand)
cttggtgtggactatccattccctcctcatcttgagtatgctgctcttttactatttaatgttttcatcttacgttattatttctaatgtattactgtgcatgctaggtctacaaattctttaaggttaggagttggagtggatgacacatgcatttaatattttattttcttgaaaatccaaattgttctttaagtactagattgacgaacttttgtactaaaaatgttttcagcatctacaccataatgtcacagtttaaactttaaacaatcctcacaataggtactaaatcaacattttaggtgcagtcttctagctacttgaaatatacttccaattagagacataagtgaaaactaaaaaccttgtaagaaatgaagataaaattgggcatttatggtggtggcttagaattaatgagaatgtaacatgaagcagagttggtgtgtgtttaatgtaagaaactgaatatgagtggtttgctattattatattggaattcccaaatagtgtgtttttatccgagttgttgtggcatagcttggcgctcgcctgaggtgagaggtgagaccttaacgcattgcaagtacccaagttgagcaccttcagtacggtgctcgtcttttgtgcctttcaattgccttgaacatatgttcaaggtgcatcagtgcttgccttgtcaattgtttaactttttattttagaaaaagaaattcttcctcaaaacttggaattaggaggaagtatcattgtttgtaaaggtagaattaaagaaaaatcaaagaaaggaagaaaagaagagacaaagaagtagaaacaaaatcgaagatgctgtctctctctcttttgttcatccatttatcaaacaagaaaagaaggaagaagaagaagaaaagggctgtaattttaaaggatttccaaaatgctatggagacaatgtggacgtgggaatccatcaggaatttgatatatttggttcttatctatggttctttgaagggctcgataaaaccttctagagggttgaaaccggggttcctctgtctcctttctcatttctctaggttgtggacgttctaggcggcattatttttggagggttgggggtacaattcttgagccctttaaggtgggatttaaagaggtagctttgtggcatttacaatttgctaatggtacaatgttcttttgctttggaaaagagaactttatcttgaattacattttggggttcttggaactgatatcgaggcttaaaatcaatgagagtaagttttagattttgggtattaactgggagctagaaaagctgaatagatgggacaatttggttgggtgcgaggttgattctctccatttttcctatcttggcctcctaggtaatccaagagttctctctttttgggatgaccccctggagaagattaggaagacattagcttcgtgaaagaaaaacttcttttctaaagctagaaaatttactcttatcaaataggtgttgcgtgtgatccccatttattgcttctctttttagtgtgcccgtcttggtttataagagcattgagaaactgatgagggacttcctttgggaaaatgtgtaggaagggaaagggtctcatttggttagctaggatcttgtggggaaatccatggaccgggggtggaggttagggctttgaaatttaaagttatgtaacaaagccatgttggctaaatggttgtggtattttccactcgagcccgaattcttgtggtagagaattatcgcgagcaaacatggccccatccctatgagtgggtatccaaaagggttaaaaggcacatatcgaaattcgtggaaagatatttctatctagctccttcacattttacatcttattttttgtgttgtgggggatggtaaggaaatttatttttggcaagagcattgagtgggaatagacttctctcctttgtgtttcctaggttttatcattctttgtccctcttgaaaaattgtgtggtgctgtacttctttgtttggttagggaattctgtatctttctcctttggtttccaccgatgaccattagggaaacgacagatgtggtttctcttctttcccaagtggagggttttgactttaggcttgggagaagggatgcttgtttttggaaacaacactttgtaggtattgaaagcaatagacacgaaaacgaggcttatgtgaaaacccgagtaccgaaagaaaaaccacgatattgttactcttattcttttttgatgaattttacaataggtacaatgagggagaataaatagaatacacaagggaataaaaaagaaaaagattgaggaattagggtaaatcgttccataatcgttccacaaataccccaagggccaagcccactaattctaacagtagagattttcttgtaggtcgttctttaggattttattggatccttctcctgttttcaagttagattttaatgttctaaggaggattaagatttcaaagaaaatcaatttcttttctttgcaagttttacccggttgtgtgaattccttggataagctaatgagaaagatgctttcgtttgtgagtcctttgttgttgtatcctttgtcagaaggtggaggaaaactttgaccacgtgctatgggagtgccagtatctaagttctatttggagttatctctttccagagttagagatttcacgttcctttggggactgtcaataaaattggaacaacacagataagtttagcatggcccttgtgcgaggatgacatgcacaaaagagttagatatcttgcaggctaggcagagggatctttgctgatcggggagctcctccatccgccttttgaagagaaaagccattttttcttgttgacagggtttgtgcattattatgtgatctttgagaggagaggaacaatagagtgatttaaggtatggagagggatgccctctttggtgagggttcatgtttctctttgggcttcaaagacttttcgaaatgacaatattggataggggggttctctttagttggactcattttttcttttaaaaatactattttactttgggttctttgtttagcattgtaattgatctaatcgaaattgtctgttctttacctagctttatggagaccaattgtacttggttgtgcattcaataagatttggtaaaaacttttttaggt

SEQ ID NO: 7826 - DNA, 2225 bp, Cucumis sativus
  Intron number 1 from transcript Cucsa.283200.2 (locus Cucs a.283200) derived from phytozome v7.0 (chr-ID scaffold0265 3; pos 410969 to 413193 reverse strand)
tttcgattctgtatctgcgctgtgcttctgactacgtacgtatgtctttttctgctttccttcactcttcttctttatcttttgaagcttttaggggaattgatttgtgggtttgttgtttttagttctttctattcgtgtttcctttctttatttaagtagttgtgagtgaaagtatgattatgttagtttctggtggtttgagttttattttctgcagttgctcaaaatggaatactcttactatatttgtcgtggacgccgtcctaatggtgaatagccagttagaaaggtttaaagcggttctttaaatcatatgggtttatgatgataacttttttcatccgtgtttaatcattgttttaaattactatattttcatcatcacacgagcttactttttcaatagtgttcgcttttctctctcttttatccccctaaagttgggtctactttagtaatgcgcttatacttatagctaaagtgaaggcaaaagttttatcgatttataaaattacagatggatgctaaagtgggttctaggctagagtattttggattttttttgcattggaacgatgagagagaaagacaaagggggtgccctgttgacaccatacattttcatatttatactattctacatcatgatttttgtgtcactgggttgtggaggttttaagttcttgattatagcttgattcaaatggcatattggtgttagttgagtgatgtaaatttaaattgctttctgttgcatggtgatgaagaaactgctagttgatctccatcagaatgttaagcagcatcttcaaagaagacatcaaatttaaaagctttctgtcaaatcacaatgttgttagtaaactgctcttgacgctagtggaattgatgtgggaaatttattcctctagatggctgtttgaatagctacgagctttctttcaacaagtattactttccgtcttaaatgattggagtgattagagagtctttttgactttaaactttacatgtcagaggatgtttttattagaaatggaatgacgagagggatgtcaatgtcaataataaggctccttgtagggttgattccttatgtttggcaaaggggatagatctcacatgcttcaatgaaacgttttcttgttcactttacctaacggccctttttgtgttccttactttttgaccgaagtatgttggtctgacttggctgcatgctgtgatggaatttcccaatgggactacttaaaacttcattgcattagtggtggataaactattttcttggtagcttgtttaaggattggactttggatgtttttcaataggggatttaatgattgcatttttttcttatcatgcatgccaatgcttcagtacgtgtagtttagtatgcaatgaatgattgattcgttctcaaaaagattgttggtcacctcgttgatgtgcctgtgatttgcttcctattattttggtgtgcgttctttatatctattgttggtaggtcttggtctttcctccccatgtcattcaacagaatcattctttctatctctttcttctcttctgttctcgaggaatttatgttaaaaaattgtttcgctacattccttcatatcatttcaggaatattagcttgcccatggttagattaatgcctccttgattgaaatccacctcaacaacctttatcttattgccaacacaccattcctcagcttctccttcatcatctctctctctaactccattttttattttttaaatctatgtaaaaaagaaaacatatgaaatttacaaggagaggattgccatggagtttttccattaacatggtaaaaaaaagcctctgacaaataatctttattgtcagagattctttgttttccttctggctaaagattccaaaagaaagccctcaaaagcttttttgttcatccatttttacgtctttataatttgtgatactctgctcgttgtgtgttaattgaatgatgtttgctctattggttctcattctctgaatatgtatatgtttgctctattggttttcattgtctgagtatgttgcccatgtatcagttctgtgtaattttttttttttttgcccctctaaaagttagcttatagctcaggaattgttgtagtgtcttttatggatgccaatggtttgccatcatgttttgcagtaggaaaatttgaccttttcagtacaatct

SEQ ID NO: 7827 - DNA, 3839 bp, Cucumis sativus
  Intron number 1 from transcript Cucsa.202040.1 (locus Cucs a.202040) derived from phytozome v7.0 (chr-ID scaffold0137 6; pos 196384 to 200222 reverse strand)
ggagctcttctattatattttctttttcgtattaggtaatatttcattctacgattttcaaatttctagatttgaatgaaccttcgttttctgtataatcttgttacttcaattttttcggttgttattctagggtttcatttttcactactggattgcttgcttcaattcaaatgctcttactctaatttgaccgttaaactccacttcctaatcccccccaaccttgttcttggatcagttcttagctgcttctcgttccgattgtttgtttgtttgtttttttgttttaaaaaagtgtcgcttactgtatagtggctgtcggtacggaatcgtgatcatgttgtgtctggtttttcgatggaattctgaggtgaatgcgggtttaaatttgtataatctgttgttaattgagcatttatgagtattgatgtaatgtgtgatgggctcgatgggtggtttttgtttgaagagttcaagcgttaaagttgtttgagaataaggggacccggaaaataagttcatctcatacgaataattttatgcgtttattcacatgcgctgggactctgattttggttgcatgtttgtgaattgcaataggcagtttatttaaaattttagacattgaatatgtgagataagaggaaatgctccgaacatcccaagaccttgtaaaaaaaatttctgcaattgttgttgttaagaaggaggtgtgatttaaagaagatttggataggttgcctgaaatggaaggtatgaggataggttgcctcaaatctcttcctagtttctacagtgtctttgaagatcccctcgttcctctttgaccacatatcctatggatctagtttttggttttaacactctgcctgcaaatcgtttgctcatttaagttttcagctgtgcacgaaaaaatgagctatgagttcggtcaagttataagtctcttcccagtttgtacagtgtctttgaagatccctttgttccgctttgaccacatatcccatggatctattctttggttttaacactctgcctgcaaatcatttgcttatttaagttttcagctgtggacggaaaaaatcttcttattaaaactacgtaaaataatctattcaagcatttcagactaaagggacactaataaaaaaaaattctgcagagtctatttattagctctacaaagaaatagctggaggttaataagagcggattgtctgtcttcaggataaaatgagcatgataaatgacctaatttgttgtcccttttttcaccaacaagagcacaatttacctgttaggcatctttttcttcccacaagatcggagattcaaaattcccatccccaaatttgagcaaagtgaattgaataatatattatggccatttgttgtgtgtaataggaaaataaattggataatatattgataacatgattttagtaacactgatttttattattcgacagcttgaggatctctaatggtggtctcaagtgccatacttgagctaaataatgtcacagtttcggactgtgctttgaaatatggtggtttttaaaagaactactaaaaattaataactatattacaatattacaagggaaaattagaaacggtatccaagttacaattaaaccagcaacacaacaaaaataagtccttgaacttggtaatctaatgaattgtgtgtggatgtagtaagaatattttctttggagatcatgcgagtatattattgagattttctaatcttctttgtcgtaataagctgaaaaatttcttttttagttcagttttctctcagatgttaaacaaagtagtaataatttgtacttctctgttttttagtaactctgtttttgcagcaggttactttttaagttttttaattacttagttgtttttagctattctttttaaaactctcaaaggctggttgaggtcctatgttgtaagaggcattagctctaagtgaaataaaagagttttttaagaattctcttaaattgtgttcaagaattagttttacactaatttatgttctggttttagatggtaggtggacaaaactggcatttgattattggcatgtaggaatcattgattttctactttggttgaaatttaattagagcgttagatggccttgggctcttggttgttcactattatctttttatttggttttgcaacactcatggaggatatgttgtgtgcacttttggaatcgagcagtcattttgtagtgaaactgcaaaggaaatattatagactattagttatgtgatcttaaaaaacaaaaaattaagatttgaaatcgatgataaagaattgaaggattcaaaatgcaaacttatcttgatggagccatttagatggtggtgttgctcatgcagatcatcttatagatgtgagtcttgtggttggatttcttgctgagttgggtgggggagacaccgatttggaggatggtgaaaacgttgcatcagtttcttgtttctcagtttgggcttgtttattaggattttgtcataaagtaagatgggggatggtgaagtattgcgtgtatttctggctgcaatttgttttcaggctctactatctagtttctactttctactcttaggcagcatggttataagggccaagagttagttgataataaggaaagagctgtgtttataaattataaaattatacaattaattggttataatttttttcttatgagaaaaatcaggaccgacctcctttggacttcgttgaatacatggatgtagtttcatttcttttaaaattttaagtaacattatatagtaaaaattgtagatgtgcctaaggatctaaactgtactactaatcaattatcaggatttatttgcatttattgagaaatttactgttggaggagaaatagtcagtgttggtaaggggtttaaagtagaagattttaaaaaaatttaaatagttataataataataattatcattatttgatattcatgtgtgtctaggcaagcttgcatgcacgaatagttaaattagaacaacttctattgtagaactctaacactgtaccctatcccttaatagttagattggttggttttattattaaatgtagcctggagtaaagaaattaagtcactaaatgatgaagacaaagatgaattggaattttcatgacatctaagttgtatttttattcagtacgtgcatcatgattaatgtttggggagaaaagccgctttctttcgtgtgctagtgtctgtgctatttgtgggtgttatggactagaggaatggtagggggtttaggggggttgaaaaggggagtggaggtttatggtcttttgtttgtcttcatgtttttcattggactttgattttgtagacttttttgtagttatcctatgaacatgattttgtatacttgagtcctttcttgcagagggacttctcctttttgtggacttggctttttgtatgtccatgtattattccattgagagagttgttcttatcaaaaaaaaaaaaaaatacacgattaatgttgatatatacactagcgaacaattgtaattgatctatctaagtttctttagcaattccctcttctcaacctaaccttccaaaaaagatccattgtactgcttactcttgcaggcaggtatacttataacttttaatttgattttgtatcaggtatcttaacttatacaccacttcctatcgagagcaaacgtttcttgagctgtagaacctgatattattggttgaattgaagtttttttagttaggcgtggttcttaagagtcaaattcttagggagtt

SEQ ID NO: 7828 - DNA, 1568 bp, Cucumis sativus
  Intron number 1 from transcript Cucsa.123210.1 (locus Cucs a.123210) derived from phytozome v7.0 (chr-ID scaffold0100 0; pos 488943 to 490510)
ttgtcgtaccatacctttcagtttcttatttaacggtgagtgtttattttttttatttttttatttttaatgttgatgatttcttaagttacgtttcgtttgattctttgtttgagtttttgttatgattttgatggaaatgtgtcagggggaattggggtttttgtttgaatgaatgggtatttctttgtttaagaaaacgagccctgggttttgatctatggttattgggcttttggtgattttgttctgacttcaatttgaactgctgcccttttcttatttcgttgtgattcgatctgggttgatttttcggagaatttttatttttatggcgtttggtttgtttcccttttttgtcttttcgcctctagtttttcaactttgaaagtttcgagatttcttctaaagacttgcttccgatcatacacgtttctctctgttcgcaatttggaggataagtatcgtaaactacaaactgaaggggtcgatattttaaatgtcgatttgccgttttgattgttatttatttgggattcttgcactgttgctctgcaattggttaccatcttttgcccaaaaagaaatgtttttctttgtctctttctttatagagggtgttgtgagccacgattgtggtttgagacacctggtttttttatggtctgagtattttgtattttgcattcattgtatgagtttgtgtagaagtttctcgatgcaagtcattggtatcttacattcagcattgatcctcccaggtcttgtgtctattgatcgacccttgaatctttgatatctgtgttttcttttaagttttcaatccttttggtctctttgctatataaattgggttaagttggtagtggacagaacagagctttagtttatatacagttgtgaaatcctgttccttagttcttgatttcttttctaacacgagagccctccaaggaaacactaccgaattccaacatcagaaacaaaaatttaaaaattaatcttttaagttttcaatactttacttggattttgaaacattcctacaaaatctataacaatagataacaaaacaaagaatctcactagtgtaactaatgtttttttatcttaattttaaaaaactaaatgattatcaaatggggccgtttctaaatgtttcaatattgactaccagctgttggtggttgaatatttggtttttattgactttatctaattaaagtgctatttagcctctcgattagcctccctggtgaaagtccgttgtttgattattcttcctttgtgtggaagcttctattcttccttgaaatttgttttgcatttttgtaatccctttttcttttttctttttagaaaaacaactggtataagaggtaattttattgtatttgcattattgcaaatggggcattgttatttgtatgtccaaattggtatttgtctataatgtttttcaatagtttatagcagctgattttattcttcaagttacttactttccaagaatttcattgtcttttttttgtttttctttctttttaaacagaacgcatactctttcc

SEQ ID NO: 7829 - DNA, 1787 bp, Cucumis sativus
  Intron number 1 from transcript Cucsa.118450.1 (locus Cucs a.118450) derived from phytozome v7.0 (chr-ID scaffold0099 8; pos 355567 to 357353)
acaattggagagctctccctaaacaagcaggtacttcaacctactctctctctctctcattacattacattattatttctctctttcctctcctgatcttcgcctccgccgaccaccctcatcggcctccgagaaggcgagaactaatctctccatctccatctccacttccaactccaactgtctcatttattcactatttctgtatctgggtttctttgattttagataatattataaatcctaatgaatttgattcgtattattgaaaatttgaaagctatttatttgttttctccaatcaagagattccaactaatgagcaaaatttaaaattttgcaggttttgcttttttttcttcttcttgcatgcattggacatttgttctcaatgcctaaaaaaattgtatacgttactttcaaaagtaggttgggatttttcctttaaaagaaaaacaaatcatataccatagtggagggttgaggatgctgacctttcaagtcatttgaatcataagaaaaaaaaaaaattaaaatcacttctaacccaagtttgaaacgttttcatttttaacaaattatttgcccaaatttcaactctataaccaatgacttttttgctactatctttatagttattccttttccatcttaattagacatgtaattaaaaaaatttaattacttaccaatatagttcccactatatctacaaacttaaacccattttcattaacattccatacatgaaaaatttatatatcatcaattaatttatttcctaaatccccataaagtacattttttggtgtataattttcattttttttagagttctaatccattgcacttaaccaatcatatttatttggtaaggaataaccgttggttaaacctaccaaattcatacatatatagcttatctgaattagctaatatagttttagttagtttagcgatctttttctcaattcaatttgcttttttctttctttctattatcctaatttattgaagctacttgagaatatttataaaaaataattgatgggttacattaatttgaaaacaattagtcatcttctacctaactgaaaaattgaaataagaagttagggataaataaaattcttcaatagtaagtgactgatagtcacatcaaattcaacccaaccaacaaccttgtttaccaaaaacatacataattctccatttttcaatctaccccacttgcttttttgttctcttttgtttttttatttttaatttaccaactaaaagattgagaatttaaaaaagaaaaagaaaaagataaaaaaagctagttgaaacttgacttcaactttaattgaatggaaaggtggcaggtctgctcaaataaaaaaaaagtggggtatacacacacatatatatggatgtatatatgaacattcacaaagaaaattaccaataaagacttttcttaccttacactattattcaagagggagatgattgatttcaagcataaaaaattggggtttctactttttatttttgtcttaccatatatatgatgacataacaatgattggtatcagtctagcatgattgttagtgacttaaaaacggatatattttggaagggttaaaattatatatttttatataaaatcatttaaaaattcatataaatttagaatatagattttttttttttttgagattttatctagttttaagatgttaattattactttaatggttttataggattgttaaggtgtgggaaaagttgccgactaaga

SEQ ID NO: 7830 - DNA, 2258 bp, Cucumis sativus
  Intron number 1 from transcript Cucsa.365670.1 (locus Cucs a.365670) derived from phytozome v7.0 (chr-ID scaffold0361 1; pos 3511131 to 3513388)
ccaagtccggaaattgcaacaatcccttcgaattggtatatatatatttttttcattctaattgctatatttcatattcgcttttcttccggtttgattgttttatttcgatttggatttactccgtttgtgttttcctttattttgggtcgatccaattttgggatggacgatcatgttgtcaggacttgcccatgatttctcaaaggatttaacttaaaccatgaacagagaaataaggctatcttatgtgattgagattactgtcttgagtttcattcgcgtttattttcaggactacaaatggattctaagtaattgctttcgcttgtttcttttttgtttgattgtgaccttcactgtacttttcaatagcgattcgcgcaaaagtggtttggatcaataagtcttggaatctcctttctacttgaaagatattgggagggtggtttttgggtttgaaaggaatgaaactccatgtccggacggtttcaatattgccttctactgggaatgcatcgaggatgatttctacaggtcttttgtgaattttatgagagggtttctcaacacgtgcttaaataaaatctatgtttccttattcttggggagaaaaggtgacaaaagcctggcatttcaagtccactagtctgattacgaggggtatataaaatcatttctaaggtcttggttcaaactcttattgctaactagtaaggactttcttttgcactgacgaggaagggtcttggccaatttttaattcttaggaccttccttgagaaaataacccatgccgattgaacttaccaaaatgggtcatgggtgtacccccatgtatctctaaaatggctgaatggatgtgagctttttggtacccaaaaattgttgtgagaaggttcggaagtatactgtaatgggtttgtgatgtaactcaaatgagagaattttactaatgtttaaaagttgtgaatacaaggagacaagtactctatttatagcaaactaatcccaatcctaattaataaaagaaactaatacttaatcctaataaataaaagaaactaatcctaatcctaataaataaaagaaactaatcctaatcctaatagatttaggatttgagcataatatcctattcctactacttcattctatctctaaaaaaaagaccatccttaagttttagaatgaaaatgaaagtaaaaataaaaaagtaagccagtcgaatggaggcatcttggaatatccaacatcaataatatcccaattctgtgattctcgccaattgatcctagaactgatgtggtaaaaaagaactctgttgtcaaagaatatgagactaattggggtggatttttatttctttagtaggtttagatatgggtcagatgacagattgtattaatattggatggagttcaaaaccgagctcaaccgagctaggtcgggagatgattttgggttaaaatatgtgggtttaggatttttatctcttctttatttgctcgaggggtgtgactttagggagggtagtcgggatatttgtgtttggactcctaatcctagtaggggtttcacgtgtaaaccattatttagccttttgattgatccctgtccttcccccatacggagtcttttcttgatgtggtctggaggaccaaggttcctaagaaagttgggttctttatccgacaagtcttgcttggtcgtgtaaaaactattgatatgcttgttaggaagtggacttcacttgtagggcctttttgttgcattctttgaaggaaggcggaggaagatcttgttcatcttttccaagactgttattatgtgatttctgtttggagctctttttgcaggagttcagtgttagttttgttggcaccaggagtgtcaaagcaatggtcgaggagttcctcctccatccacctttcaaacataaatggggttttttatggaaggctggggcgtgtgctattgtttgcatttggggtgagaggaacgagcgggtttaggagatttgcatgacagggttttatttgtttctcttaatggatgtattcccttatttaaaaaaactatgctataagacaagattgacaagagtgccacatttctgtgatgtttttctaaggcccaagtatttgaacttctaaaggcgaagcatcattgtgatattgatttccccttgagcatataagaacctaatattgtctatttgttgcgcattcttcaggtcaaagttaagagctgggtta

SEQ ID NO: 7831 - DNA, 2232 bp, Cucumis sativus
  Intron number 2 from transcript Cucsa.184670.2 (locus Cucs a.184670) derived from phytozome v7.0 (chr-ID scaffold0127 4; pos 316049 to 318280)
caaggctattgagagaagaggtacctctgaatgaaatttgtgttattcgctctttcagtggatattttgtagttgttttcacatttaatcaacttagtattactacatttgtcacccctttccttggtgctctgccaccttagtacctgatggtcggataatcagtttgaccgtatgttctaatgccagtttgtgccactcaatgagacgactctcaagtgatactttcaaattttcttttcttaaatcagtaaaatattcagttggttctgttgtgttttctctctgaagctgatgcttgaaagacaagagggaaggaaaaaccacaccgaccctgtttgactctaaaggtaaaggtataaaggatcttgatcttgaccatccttttcctgaaggtttttggaagtctcagaatataaacagttggagggagatcctatccagggtatgctattaaaataggtttttatcaatgaatcattatcaggggcaacttgaagtatgtaatacctgtagacgtatagatgcctgaattgaataaaacatagaagcataaagaaaatttctccaattattgtggatataagaagttgcattgaagcatcatgagctggacttgaacaacaatcagggggtgataaaacaatgtcattgaagaaagaaataaaggaccaaaaactccaagtatgtaatacctgtagacggattacaaaagaaaaactcttaaataataaaagctgtaaaataaagagcaaatggttgcttgttcttgcacccctgtgtgcacacacaaaaaatggtgcagacaagagtataaggtccagaaaaggatcaaaggagtaggaaacctcccataagagactcactattcctagcactgtaaagagtccaaaagaaagcatggcttaaagcaagcccaagatgcttagtaataccattgaaaagagtggccaaccaaagcattatccaggaggtttaaaatgcttttaggaaaaggtaaagaccaaacaaaagcctccaaaataagtggatagagagacggcatggagtcttggctttggattcacacataatgtagaaggagataaagcaatataaagcatgtgcctttgtaaatgatcaaccgtattaatagtctaagctttcaaagaaaaatctttattttcttagaataagtgccctgatcactgtataaaggttgtgatggtaattggcattacccacctaattctctgtaagaggtttaatagaaaatcacatggaagattcaagaggccaagtccatgtgttaggagaactgtgaagtctaaaagtagacaaaaggtgggatatattgagcacagaagatttaagaggtcaagtccgtgtgtcaggagaaatgtgggtctaaaactaagcaaaaggttggatagattgaacacatagaagattcaagaggccaagtccatgtgtcaagcgagctgcaaaatctaaaagtagaaaaaaagtgtgattggttggcccgtttagttgtttccacatcaacgatgttttgacgaaggctcaaatcttatgcttcagttgcccaactcactcgtccgccatcatagcatatgcattagatgtaagcctaaacaagtagcggcatacagtctcataaacaccccaagttaaccaagaatccttccagaataaagtagaaggaccatctccaagcttacattgagcatgaccagcaatcaagtccaccatgtgaaaaatatcttcaagggtgttgatggtatcaccagttttattctacatgagattgtaacaggcagtgcttcttcttctcaaaagaaatatgagaaagttcccagcaactgtgatctatgataataatttagggacattatggtcaactgttaattcagtaaagcttaccacaattcacaaattattgctttcctttattctgctaaatttttcaatctatacttttttgtatctggtaacattatatgcactattaatgccaaataaaaaatgtcattccatggtcgtaacttttggaactaggttacgatatgccaatgagttcttgctcattttacttgattgttcttgacttgtttgatgattttggtccgctgcatgctggattcatcttaggatttctgtatgtgtcgagtctaaatcatcatccattcagaagttctgaggaatcaaattctaaatgcaggctgagcacatcaaggaacggtctaagcaggt

SEQ ID NO: 7832 - DNA, 649 bp, Cucumis sativus
  Intron number 1 from transcript Cucsa.104000.1 (locus Cucs a.104000) derived from phytozome v7.0 (chr-ID scaffold0092 7; pos 2629021 to 2629669 reverse strand)
cttcgccttccacattctcggtatctatttcccacttcaatcttctttcttttttgttttgctttgtttcttgatgcctttcaacttttgatattctcagtagtgttctgtgaaattatttaggaaagaaatgttgatgttttgattttagcttcggttgctgtaaagagaaaagtttatcttagtggagaagtgggaaaatcttttcctgtaatagttacgcctttctttttcttccttttcctgtgcaattcttcggaaatgtagagacagaatactgtggctttcttcatttatagtatgtttggtatgatttttttattaaggtttttgtaacagaaaataaaaattggaatgttcggtttataattagttcagttttagtggaatggtgcttcgtagggtcattattagctagctgtggttacatctaacctgattggcaagggcttgaatgtataggaatggttatttttcatctcttgttcaacttttctttaaactctatctacttttcctctctagtagacatattattttgttatggcttttgggttgtaaaattagactggtgggtgcacaattattaggacttttatgagttcttaggattgtgattgatgctttaattgggtaacctcttatagga

SEQ ID NO: 7833 - DNA, 4241 bp, Cucumis sativus
  Intron number 2 from transcript Cucsa.205080.1 (locus Cucs a.205080) derived from phytozome v7.0 (chr-ID scaffold0141 6; pos 197786 to 202026)
ctaaggtatgctaattctgcttactctcatctttttctatgtcaatggggtgtatgttgtaaaggaacatttactgatgattattgacatgaattagatgcaaatttacatgaacatttactgattaaggtggtatgggccatgggtcctttggttttgtagtttgattcattatgggatttttggaaggaatttcaacgtttagttatgttttttgcattttagggcacaatttgagaattctgtttttatcaagcaaggtaaaaacgtatatggtaacttgtttcctcgtgaagtttgaagatgaaataaaaacattgtttgataatttttttttctcatttattatttcaagaaaattttgaatatcaagaaaagaacatgtttaattgatattctttttgataagatatatttagcatttccttttaattcttaagttttaggttttgtattaaccttgtaatgggaaagatggatgatggaagcgtattcttttatgtccaagatttcaacttgaggtttttgactggaacctattcacctaggcataccaattccagtccgttcctattgttttgtacttttgtactaagatgcctctattgctttttgtatctgttgatcttccttctatttgttgtccaatatattttccttttatgaagcgattaatttttaggttgaagacaacagaaatgaataagcactctggaagagctttattagagaatcttgccggaccatttagctagagataaataggatggatgagaatcttccccatcaccgttttatttcattctccccttttccactattttagctattattccctcctcgctaagtggagaggtctttgttaatccaccacatggggtttaccctgttaataaattcatactatcattgaacttgtttcttatctaaaaaataaaaaatgttgaacacaatctagtctagtccagaaaaatctgatcacaacaacaatgatggcaaatagtaatagcgaaactaagaatgactaacccatccagtaggattgaacagaaataatttcttttaatgtgatatagcttgaggggtggaagataggttagaatagagatgagatagggaaaccaattttgtatagtttgggaatatttgcctgctgaaatggcttaggagttaggatactggagaaatgattgcaatccttggaataacaatgtttcaagaagacaaaatggcaagggggatcaatatgatttcagaaactttctgtgagggtggagtttataaatttttcacttttgtcaaattaatgtgagaggattggttggaacttggaattcctttctttgatcgagctcttctttggctatgtcgttatgtattctttcatgcttctctatgaaagcttggttttccagttaggaaaatagaaggtaaaatttcttttctttttgaatttattggacaacttcctctctattgctaaaggtaaatgaaaggatgagattgtaaatgaaggtatttcttcgtatgttgatgtggttgtaaagggaagagtgaagatattttccgtcgtaagaggtttgatatggtgacttaggagagataaattattcctaccagtgtacgtttccatgataattggtatttggtatgacatttgtgatgtgaagtagaaaattactaatgaagattgtttgccaatctgtaaactattccagcaagcgagaccttgcttttgtgtgctagcgtaaataatgtgagaactctgtgtagcagtggaggcttgtctgaaggatggggtaggtttttatgtcaattgcaagtgccaggataagtataaacatagtagagccgaagttgttctattcttgctggcagattaaacctggtagctacccattgtcttcttggaatgaggaaggaaataaatgtgtaggttgaatatttgagaggcttgcagtcattcttgcagaaattaagggagtagatgctagtggttgtgttcttcatgttccacaatagtgtccctttcctctaggccacttctgataaggtgattccgggaagttcaaaatgtttttcaaaggaagttgaatgatcccaatgagttcctttggcggacggatgattgaaattatgaaaaaaactgataatagcaaggaggagcaaagctgggtacaagctgcttacttcaaaattgaagaaaacactcaacaacttagtgtaatttcagtttatttggtttattgctagttatattcacactatattgttagaaaatagtcacaccttcaacttctgtggtcaaataggaagagacttcagactaaaggaaagggtggtggttgtatctttatggagttttttttttttttttggggggggggggtggggaggtaaaaagattcaatcagagcatatactgtaggaaaaatacgcatgagaattgactgaagggttatgaaattaatttgaagttcatcaaatgttagccggtcaaagatagagggcatgtggctgattggaaggtatcttaaccttgtgatgtaaaacagaaagttgtctggtggtttcataaaatggctttcttcctttagagataaaattaaaatgtgaggggatggtaagttgcttggatcttgaaaatttatggtccatcaaataatagttgtcgaatggagctcgagagataattggaaaatgagtgggtaccactatcaagttttctggtggtcgaggcctgggacaatttaatgtttaatacagtactttggtcacatgaaaaatcaaacggaaggaaaacatgttgtgtggaaattttttggtgatattgtgtgccatcgtcatttttttcaaactattgataatctagattgattgaaattcctcttaaccatagaattttttacacaggccaatgtaattaccactgctttataagtattagagtctgtttggaatatttttcaagtgtaaaataatggtttttaaccatttaaaaagtcatttcaaacaagctttctagtttggatggagaagaccaggaaactacaagtgataaaaggacgtggagtaacatgtggttgtgcacccattttactgaaaccaggaaatctaaaatggggaccagacaacacctttctattacggaatctccttagtgttggttatcaaaaccaacttgttcactcactactttatatgtcggttttatatttctaaaggagcgtttgggacaaggaattttttattatagttgggttattatagtttgtgtttcggtgtagattatttcagttttgattataatagtatgtacttgaggtgtaaagtattttagtttgaggagaaaatagttaacactggagcaaaagataaaataatgataaaagtaaaatagtaaaaatatggtagcaaatggggctcttgaagtagtgttgacgacaattaactagggaatacaaaatagtatttactattgtatttactatcgcaagaaggtggttattatagtctttagatagtccttgctccaaacatgccaaggagcctagctctgaagtttgagaaatggatgatgagctacaattgccaatttgggaaagtgggtgatgaaagcattacatgtagaaatgggaggactgtatgtgggaaatattaggaaaagaagtgaagcacttgtgtgtggatttataaaattgaaaccatagtccttggtggaacattacttaactaaactgatcctcaagatgttctcgacaaggttaggcagtgaaaacccctctttgggactatgggaggatgagatttgagacaattaattttcgaactttaatgttcttattccgtaattttgttttactgtatactccgaaaggaagtttaaactcaaaaagagttttactctttttttttaaggaatcatatatttttttcttctatccactaattctttagaactagaaatagaattggagctgcttctttttctttgtcggccgactgtaaagttgctttcggcataccatcacacatcacaaacaaagtaaaagaaagaaattaagaataataaaaagtttgccactatacgcatttggagtttattataaaggctggattgcttttttctccccttgacatgtattaggtgacatcttatgtgggaccttcaaccacaaaacatttctttatagcctttccgttaccataccatatgatttaatttcggactttacaggtcg

SEQ ID NO: 7834 - DNA, 3025 bp, Cucumis sativus
  Intron number 1 from transcript Cucsa.184550.1 (locus Cucs a.184550) derived from phytozome v7.0 (chr-ID scaffold0127 4; pos 231150 to 234174)
tatcccaattcccccaagcgcccattttgtttagggtaagcgtaagttgaatgtaattgaaaattctaaaacctggattcctattttttcaatcaaacgctcgcaaaagttggaacattgccttgaacatcaacacacaatctccataatcttctttctttctttttctttccttctcccttgtgtttttctggctttgggttttcttttaattcgtcaaactctccttttttggcacctcctgttttgaatcttcataccaatccaaccatacccttttttctcttcttcaatctgagcaatacaccacaaatttcctcttcttccaggtataactgctcgttctttttcatttctttcttcttctttaccaatgctgccttaattttgtttatacccgtttcataattttcccttattgttcaataattcttggattttttctgttttgaatcttcggttcttctttatcacccactttttctttggttgaattcgacgccggtttaactttgaaagcaaatttgcggtctaatttattcttttctcccctagtttgtggatgtttgagtaaatgacacgattatgagttcagtcgagtttttatattgtttcccccctttgtaaattttaggttttggtataatttgtgattgtgtgtttggattagatgatgggtttatattgattcttgcatacggtaggttgttggctagaatttccttgatattagagtctgagcagtttaactcatgcggatatggcctggaagtttgatgccatttaggcagtttaggtgcaagaacccgggatcatgcacaatagatggagcttgttaccgcattatcaaaacgggttattgggataatactctattctgtttagtttgagttggagagtttttatcgaaaatctcttgcccttgactggtatcagtatcttgtactaagtctgtcttaaatctctagaccagaggttttattaagtcttcttcttcattctgataagttaaaggtttctacattgcttttcttggaaccttcaaatggttgagtggaaaactgtggatcttacatcctaattaataagttccattatcatgtcctgttgaataattctgccagattttctcttctctaagcattgccaattcaagcttaattctctagactcgaggttttatttagtcttattcttcttcttgttaagtatgaatatatttcagcacaaagggtttctacgttgctttttttggaatcttcaaatggttttttgtggaaaactgtggatgtccttacataataagtaataagttccattatctgttgagtgattttgttcagattttgtcttctctatgaattgatatgttttggcgtatctcttttcttcatacatatattattgaagcagactaggaaaagctgaaatatttaagaaagggaagatctttctcttattcttcaaaataagtaggtgagaagacgaggtcaccttctttcgttgtttcaatattcattagtttgcttagtatatggtgacaatcttttggtctcattggaatctttttactcatatacagcatgctctatttcgagggttctttgaagatattatttttaacttataattcttttagtaacttttaatattgttagtttcaactgtgaacttggaactcgtagatgatgtatataattgcactataagaggtctgatcttgtttctagaaccagaaatcttccgtcttggaagagtttggcagaggggataaaggtcgagtttagaatgatgtcgcatataaagaaactagtgtggaaaggatgagatgttagatgattagttaatttttatatagtcaagttattagattttgttgatttcttttttattagaatgttctctcacaacttgaagatgtttcttctgtgttcacggaatggattccctagttgttcttgatcattggcatgctttaactaacttttttgtatcaaagatattcttgaacctacattgaaatgttaagggtttgaagttacatcacttattttttttaaaaaatgtccaaccaaatttgtttatcaattttccatagttgtggatgcttattatctaattccggtgcctcgttctttgttaaaactttggcttgtatgtcttcactcttcgctaatctctttctaaccaaaaaagaagttaataataaaaataaaaaaagtattcactaatctcttaatatcctggtacttacgtttgcatttcttttacatatctaactttattgacttgagtaatgaatgtagagtcattcattaattgagacatgacaaattgtagtttttcttcaggctttgtaactgaagctcacagacaagtatattatttgcgcaatttttttgggtagctttataggttaagaggtaaacttgagtactagaaactttatacaatttatttacttgggaatttccttgtatcttttttccttatttggaaagtcttatcatgaaaaaaacacccattactgatgggaatgaaagtgctcttttctaattgttggccatttattggttaatttcacattatgagatttgaatattggttagattagtcgtatcattattatacaccttttctttcatttgcttgtttattcaaacagtttttcttatttctggatgggttaagaccctagttttggaatttataactatctctcattgactgcctgaattagttgcctctcataacgactttgtccatagataccacattgtaggagtacatccatcacggagttgtgtgatgaatgttgttttgcggcttaaaaattcaattatcagtatgtgcaaagttgctttcttttcatcttctaaattgttacctaatgttggatagtgattatcattctgtatttcaatcacatcaaactttgagaaggtattgactggttctctaatgtttgaatattcttctttgcttctcaggatacttgctttctaaataagaaacaaccagtggt

SEQ ID NO: 7835 - DNA, 1110 bp, Cucumis sativus
  Intron number 3 from transcript Cucsa.201420.1 (locus Cucs a.201420) derived from phytozome v7.0 (chr-ID scaffold0137 4; pos 335335 to 336444 reverse strand)
tgaaacttaaacatttctttcctccacattacaaggtcaattcacattcctttctttagctacaaacttgaaacattgacgtactgcttcttcaatttcatttctccactctacttgatgcaatgcaatcaccagatactaatggaatcgtggcttctaaattaatgttctctgtattctcaattttaggtgcctgaactttgaaattaatgtctgattctccgaattttcggccttaatcttttaagaactccttaaatttaggtccttaaccaacctgttttaaaatttactaactaacttatgaacataaaattgaaagtttaataacttaagagataataaattgtacatcttatgtacttgtacattttttaaaaaattattgaataggctaaagatttgttagacatataattgaacgttgagtgacttttggagacctattaaacaaaaccttacatttaatgcaaattcaaagtttaggggttaaattggatgttcttagtttttgagggaaacgatcatgagaatagtgcctttggggtccatttcacttgcaaggactgcatgggggtaaattttaggtgatttcttttggggcttagtttataaacttggattatatcaggttaccatttaacaaaactaaggagaagcttattgttcaagaaaattagttgttaatgaaaattgaaaactaaaaacttgttttctgtttttgaaaattggccaataatgcaatttttttacttaagattgataaaccatggtaagaaaatgaaagaaaatagacatctatttcaaaaatcaagaatggttaccaattgagactttatattatatataaagacagatacattccccatctcaatcttcccgtcttcaatttgccttttaggtgatttgatgatattcgtacaaccatgaagtcaatttgaatgtttaccttacttgtacaggatctactctataggttgtataattgtatcattgagttttctgacatatttatttatatatataactcaagtttcgattgtccactacaatttttttatcatggattttgcaggttgacatcaaagtgtctccaggatcacacgcaaa

SEQ ID NO: 7836 - DNA, 2420 bp, Cucumis sativus
  Intron number 1 from transcript Cucsa.210990.1 (locus Cucs a.210990) derived from phytozome v7.0 (chr-ID scaffold0150 9; pos 11144 to 13563)
cacaggcgcccctttaaacaccgtctctcgaaaaggtctctcttattctttttattttatttttagtctcacgttattgttcaatatgactttagatcacgtgacattttttttaaaaagattaaggtcaatgttcaatcctcttaccctataattattgtactaaaatttaatatacattactgatattcattttgacacaactgatacgcttcattgttcataccataataagcacttgcgatacacttcacataccaaatatttagattttgaaattttattaaagaattgaaaaagaaaaaatatatatttgattgtaaaaatatactatatataaaatgggctatagagataaattttttctccccattttgtcgtttcatttcagtaattctaactataacattagtgatagttttgtcaatttcaaaacttgttaaataaaaattcaaaagaaaattgtaaatcgacctaatatatatatggaaaagtggaaaaactttttgttttcaattttgtccattttgttagttcatctacttgtttcctcatttggtttcattgtaatttgtctattaactttatttttcaatttaaatatgaattattgtaattatgtctcatttccatccgttattaacattcacttctcgtattaactcttttatctctttcaacctttcaaattcttcctttaatttttttaatttgaaattatttattataattattatctcatttctcttaactattcacatttctaaactcttttatctctttcaacttttcagattatttcttttcaaatctttaggtacaaatatctcattctttttttttcacaaatcacagcaaactgtcaaagggcgagagaaatcaaattatgtttttctattatcttctaattctttttactttttattttgttgtttattttttatacagggtttagggttttcaataatttgaaattaattattgtaattattgtctcttctttttttttaatcatctaacggttttaataaatatttgggtattaaacatttacgtaggaacgtgaaagatcatgatatagaaaaatgtttgaaatattaccggcattgcacgtcttaagcactaataatattataactcaagctaaaataatttatatttcaaacacaaactattataattcaaactatgataacctacgactattataactcactcattactccaaacgtctcctgaagatgtattttagttttttcttaaagttgataaagatcaacttatttacaaaaatatcacacactactttatttactcaaatgtcattaggcatatttacttaatttttattaacttaaacacctttaatattttgtcattttcaatatttgcgtatattttgtataggttatgtaagatgtatcaagtgtatataaggtgtatcaccttgggaaaatttcaaattgtcacccactacaattttctttaattaattatggatttttcaaatagagtaaaataaacaaagatccatcactgataaacactaataaacactaatagacagtaattaaatagtctacctaattaatcaatttatcttcaaatctaattaaatcatgcattctaggttgtgatggttttctcctgtgtctatggttatagcaaagtcttgtttctaagctcttttcttcatttgattttatggaaaaccaaattttacttactgatgatttattattctttaggtttcattatgtttcactaatgtggatcctagaaatactaaagatggatccacaactataactccgccaatctacttctcaaattaagctcgttttttgacgaaatcaagcatatacacggattcaacgtaagaagagaagtagaaagaaagaaaaaaaaccatacaaaaccctcatccaatccttaaagttgacgtttgggtcatcgaaaatcgattctcagtgtcaaaatctttagtacaaaggaaagtacaagagagaaactcatggatcttggtcttgaatggccaatactgagctcagaggtcccacaatcgtcctcagtcaccctctaagcctaaaatgaaagataacttaaaaggaaatcggggtggcactgcagttttatggctcctagctagcttctgttcacatgatcggggactccaacactgcagcagaaaagggctaagctgcagtgttgttttttgtgtttgtcaaaatgtatcgactttcaaaccttgttctctttctcaaatcctaaaaaaatactaggacatgacatcagatctaataaaataaagtaaaaactactataaatataaggcaaaataacaccctggttagatatatttcattccactcagttagtttacgtgaagtttgaaatgaggtatttgttgatgaacaggc

SEQ ID NO: 7837 - DNA, 185 bp, Cucumis sativus
  Intron number 9 from transcript Cucsa.281110.1 (locus Cucs a.281110) derived from phytozome v7.0 (chr-ID scaffold0263 3; pos 1014411 to 1014595 reverse strand)
agagctgtgttggagtgtgggttgtagatattacggtataaagcattatccatttactctctatggagattccccactttattgttcttgtttctcacgattctttaaatttattgttagtagaaaaggaaagaaaaaactcaatataattattttgttgcctcttgcacagcggacagagccgt

SEQ ID NO: 7838 - DNA, 860 bp, Cucumis sativus
  Intron number 2 from transcript Cucsa.368330.1 (locus Cucs a.368330) derived from phytozome v7.0 (chr-ID scaffold0363 9; pos 8152 to 9011)
ttgcatctgtagatcaaacacaaattccagctactgttagacctccccctcctcctccagacaagtatccagaaggtaatatacattatcatgatttggcatttaaaaggctctcaactgcaccatgtatgtattccacattcataactatatgaacattcatttttaagttaaatcttctaaatgttaatgtcaaactatgaatttttacttcgggagaaatgaaataaatgtgatgatattaacgtttcatgcatttgttttttcatcacaacatcctagaaatgtgaatatctacaaactcatacttcagggatgagaacttataaatagcctccactctccttcttttcttatctctcggtatcttctttttcttcttatttttagtatcttttccagatcagattctactatatttacacttgatgaaaaaatagatcagactggtcgatggaaacttagtactaagtagcctcttgctaaaacagactactctattaatcttttcagaaaagaaaattgctatgattcatcctaccacactccaaaactcgatttaacttgctactacactccaaacgaactttcatcatcaaatgccaattttagaagatatttcacgttatgaattctcttacgtttaggccctcctgatgctgaagtccaggaccaacatcttgaacacattgttgatcagccggccgaggaatccaaggaacttagacaggtattctactagtttgcttgataaagagtaattaattatacattgtaggcttaatcggtcaatggagtatatccattcgacattaggtggagcaggtggcaagaaaaaggaaagcaaaaagaacagcagc

SEQ ID NO: 7839 - DNA, 2117 bp, Cucumis sativus
  Intron number 6 from transcript Cucsa.356370.1 (locus Cucs a.356370) derived from phytozome v7.0 (chr-ID scaffold0357 7; pos 1143447 to 1145563 reverse strand)
tatccccttccaatctaagtcccagttaaatagatgtaagtttctctgtttcagtctttgaattaggctgtcttctactataaattgtaaaacgacattaatcatctgtttgactgtgagggaatatatttagcttagaactaatgaatattattaagatagtagatgcattagcttagagcatttatattaatatgctatctatatttccaacctatcgcataaatatccatgaaatatatggaaggaaaaaagaaaattacatttttcatgtctgaggtttgaagtttgtttcaaggtctctaggttttgatatcgaacaatcaagtctttagtatttgaaaatatgcttgattttagttccgccattaatagtttcattaagtccagttatcctcgtgctaatgtggcaataataattctatggttttaaataaatttcagtccctttttgctttggttcatttgttcttatactttcacaaagtttattttggtcctatattttccattttggttcattttggttcttatacttcaaaagatgtttattttggtcctatattttcaaaatatatagatttggtgatttaaaaaaagtagtagagatgaaaatgaaaggaccaaactattcaccttttaaaagtacaagcatagaaatgaacgatttagaattacagggagtaacacaatatttaaacttaatggtaataataacacgcacacatatataaatattagtaaaataagcctttaacaccctctcccttttcagatttggccttactccaattcttgttttttttcctttcaaatctgggcttccaccattttaaaatgcgttgatgtggttttgagtcttgtgggtctgccatccagtcaacttgtgctgctgatggtagttgctggagaagtgtgaggaatgtcattggagagaaaatgaagggagaaagaagaaaggaggggtggctgagtttttattcttttatttttccaaatttgaggaaagggttattggattttggtggtggttgtcgccggtgagggcaacaactttgctagaagaaaaatagtttgtattaacggctagtgatataacaagggtatttctttttaattctttaagcttaaaagtaattttgaacatttttaagtttaattatatttttgaaagtttagtgtgagtcaatagtcaatacattttttaatttaactcagttattgttttagtatgttttaagaaatttttaatttttattttagaattttgtgagattttgtggaattttatcttttaactcaaattttgtttgttgagaaaatttgtgtataatttggatcaataagaagttttttttaacgttttaaaatttttgggtatttataaagtttttaatagtttagggttatttttctaacacaacttttacggtttccatttaaaacaaactggaaatacatttttgaaacggttgaaagtttagacacttttttttttacccaaactaccaagtttaaagacattttttataatttaactttacttttactgtaaacattattttaagaaattgcctagtcagtaccttcattaatattaatggattttgttagtaaagactaaaatataggatttttttaatgttaaggacttgatcgttcaattttgaaatcttaaatatagtatttctttaataaatcttaaatatagcatttagttaatattagggatttgattgttcaactgctcatatcttatgtgtcaaaaatgtatttttccaaaaggaaaactaataatagttagttgcataggattataacttattaaggaagaaaaagaagatatttatttactaaaatacattgcatgtctttcttgatttataaaattatctgttaatatttatgtttatcaacagctgttaatatatccaaaaaattgagatctttatcgtagaggaagtagagtgggaggacggtaagcaaaatgatagaggttttgttttgagtgttctcaataatgaaaaaatgaagtaccgcgaacatcttattttgtcagtgactttgtatcgtcttgttaatctgtcatacaatttcgtttgaatattaggtctcgc

SEQ ID NO: 7840 - DNA, 1873 bp, Cucumis sativus
  Intron number 1 from transcript Cucsa.213750.1 (locus Cucs a.213750) derived from phytozome v7.0 (chr-ID scaffold0154 3; pos 1663832 to 1665704)
cccttcttccctttccacgtctcgcttctctcgaggttagttttttttcttcttttttttggttcaaaagagaattgaatcttcaaaattttccatcatcaatatattttagggaaatgcatgggtccattccaagtccccaattacatatcattgttacactacaaaaaaaagaaattaaaaaatatatttttcacgttcgaatgtctaaaccttaaggtcaaaaagaaaatacagttgagttagatttgtgttatcaaatctttaagtagtttattgttgaaatgaagataactcattaggataatgttaactatcagtttcaaaattttaatttctaccttgaaagaaaatgagggaaagaaccaaaagatagtctgtttattgttttacctttgcatgtcatttttgaacttcaatcagtaaaaaattaattataagagttactatatctcattattagggtgggaagaaagaagtaaacagtatttatgattgacattttgagtcttcacctttcaacatgtctctttttatttgtcaaaaataacatcatttacaaacagataaacaaaatgtacacttaatttactatttgatttattccaaaatttagttttatcttttactcttgtagttaattaatgagaaagttggacctattctcatataaaaaaggttacaaatatgtttttgaggaaatatgtgttacatcccttttctttagcacgtaagtttttctcttaattaatggaaacaaacgcataatccttcttatcatctttctttcatattctttcatattttatatgccaattgaacataacttaattgaaacgaataaggtatccttgaccaaatttattaaatatttgaattttgtacttgttcttttaattaaaaaaatttgtttgtacgatacatttattaaaaaaaatattaaagtagagatatatacaatagttatagaaaagaacaaaagatgcccaaagattaaaagagatgatgctaagagtattttgaatatttaaaagtttagatcttacactagaaaaaactatacgttatatcaccctttccataaaagtacttttattcctagatcttcgattaatccagtacatgccaagaacaaataacaaagattaagctttttaaattttaacatcaaaagaataagaaataaggaaaaaagcatagcaaatatcatataataatcttgtcttccaacttatgattcaaaccacaaagttactaacacattgagatgttatttgagctaagcttttattttatgatacatttgaaatgaatctgtaaacactccaaaaacacttattttactcaaaaatacttatttttctaatcaaaacttaaattttattgactataaagaatgggttttagttgttaaatcctaattattagtttttaagccttttaaatgtgttatttcaaattttttatgttaatttgaaaggttattttttatcaatgtcatgtaagtataactaattcaatcgttaatcaataattgacgtgtaattctactcttttttttctcgtaataaaaaaccaatggtatgatgaattctcaaattaaatactagacatacatgagaattgagagtcaagggaataatagtgacattaatatatgaatgaaactataggctataaatatagaaacaaatagataacttagcttatcattggaaggcaaaggtagtttgtatgaatgatgtcatattgcaatatggatataaataatgaaaaatgtttctagaaaaatctataataagttaaataataataataataataaagatattattgttatatatttgtgaaggtgaaagagaagagcaaagca

SEQ ID NO: 7841 - DNA, 3105 bp, Cucumis sativus
  Intron number 3 from transcript Cucsa.228020.1 (locus Cucs a.228020) derived from phytozome v7.0 (chr-ID scaffold0193 3; pos 26734 to 29838 reverse strand)
tcttattgtccctgctctacagattatccaatatagtaagaaccaacttgctagactcaacaattccgtgtgtgaatgtgcttattttggttcacttgatgataagatgtttaaatatttgcaaattggaaacatagacacattgtctgaaattagcctttatgagttcttttgtgtttcaatgcaataatacgcaagtcttcatttttttccaaccttaatcttgattaagaattttatgagctgaattggaaaaaaattagtgtggtatatatctaatgcatgatttgtaacacagatatgggtttctgttttaaacctgaactaaatacgcatgagttgttattggaatcaatgtacttttgttcttcttcctctttgcttgtttatcattcttgtattcttgctccctccaacttatcaattagatctcagtgtttaatctggtacgggtctctccatatgttttccttttctctggtgtgtagtaccttcctttattcatcctcattaccttttcattttttttctccacccccaagggcgggcttattgtaaaaactctagaagccctaacaatttctgctggtatcacccatttttcattgccacttcattgtgaaggtagaacttcacgggctgtataatactgtatggtgttcccccagtctattgtgcttggttgtgagtaattcatgtggcatttggagttaagtgtgaaatagtgaactccaaaaagttatgaagtttgagaagtagtgaactcttggagcccaccgtgtaaggagttaattagatataaattgatgttcttttagtagtgggacccttgaactccttgggccaaacaaggagcggagttcacaactccacttcctccatctcccacttcccaactccttggaccacctgcagtcactaattcaagcaaaatgtattggtggtgttattagtactagttcaagcaaaaagtattggtgttattagttatgggaatggtgccatcaatggctttttgtggaagatgtttctagagaacgtaagattctttgagaggtgggggtattttggataccattcaatgcaagggttcactttggagttttttctctaaatacttgagattgtgaatgttttttcactttttttttcttacaagaaacaattacatatattgacgaaactataaaaggaggaagggagatccccaaaccaaaggagttacaataaatacttccaattggacaaaaaagaggaagtaaagtaacaggagaaaagagatacaagttacaccagaaagggcattgtaaaggacattataaaagaaattccattagtagtcaccttagaatattgtaaggcaatttacaccaagagactgtgattgttgattggctgatgttaattgaaatacgtttttttgtatcgcattacttttccctgtgtttctctctcccacattatttttgttggagaactgaacttcttcaattttatactatgaagaagatcatttcattgaaaattgattttctttggccagaacttctgtttgttttgatcccatctttagctaacgccaaaaatgggaagactttgaacgtgtatagaagtgtcttgtttttccactctatttttaaattcaaacaattgacatttctagtagaaaagaaaacagaagaaagtggaaaaagggtataaatccattgactatcatgtcagattctttgatttttatggtgtaatctcaccaaaccctttataattactagctagtttaaatttccaccaattgggagcctttcttttaaccgtttggtgtgatgaggatatttcatctcccatttgtttgtttctctctagtattatattttcatgtttcccataaaattgtgatagtaaggactaaaatcaaagcagttaataaaattatgtggtcagacaacatgtccaatgcttgcaagaagtgtcggactatgtctctctctctcttttatttatttactttaattcctgacattttggcaacacagttaagacatgctttggacacatataggacacatttaaaaaaagttaagaaattagaccattctctagattaaaagtcttattactattggaaagttaaggaaatataaaagctcacttagaaagaaacctacacaaaatacaaacctagtgtggtttggtctttggtgatgtttcatgttttacgttgggctttggtttcaaaggcttttggtaagtacactctaggcatcatcttatctagttggaaaccctttcttcagtgaggtttttgtaggcttgtctttttgtatgcccttgtgtcttttcattgtttctcaataaaagcagttgttaatgtcagaaaaaaaaaaaaaaataacaatttgcctcatcatcaagtctataaagattgagttgtgacaatttaaacatttactacgtttaatgactttaaatgcattggtgataaaatttatagtaagtcaacccaactaatgattaagatgataatagtactgaagtaaaagatattcttttagaacttttgttatcttgtttaagttggaattgacgggaggacccgtaccgatttaagatttataaaataacttttattaaatatgaggcttgcgcttcgtactacttagatgcgtcaccccttcaagaagcctttagcattttaaaacattatttggatccctcataatgatgatatgatgtgaaacaatggtgtattgtttgtactttattatagtaaacctggaactttagttttgggaaattttggttatgctaaatctaattagtttcaatttgcgtagctttagttcaaggaatgctatttcagatagttcttgctgtcactttcaaatggtacattgaatgctggcaccctctcatcggctcccttcatgtgaatgcttaggatgtttttcttagcatcatagtgtgaatgttgttttctggttggagtagttttgttacgtataattgaaattgtttgggatttttcgttcagtatttggtttccaataatacaatgatttttggccatgaatgatggagtcctactctcttacttcatttacaggc

SEQ ID NO: 7842 - DNA, 1532 bp, Cucumis sativus
  Intron number 3 from transcript Cucsa.189380.4 (locus Cucs a.189380) derived from phytozome v7.0 (chr-ID scaffold0130 5; pos 107091 to 108622)
tagcagtggaccagtatcacagatacaaggttagtcaagttcactcttaagattgttcatcatctatttaatttcctcttataaaaaattgtggtttgattattgttcggtgtcacctaattttgcaattctcgtttcacttcttgccttgttatatagtgtttctgctatttaagtcaaagatttaagtttacttctttcttcatgaattcaaatcaagtacatgagcattccttccattctaaataattaatcaaaagtaggtgacggtttctctgatgctttggttagaatataatgaaaaatgcttaataaaattttaaattttatattcagtttagtttttctagaattaaattcttaaaccaccaattcaacccaaaagcttaagctaacggataggtgaaggaaaatttgatagaatattcaacactcccttcacttgtggtttttgtttttttttaaaaaaagaaaacaagcctctcattaagaaaatgaatagacaaagtactgtttgagtccaatgaagagacaagattaaagcctatgagactagtaagggcactcagacatttcaactaggttgacacctcatatcactctttccgtatcccgactttgattgaaaaaaaaaccaaacccatccgaatacaattcaaaatacatctgaaagcaaaatacacaccaaagacaacaaactaccaaatgacaacacaacaatcttaaaggatctgataatataacaaaatcccccaaaacaaataagactacaaactaaaaaacgactactcatgtaaaaatgcctatcaaggctaatgtcttgaattgagtatgcttcaaacgctttagctaaggagcaccatgaggaagcattgattctagcaatctgagactgttcatccaattggattctttgttgtgaaatattctttgattttgctcaaactaaatttctgaaagcagggcctttatagcatttatccatagcaatcttgatttctcttttaaactggtgccgataggagctgcaaaacgttcttcttaaagtcggaatcaaagacccaattgatgttgaaggatccaaataggtcaaaccaacatttttctgcaaagggacacctaaaaaacaggagttgtaaatcttcagccctcacttgtggttttgaaatatgagaaagatccaaaaagtggaaatcaatattaaatgaggaggaaacaacattgcaagggcttagaacacatgacctcctagacctcctgctctgataccatctgaatcactaattcaactaacacaaatagtagtatgttgccacactatatctgtagccactctctaattttttgatccataccaactcaagtgtattttgtagggatcttttgcagtggtttgagtgctcctcatcccccttcccacagtctatatctggtcatccttcattaggatcgtttctgataaaaatagaaacatattaacatgtttaaactatatatttcatttgtttactattttatgtatgtttaggaag

SEQ ID NO: 7843 - DNA, 729 bp, Cucumis sativus
  Intron number 14 from transcript Cucsa.337080.1 (locus Cuc sa.337080) derived from phytozome v7.0 (chr-ID scaffold033 56; pos 223507 to 224235)
caggtatttacaatttgtctgaataacctttgattcataatatttctggaatactatttctcttatttcttattattcgtagttttttgtttgcttagaagtcatcactcatgggagaacagcattattattttttttgcctagcctaggtttaaaattttggatttggctggatactgttctagatttgtgtagttatttggcgaagagataccattatcaatcttttgtttgcacagtgtgacctgtccattcttaagtgttaatgttttacgaactagttggggttgttagcaaggataaaatttaattgataaaagttgtaaattacatgtaaaaagaaaaaagttgtttttccagattttaaagctcctgtcttttgcaaaggcaatatacacttttagttaaaaagtttgatatctcgtttgttatattcttaccaattgtagttaacatagacatacaaggggtactagcatacatttgacatgacatgacatgaacatgatcaaatcgcacatctttagaaaaagaacatcgaatgccgtgtatcttttattctcaccaattgaagtagcatgttcaacttcatgggtgctgatttcatcaaggaaaaagcttttgtttcttaaataaaaatagaaattcaagtgttcgttgagaaagtgtaaatgcttgctttggaatcttgcagttatatcctccggaggattggctagttggttcgtc

SEQ ID NO: 7844 - DNA, 1875 bp, Cucumis sativus
  Intron number 2 from transcript Cucsa.143020.1 (locus Cucs a.143020) derived from phytozome v7.0 (chr-ID scaffold0107 9; pos 1315132 to 1317006)
tctcctgaaacttggtcacaaggttagagaaccccttcaattttcttttagggaaacataaactattcattaatgtgatgtggtggaataacctatgaagtttctaacaaataacatctacaaaaaaaaaaaccattgatagcaagggtagttaagttatgatgacgaatcggagcagaagattctccaagagtggctaaaagagataggttttataaaatagtttgtctcaactctcatttgtgaaggtgcggtctacgagcattggatacgaaccaaaaattccataagaaagatgatctttacttgaatagatctgttttatataggttgtacaattgtgtcctcaagttctaaggttccacaaccataagaaagcccaaacatgatgaagtcaaagatcttgcttgtcctttttgaatgagtgacttataagtaattgggaaatgggagtaagatgtctccaggtcttggaagttcccatccaaaagttctagtaaaaattacgtaactctgtggcataggtgcagctgctaaaattatggatttgattttctgaactgactgtttatcaacatagggtagcagcttggagatgtacataacccctcttctgtaacttctcaaatgtgttaattcaaagaataactgtactcccaaatgaaaatcttaagcttcttttggagacggtccagaccatatatgttgataaacaccatcactagtgcttgtttcaaatgtgtataataccttggcagaaacttagtcgagaaggagcgacagtgcaatgtatttcacatgattttgttatcgagtttgaaatgcatttggagggggactgggagctagggtccattagtttcagaaaaaaaaaagaagaaaaagatatatcattagcttgcatctcatcttttacccatttcttctgcatctttctttggaagttcatctgagaatggtcagttcttttctcttttcttttctttttcccctccacacagtatgtgcattaggaaacacggatgtcatattaagttgagacagtgtcaagcactcgtatccaattcttttagaattttcagacatgttgaacatgccaagaaaatcttttggggatgttaagccatattatctaggaatgaagagcgaagcatattgaagatcttattgatgataacttatgaaaatataaagaggacactagatatgaatgaataaacaaattatacaaaagctacacgcatgaattgatagttgaaaagaatgaaaatgtattatgaaatctaaggaaggtcctattggatagcaactctctctctgaaatttatgttcaacggaaaatctaaatcgaaacttgccttttcatatcttttttcttcaccatagtttattttaaataattaaaatgtgtgaaccttaactgcttaaatgttacatattgtctagcttagtatttttgcatgtgctaaaatgtgttatatacaattatgtttttaaaaaatgtgttttagtgaacgtggcccttcattaaaagtaaaataaaaaatttgtatgcaatttcaaagactcgctttgttattgaacatccaagttttctattttgtaatataaaaagctaaagagtcaagctcaggagccctagaagcggacataaaataatcttatcatggaatgtttttgcactcgtacactaaataaattagtaatgtaaaaagtcataaatattatgttgatgagaaaacttgcatcatttgggtccccatcaagttctctttccttggttttttgcatgcttagtaagccaaattttatatctatgcaagtttaaactccaattgtgaaagcttttggaaaataattgtctaggttgtggtg

SEQ ID NO: 7845 - DNA, 3863 bp, Cucumis sativus
  Intron number 3 from transcript Cucsa.002900.2 (locus Cucs a.002900) derived from phytozome v7.0 (chr-ID scaffold0003 4; pos 74823 to 78685 reverse strand)
acgttatcagaaaattgggaccaactcttccaaaggtctattaacattctcttagttctctttgcatcccattttttttcttgtatcagcagtagatagtgcttggtcagttgtaatttatttattggtaattaatgttgtgattggaccaccagttgaagatgtacaccgttgacctttatgtgaatatgttgtgcttgtaaccacatataatttggaatagtattttacatttgttttcatgaaaatgcatgtaatatattacccaaaagtgaaggctttaaagttttgatttcttaatatgaatgagtattccacaattaaacttttgagtaattttggaactttttagctgatctgaaatccaaattcctaataagttcacactttacggccgcacacaacaacatagacctcttaatttgcttaatgtttcctctgattaatctgctcttttggtactttttttccttctctaaagttaattccttggtttgttgacttttccttttccattttccctttaaggcttttaaatctttcaaagattatgaaacttatagaattggaagttcagggaaggtatttgattgcattagattttcctttaagtccagggagttagaacatgattcaaatggctatgcttcacattagtggccatttcatacggaatgtttctacttctctaccattatcgtaccttaaattctttgcttgtgttattgaaccaacagaagaatccctgattcctcttatctgtagtgtgctttctccaatcacttgtggggtatttgttgtccattgctggctcattgtataccattttttctctctctagacacttctctcgtttaaatggccattggccagtgaccttaaggttgaaaaggaaatgggaaccttgatatggtcctgtcttaatctgttcttaaaaaactttgggaagagttgaatagaagtctctttttgggacaaagtagaatatggaaaaggttttagagccatattgtttttcaatctctctttcttctcttactaaaggtggcgcctcctgagatgaaagggacttactggaagtactaaattgggtgtatcctccttgcagaggagaagaacggtgtggcccctctcaaatttcactgttgaagttaaaccactctttgcacataaatagtcactaatatagtaaagagcagcccttggcactttggaaaactaggagacaagaaagtaaagatcttatggttcacctgcccggaggaaatgaatattattggaggctttcagaaaaaatcttaaagtgtggttcttaaaccgaactgcatttgtagggatgcagaggagatttaagggcatgggtgttgctctgttccttgtttggtataaagtgatggatctacagtgtttctgaattttcttgggttttgatgtaaccgagggaaatactatccagttacatttctgccaggaactcttagaagagcttaccattttggtaaaggttgcaaaactacatgagtgaaagggagtggaatgaaagcttttgataagataatagaatgctagtttattgatggaaatgagatcctcaatacacaattccaatccaaattttgtagagaattggaaaacaatcgaatcccaatcctaattaatcaaagaaactacctaattctaattagcaaagaaaaataatcctgacgcaattcaatcataaatactaatctcaatcctaatcaattaaggatttgaccatatgaccccctaatgtactctagtcctactacatcaatacattctgtggggaataacatggcttattggtggggttgagaactttaatctgtttgactactagtttgaataggcaaggacttcattaattcttataatttggatcctagcatcttagtattagagcattgattttggccataagtcttgatgttgaaggtgtaacagttgctactggaaataaaacaggaatttgtgcaaagatggactcaggaatttggaattcttaggatttaaagaagattgttaaaaaaaaaagaaagaaagaaaaaggagaagataagccgtagagtccttttgaaaaaataaacaaccacacaagagtgatgaaagagatgaaagaacagaatctacgggaggaataatcgagtttggttgtgacaaaaaaagaataacccagtttggaaaattataggttgaaccagattagatctacttgttgtcaacgcacccagaagatatcggggaatttcaaacaaagttggctgactagatggtggcaagcaaaccataaaacactagcctaagcaaatagactaatcatgagtcaaacaggtgttggcaatctttttttttttgcaaaggtattgttataaatgctggggtgaggatttgaacacgggacctcttgtccacaggaacatacaggtgtcagttgagctaagctcatgttggcgtgttggcaatcttttggaggctttggttcaaaagatacacgagcttttcacaatcaaaagttcagtagggacgttttttggggaattggttgctttatttgcttctacttggtctactcctaaaatcccacttggcaaaattgatatgagagtttcctatcaaaaagatgtcttttaggaaattgattgtattaaatatggcaatgtcacctagaagtcaaataaagttcctcgatgtcaaaccaagtgtcaatctagtgtcctacaaagaaaccttagaagaagcggtgtactaccaattatgagaataatttcaaagtgaactctccctcaaaatgagaggaggattttgtttgcagaggaatgaagtacaagttgttaacaaacttacataacaactatcacctaattcaactaactctttggttagcattttacaaaaaaaggccgttttggcacttgcatcgggaagaatattgaaaacagaagagtttgatctgttttttttaatacagttattgcagggttgggggattgaacctccaatgtctagaaataaaaattatgtcaataatcgtctagctaaacccactttgagaatttaatttatagtcctattttcaacaaagttggattgggggatttaacgctcttctaggacttttcggactgggaagtaagtatgtcaatatgaattccccaacttcttcacattaactcttgacaaggtagccttcattgctatcttatggaatgttgaatctagaacttggtagtccctgtttgagaacttttaaagaagatgaaattgatgaatggacttgcctcactactttggtatcttaatattcaaagaaagacccacatatcacctgaaaacataatgagtacttatatatgattggttgggtagatagtagtgttcattttttagatatttttccctaactgattaactgatgctagttttatgcaagccaacaatgtactctttatatcattcacctatgaaataacaaataatagcatcaggttcgggtttcagtggtcacatttaattatttctctttcttaattttttaatggagttggagttgtcctctacttcagtgtgtgtattgttcatgcctacatgcatacatccacttaaatatttgaccatgctaccaatcctctggttggttttattatttcttaataattatctcagtcgtaaaacattaataatatattgacattttgatgtatgtgatcttatattctcttatgtaattgatgtttaagataaattattatgataaaggtttgccattttggcattcaaaaatagtcttaggaagatgatttgagttgcctatgttctgtattgtcaggacgtatttcagaaat

SEQ ID NO: 7846 - DNA, 3694 bp, Cucumis sativus
  Intron number 1 from transcript Cucsa.349870.1 (locus Cucs a.349870) derived from phytozome v7.0 (chr-ID scaffold0348 7; pos 1085623 to 1089316)
cgtggtggctgcatcttgtttaatcggaggaattggtacttaactcttttctgtttagaagccctaattattgttcaattttccacttcttatgatccatgacatgaagccatatgctttgtttcaattgtccctcagatccatctattcggaagagcatattttaaggttttactttttgtgggtattctatatggtttaagatgcgatgaaacaaggacgattgaaatctccttatttgagtaaatggattttcgtatttgaatatttttcgtcggatttagctttgccagtaaatattttgtttcggtttttttctagttatcgtaaatagttaagatgttgggattattggctttaatacttattattgttcgagataggaattttggaattatgagcaagttaccaattgaaagtagctgctagcctaagggatatctacctttttttatgagcttttttaagcttctattcaagctgtggcaatgaatcagtgaactttatcaatgtgtttcagtttcaatattagctggtgagattcccataggaccttggtttttcagacctctctattttgaaccaaatatatgctaagcaaggttgcaaatttatcgaggtttctagtagttcgattgttaaaattctgagagggaagaaaggaacatttttctgagtaaagggtcgtagtaatgttaacccttcctacatctagaacagtgtgttacgggggggggggagaactttcaaaaggggagattaactcaaaattggaacggaatgttagttaacatggcctcttggccattggatctgtagagctgctaaagcaaatatttctgttggacctcctagccaatttttggaaagcgtgaagtgcagtaatttttgaggacttaacccagaaccacaaaaaaggtgagagcttccgcaaggtaaaacttacaatgtatgaaaaaggtcccttaagtatgagacagagaaaaataaggataaactattaaagatgatcaatggttcgtgaacaaagaatctacaaaatcttacaaatttaattctaagttacgttgtgggaaccctaagaagagacatgtcttcactaaataggtcctcagttccatttctgccataacttagtcttatgtgatccctaaccctttgacaagacatagggcacactttgggtgggatggatgaacaaaggagagctgcaggctttttcttaaacttctttctctatctaatttaactgtagtttatgaaaagaatgttgcttatcactcagcaatattagatgcttcatctggctttagcattaaatgtgcaagcacatggcttttttgagctttttagaaatgaaaacaatgttcctagttttaatggaaaaacagttgccagttgccacatcccagcctgttaaattatgatagattatgatatcgttcctagctatttcaatttgaaaatgaagggtttataaattcatccttcacaaagaaactatgttctatgccatttggagatgttttgcaagttaaatttggggaaatgtgtggatttaagttccatctagaatatgatatcactgagaactaggccctgcagttatcttggaatggctaatgtatagaatttttgtttgattgaattggaatagcaaaaatggactttatattttggggaataatgccaaatcaaatttgaacaatggatagatacagaaattggacctaaatcagtatatatacatgcttttcattcaagatatgttactctgagatagtgccttccacatactgggatgttttacatgaacgggaatgctgctatgtttgaaagaaagatatcaacaggttagggtgggctggttgaattgaatgttaaccattcaatcttctccataaaacaaaacttttagaggggtggggagttttaggaggagatctagtcgcttcaggtttcatgcctatcttttggcttggttataaggatttttgaacttttccttcaggtcttgtttttgttagataacttagattggagtctgtttttgtgttgtgcattttgtagggttgtctttttgtacacttgtattcttttatttcttcacagtaagataacacatggttttgcacttgaacaaaaaaatatctttaacatactatttgctttgcctttcgtcttgctgcttcctttcctcgtgatttctggtgtattccttgtctcctgtgctctcaagtcccgacttcaataaattgatttttaataaccccataacttcatgagtgttgaaattaaatatccccttatccttatttgttaaggaatttgtctctgctttgttcagaccactcaaacagagctatcctctaacatgcctgatggaacacaacacgccatcacatcagaagcaaccacttattccacagtttttacaatgttgtgtctgtcggcagattttctattaccttttgactcagcaatcttttatttcgttctatctttcaaattcttgccaccagatccaacttcagccaataacccctatgctccccaacatttagcaacctaccagagtttggagctactacttgtaaagtataccaattagtcacaagttgccaaatgaagtacaatagatagaaaatttattggaccccagcaacaaaaaatattacattagaattctaatgcaatgtcacagaaaatgtataacagtgaaagtccttttttgaggactctcgtttccacaaggcaactaattctcaaagttttgccaaacttaaatcttactattattgctctggtacctcgtctgaatccaaagtcttcttcagcatgcccctatctcggtaggttcatgcttccttggtatggtagtatagttggtcattaccttctatcccaacaacttaggtaattacaaatatgcccatgttaactgaatatccttagtatcattctactatttccctacaggtgttgtacacatgggaacaaaaaccaccatcccaattcagagttgccttcactttagtagtttatgtcaatatcatttaattctccatcattccagcaacttcatcctcttatcagttctagcagtcgaagatattttctaatttttcaccttccttgatcccattctatttgttcttgaagcattgctgattcgtttagcattttcatttccgaagtgtaaaacataatcaaattttttacatcagccatcaccacttgaaccaccaaacttccaatattcggaatttaattttaatattggatgaagctgcatgcctaggatgaaactctatctagatccaaaatttcaaaggtttcttaaaggtagtgcagtatttggatttttttgggttttttagcatttcatatttcaagttcagtctgaaaaaaccaaaaactgaactgaaactgaaaaaagacttatttcttccctacagctagtgaactccccctttcaccatcttggtgaagtgagagagtgagacaagcaccccattacctccttcatttgtcgtgatgaaaaagacagatgagttcaatttttacacggattaactgtatatatatacattatgccttgacaaccacgtagaatatatatctacttttttgtttctaacctgttacaacccttgtaggtcttttccttccagccttcgtaaggccaattctg

SEQ ID NO: 7847 - DNA, 927 bp, Cucumis sativus
  Intron number 9 from transcript Cucsa.256210.1 (locus Cucs a.256210) derived from phytozome v7.0 (chr-ID scaffold0222 9; pos 3890895 to 3891821)
tgtcggtagcgcttcagatcagaaagaggccaaatgtagcaagtagatgaaagaacacaacatcctccagtaagtcaccatccctttgaaattagaaaagaggaaaggaaaagacctcaaagcttaagatattctttgtaatttggccttgttcaataagctgaaccaagccaaagatctaacttttatgacttgatataacttcaaaaatgtgtagatattgttaattgtaatgccaaaatctcatatttccaccgccctgttcatgtgtgtttaatacgaaattaggccaagttcatgatcaaacaagagaaatccatcccaaatgacgaaagaacgcaagttttgtattaaaatgatattcaaaagcttactattaccactctcaagaagaacaattgactaactaattttaaaataccgattaatctaaattaactactaagcaaatataaaactaaatatattagttatttcgttaattaatgcttatgcttgtcctttgaaacacaaatcatatccatgaatatacactgtctttccaatagcatggactctttcaatttatatagtagagtctaaatatccacgagtacatagcaaacattttgagtctaattttaagtttagacttctctttctctatcacaaatatattatatatatatatatatatattttgcttacatataaaattctcaatcatattttgttcatggaagagctttcgaacaggcttccttccaactttttatttataacaaaaaccaaccagttttcaaattttcactcctatatagtgaattctagttttttttattttctttgtcaatgtttgtatcacttctttagtgttagaactcgtcgagaatctattgtaattcgtaaaaactactatcgtcatgtatatgtgagcttttaaagtaa

SEQ ID NO: 7848 - DNA, 552 bp, Cucumis sativus
  Intron number 10 from transcript Cucsa.218130.2 (locus Cuc sa.218130) derived from phytozome v7.0 (chr-ID scaffold016 58; pos 296139 to 296690)
agctggtagttagctttgttgaagaaaaccacaaggtgattggctaacgatttacatcccgtttgatatcaatttcctttttagtgttccgtttttaaaatttatgctcgtttcctctcaattactttattatggtttcacctatcttaaagtaacacttgaattacttgtcaatttctaaaaatatcaaatctttgtattcaaaacttaagtagatagtggataacaagacattaaaacttatgatcacagtttctaaaaactaaaaaccaaaatagttaacaaacaataacatatttttcagatcttaaattcagcaactaaatggtcaagtctttagctatactggtgattagaccaaagaagatttctctttgttcttaagagaatagtgatctaccaaatggaagtgctagcaagattattactgaatgaagatggttacgagatcataaaaatgtgaaattagaaagaatatacttcgccatgattgtgatatcaaactaaattactgattctctttcaaattttcaggataaacagaaaattttc

SEQ ID NO: 7849 - DNA, 1150 bp, Cucumis sativus
  Intron number 1 from transcript Cucsa.135230.2 (locus Cucs a.135230) derived from phytozome v7.0 (chr-ID scaffold0104 4; pos 102145 to 103294 reverse strand)
tgagcttccgtttgctttactctatattgcttctggtaatgggtttttcaagttcctttgcttcctgtccttgctaaactacttagctttatcttgttcggttttactgtaaaggagtaactcgatctcagtgcttgattggtgggtctagaattcagatgtatgttttgtagtttgcgtttttttgaaacggaggttggggaaatacacgtgggttttgattttattcggaatcagattagtaattaaagaggatgaatgtagtatgctgggaaaagcacgagtactctttggtgtatactggaggtgctatgttaaacagaatcaacctttggttggactcaattgattgtgaactgaagactctctttcctaaattcttaaatatttgaccatttacataagttgaagtttcaatatttggaaagatgaaatatctcattacttgttggttttgagatgaaattttatgtttatcttatttattattaaaaaccatgaaaaccaaatgtgatttcaatcaaaagaataaaaaatgaaatccaacccataaatgttaaactcaaaaggggaccattttgagaagacgaagaaactctcccattatctactagatttgagatggaactctatgtttacctaataggcactcaacattagtttaaatttaattgttttttcacatttcccaccatgatttaattaaatttcatggtgcttataaaacttcaaacacaaacttaagcttagtgccgtttgggatagggtgggggtaattgcaataaacaaatttacttgaacttcattgccactttaaggttgagctgttcatcccttccatgtaggaaatcacgatcaaggtcagaaggtagccgctgcagcttaccttaaaaatttgagtcgaagaaatattgagggagaatttccatgttcaaatgttagcaaggggttcaaaaacgaactgctgagagccttgttccaagcggaaccaaaggttctaaaagttttggtcgaagtggtaattataattcttgcatgtcctgcatatttaattcatgggacacatcagtaccatcttgccgatgcattccttcttcttcttcttatatctcttttataatgttctggcagttccatagcatagtgatca

SEQ ID NO: 7850 - DNA, 3557 bp, Cucumis sativus
  Intron number 5 from transcript Cucsa.176920.1 (locus Cucs a.176920) derived from phytozome v7.0 (chr-ID scaffold0122 5; pos 957042 to 960598)
cctcatatctgtatgtcacgtctctattaattctttccacgctccttccttatttgatacatagatgatagaattatagttctttctgctggatgaagggaatagggaccgatagaaattaatgcacctgcagagcccttcttagctaccttttaagataaacactatccactttactaccaatgtggaacttttagcaaagtgtaaaatatcattgactacactgtccatgtgagttggagaccttaatttctggatgtgattgggactgtagtctgacgcaaagtgaaatatctccatatctttacaaaagtccacatttatacattgatatacggttcctcttgctgaaatcatatgaacatataacagaatttgagttaattgctgacacggttgcttttagaacatttgttgatgtgctacctacgcgtgagagactattttctaagagacttatttactttggggcaaccaaaagtagttttgttgagcatggaatcgggagatgagataggaagtgtgtgcgtgtgccttgggtggggtggggggaggagagagaagtgagaattgtggtaggtgataattttatataatattattaaataatcagaaaaattgagagtacataatgaccttttacattgtgaaataaatagacctcaaagaaaccactggaaggaatatctatagatggaaaataataattagccataaactctagggaggggaatgggcaacgattaaaagagagaatgtagagaggaatgatgatgggtagagtgtaagtgggaagggggaaatcgaggggggaagggccagtactggcttatagagatttgaatgctcatgacctcattcaaagaaaatgtactcagttgctccatctcccttggtctgtagcaaatgcctttcaaatggagggtcttttgacaatctttttctccattgttcttttgtggcttgagatgggcctttcctactcgacatttttggtatgtcatggtgcttgcctaagcatgtgaatagttggtaaatctgtctaaatgggcttaagttttatggaattgtgaggctagggctttccttggcatgtttaggaggaaagggatcaaagaacttttgaagtcaagttttttggttttgatattttctagaaacgtaatgcttacctcatcttgatggtgtcttagactcttagtcacacaatattcttttgtaattaaactcatgatcgttaacaattggaatctctcccttagtctctttgggtgggggtgattccctttttcctcagccgttaggttgttctcttcttacaatgcatccaagtttctcatgcccgagaaggaataggagagggaaagaaagaagattctctttttggtagcataagggtgtttgttccaatcacagtgtgtggaaggttttttgttttcaaacctcttaatactctgttttttcttggtccatcttcttttacttccctctctctgcttggttcaagatccataatgagttttgaaggtatttgtggaggaaatggatcaaatagattgttcttctgcccgtttaatagtgaagataatggggataaaaacttggaggttatttccattaccctgaaaataagaggtgtttaattgtaaccgatgaataggtttggttcctcaagagaaatttcgaggctgagaacaagcttggaccagaaaggaatgttcaattagcaaaggaccttgagctgcagcctcgtcaggttgctatttggtttcaaaattgttgagctcgattgaaaactaaacagctggagaggactattaggctcttcaatccagctaagccatggaagtgttaaggtttgactctaaaaacctactcgaggagacggttcactaaaagctgtgattcttctcttaacaagataactgctgcacaaagaaaaagaaagaaggaagtctatgctgtgtgaagttgacaaatttggtgaagaaccctgacatgatctagttgctgattcacatttggaggatgaagtctccaaatcttcaaagatggcttgtaagcaggaggatattagttcaatcaaaagtgataggtttgattcagatagctcacactacactgatggggttcacccttcaccactcctagagcctggggattcttcctataattttgatcccgatcagcctgacttgtcgcaagacgaagaagataacctgggaaagaaaaagaatctattactcccttacatcttcccaaagcatgaagatattgatgactgtaattcacccacaagttcttgtagttttgcattacccattgaagatattgccctttggttctggtcttagtaagttttttttctgtgttttgcttccccgtaccatctttttttcctaaaaacctgtttttccagtaatttgaattaataaatctaattaatggtagcctgcacatatagggagctatgaagccgagtttagtttccatgccaattttcctgaaagcaattgtttctattccaatatctggaacataaagctttatgcaactcaatccattttttatttgatgcctaaatatggagagcatcaactaggagtggtatcaccccaaattttgtagattttattttattatttttaatgttaaaatacatataacctccgcaaatgtttctctcacttcactgtccagcagccttgaagaattgttttcaacaatttggactattgttgagatgttagaatcctaccttggaaaaacgaaggactcacattctttataagataaatgagctactcctctcacggccaactggttttgacttttgaaatggaaccctatactgtgaaataactataaacttggatattaaaataagaatttccatttcaacagggataaaactacgttactttcttttattagttacaccattaagtcacaaatgatagatcatgcaatttaactgcacctacgactattcatgtggcacctctcatcactcactttctctgatatgaatgaatatcctgggcctatcgtttctcctgtagataaatgtggatctccaatttgttgctcaagaaatcatttccagtacatttctaacaactgtattctgtcattattcatgctgtagactattcttatatcatgggaggatatgtcctctagctttatgttagaaattgtttccatttcatttcaaaccattgctattattttctttttgaagaaccatgtcaaaccgacgttgtcattgcttgtactttttgattgacgccgcttgatgattcttgcagtacaatttaaagttcagatagcactgtcagtatctgattgttagtttaatatctgatatgaagtcatataatgagagtactttccgtgcattatttagaacctgttgagagttaatagcatattacttaacttattaacttcctaaccaatatatcttgctccttaaagtgaagttctttcctggccttctgactactttcttctcaatagacattgatacacatccacatattagcaaacaattc

SEQ ID NO: 7851 - DNA, 2179 bp, Cucumis sativus
  Intron number 9 from transcript Cucsa.116110.1 (locus Cucs a.116110) derived from phytozome v7.0 (chr-ID scaffold0099 5; pos 12641 to 14819 reverse strand)
accagttcaaaagcctctccagtctccactccaatgtaagcttcttctctctaagtccttattacactttaaaacgcgtctctgcccaattcccactttgaaaagtaaatactttggaggaggacccctcatgagctgccgtatatgtcaatttgtggtacccattgttctgaaggacattcgtgctttcttgtcgatattactttactttccaggtcttctgggtgagtctgaaaaacaaaagaggtctagcttacatgtttagtctctaaacttctaggttctttttcccatatgactcgaaacttccaggtttgtgtttattaataggttttgattttttaactgttaagtgtggtctttaatagtcttgattaggttttgaaattgccaattggttaagtttaaattttcaaatcttatgttaatacctattagctataattttgaattttgtatgaccatcaaattaaaaaaaaaaaattgaaattttggaagtatttggccaaaatatagacccgaatcttgtttcttttctaaaaatattagtcagtcataattgtttaggtaacgctgaagagattgagaatgactcttggttgacgtagtcaattctattgctctctttttcattaataatgaagaaattaagtgtaggaatatgtttgactatttttttttatgtgagttgtttttaaatataaaaatttgaaattacgaatttcgacttcttctcatccaaaatttgaaatttgaaacttgtttttttttcttctattattattataattatatcctagtaatttttgcacatttcataagtaaagttcattcaaaagtcttttaatatacgttttgatttttttttttttttgaaatggttgaacgaaaagctggtaactttcttttcaaaatttgtaaaagaacattattaaatatacttaaaaatgagatttaagaaatattttccaaaacctagtggtaatgttattataaataacttactgactttttgtttctttcttaaattttcaattaaaatgcttgttttgagtaagaaattaaatgtgatggtagctctttattattatttatatttgattagtaaatcaatgggcataaaccaggttctaaaaggacaaataatattaaaatgaattcaatatatatatgtgtgggtcttttacaaaatataaaaaagtggtaaaataattacataaaatgaaattattaaataatttcagttcacggtaaattcattactttgcaaagttaattcactctgcaaggtcgaaatgaatattaaatattcaaaagtgaaagaaagcagagattaatataagggttaacttttatttttgggattttctctttgtgatgattggtcaaaaagccaaaagggtaaagagagcaataaattatgaaagggaattccttcacgttgcatgaaaatgattggatatatatctctttgactttttctttccctaaatagtttattactatacatttcattatcaatccattcaattttattaaattaaataaacaatcaaatttgtcgttgtaattgtgttaggtctttgttttattattgcctttacatattcctttcttttttaattgttttatagttattgacatttgttaattcacttgggtttctaaccggttgatcgaaaagtatatatatatacattaattgaggtgacatctacacaaggtatctacaagctcaagttgaagatatacattagtaaaagtataccgtcgaaaacgaatatatcttaattgacattatcaatccacgtattgtcaaaaatgaacttaatatccaatcgaactttgaaggtattggaaggtacaaatacatggaatattattctctataacctaatataagaaagagattaatattttaataaagaaaaaagaaatgtccccactctatttgtcatggaagaaccctccaaaaattagtgataaaaaataatgagattattcaaatctcaagaacatagaaaacccaaaatccagatctctaaaaacccctcttctcaaaaatctcaccatttttgactttcaaatccctaattttccttcgaagaatgttgatcagagaaaaaccccttctacaatggcagcaactttgtttcgtgttcttcctcttcatctctct

SEQ ID NO: 7852 - DNA, 929 bp, Cucumis sativus
  Intron number 2 from transcript Cucsa.321680.1 (locus Cucs a.321680) derived from phytozome v7.0 (chr-ID scaffold0308 0; pos 1518095 to 1519023)
gcggtatatttgcggtattctgctgattgcgtgattttgcgttctgttgtatcttttgcgtatgaattacctttttatcttttgggattacaatagtacttgaagttttgtattctgattctttgaatagaaaaaaaattaagtcttttcgggttcgggatgcctaaaactaaatcccacaacttagacttagattaaccgtttttttttttttttctgtatttgaaatttttgctcgtctcttttcaatttctttaccatgattttcacttcttctaaggataaaagatttgaattgtaagtcaaaatctaaaagtaaatactacttcataattatcaaaacttagcttagttatttaaaacctcggtagaaagtgaacaacataacaaaaaatgaaaaagaacttagaggtgaaagtcagcttaattttcaactggatggttatcaaataggatactagttttacgatttttgggacttcttgtggtgatggtagttgtttcaatgattatacatgcttaaggttcgaaaatgcctttgtgatacaagtttctcgataatgtatattattcgtcgtccaggtttttggacttacatttgtcagatgcttgtgattgtttttttgtaattcaactttgttgttattcttgagtatcgttggttagtccttgacttttcaaatcgagtttcttttttacagttgaaaaacactagagttcttggataacagtcagtggtattagtttctgaactgtctggtatcaactgaggcttttgtttgttgtttcatacatgtttttctactgtattctaaatgttttgactttcaatggccttctcatttgacaagttagtttgaaatcagtaattggacacctcttttcactctgtagattcattgactgttgctgtgaagccaaagcctcca

SEQ ID NO: 7853 - DNA, 3697 bp, Cucumis sativus
  Intron number 3 from transcript Cucsa.108420.3 (locus Cucs a.108420) derived from phytozome v7.0 (chr-ID scaffold0093 1; pos 572180 to 575876 reverse strand)
agatttttcaatatttggtaagttttttattgtctttttcatctgtatgcaacatttccatttgaatattattgttaaaatgagacgaagagcaaacacaattgaagaaaaactacgggcaaatctctcttttttattattttcccatgctaacaaatgatacaagggaaaataaatagactaaatattaggtcaaatctttccttgggtcaactccattaaatctaacactcctctcaagttgggacgtagatattaatgacacccaacttgctaacacaaaatcaaagttctgttttgagaagtcccttggtgaggacatcatcaacctgttgactcaaggaatgtatggaatgcacatgcatatgctacccttcctttgatgaagcgtcgatcaatctcaacatgtttagttctatcatgtcgaactggattgttggcgatcctgatagctgccttgttatcacagaactttttgcagcaaaattaactcacatattgccaaactcacagccctgtacttggcctcaacactacatctggccacgaccccttgcttctcacttctccaagttacaagattgccctatactaaggtacaataagtggagcttgatttccagtcaacaacagattctgccaaatctgaattagtataagcctcaacagttttcttgtccgtctttctaaacatcaatcctttacccggagtcgtttttaagtatctcagaattttgtttacaacctccatgtgttcctcatagggagcctgcatgaattgactcacaacactcacaacaaaggaaatatctagtcgagtatgggacaagtaaatcaacttacccacaaggcgtcaatattgttctttatcaactggaactttatcatatgaatttcccagtttaccgttgaattcaatgggaatattagccgaatgacatcccaatatacttgtcttagttagcaaatcaagggtatgcttcctctgagattttgaagataccatctttagatttggctacctctattccaaggaaatatttcaaatcttctaagtctttgatttcaaactcatcacccattctctttttcagttggatgatttcagcatggtcatcctcagttagaaatatgttatcaacataaacaatcaatattgcaaccttcccagccttggagatccttataaacgaaatatggttagagattgtaccctagggacttgacaaaggtagtaaacctatcaaaccatgctctaggtgacattttagaccatatgaagatttttgaagtttacatacctgatgacgcgaactaagcttcaaaccctggaggggggctcatgcagacttcctcctttaggtccccattcaggaatgcattcttaacatcccgccgacattctttgttcacaacagctaatagcaagactctaactgcattaattttagcaaccagggaaaaagtttatgaataatcaacaccatagattagtcatcatggtttgacttagtggtaaaaagggagacatagtcttaataattaactaagaggtcatgagttcaatccatggtgatcacctacctaggaattaattttctatgagtttctttgacacccaaatgttgtagggtcaatcgggtgtttcatgagattagtcgaggtgcacgtaagctggcccgaacactcacatatatcccaaaaaaaaaaaaaattcaacaccataggttcgagtaaacctttttgcaactaacctcgtcttgtgtctgttaagggttctttctaccttgtatttaagtgtgaacacacatttgcatcccatagttttatgtcccttaggtagagtgcagatctcctaaatcttgttcttctcaagggccctcatccatgacaacatttttccactcaggacattttattgcaatgtggatattttttggtatcacgatagagtcaaggttggctgtgaaggctttgaattgaggagataggttctcataagaaacgtagttagcaatagagtgcttagtgtaggacctggtgcccttcttagtgcaattggcagatcaagagacggatcatatttattgatattttctgaatgattctccctaatttcatttttagtaactcttgcactgtcctcattttgctctttccatacaggatgaccttagtatcaacattaccctgtgcacctatattttgagcaataactgtcttggaccaatcactttcactcattttactttcaatatgtgagtcaatagaatcagtcataccttgatctcgtaaaggttcagagtcttggaccggagccggttgattagtaggagacccaacttcctttctaagattcctcctacaataggttttaaggatcttggtttgtagttaggaccgtgttgtgaggatttgggctaggtatggtaacgagagtaggactgatatattgaattaaaacctgaaatagattgagaattaaagaagagctacaatatgatccaagtttatggtacttgggacccccctctcttgagaatactactcaaaacctaactactcaataagcctccttccttcaccatcttcttatttataaccattactatatgtagttacctaaatatctaattacccttatacccctatactaatcaaggtatctaacaacttactcacatacgctcgccttgtgttctgtttgtcgttgggagcgttccttacctcccggggaacggccatgtaacttcaaaggctgttccttggtatgccattgttttttgcaatgctcatagacaagaactgttttccattgtgcttctcactaccactagtagaggaccttgcactaaaagcagtggagtcaatagtcacctctgaggtagcctcaattgctgcaatctgttgtcgaagcccttctagtggttggtgagctatacccaaagaagaagtggaagcttgcacgttagggctcatcaacctcaaatgttgagtgaatttgaggattcctgatatcgggatgatagctaaggttagtgggtggcaggacatacatatttgactgcagaagcgatggtggccggtcggaattaggtggcagcacattgattagtatgtggggaacacttcaagccgtggatgaagacaagggtggcacaagtaggttggtcggtgacgtctgaacgggatgggctggggtgtggcagcgcagacgatggaaaaagttgcggaattaagttttccagcgttgtctgaaggcggcagaaccatttatccatgacagcgctaatctgagcattgacggcggctaataccagcaactgtctctaataccatattgaaaaaaagagacgaacaacaaacacaattttacgtggaaaccctagttcagaacaaaccacggtgcaaatctctctttatattatttttccatattaacaaatgatacaagggggaaataaataaactatagtgagggaaaaaaaggaaaaaatactaggtcaaatcttcccttgggccaaacccactaaatctaacaaatatgtttgaattactttgcatgtaaatgatcttgtgtagattgcacgaactgctgtagttttcttcttcaggaaaccttgttctttttctcataagatatcattttatatctatctcaggctctatctttagcaaggcaagcattgttgactga

SEQ ID NO: 7854 - DNA, 1174 bp, Cucumis sativus
  Intron number 1 from transcript Cucsa.135620.2 (locus Cucs a.135620) derived from phytozome v7.0 (chr-ID scaffold0104 4; pos 436639 to 437812)
ctgctcatgtaagttcctcgattcttctttctttttacacttggattcctctttcaaattgctcgtttatatcatttttacactttcgaccatcaactccgattattctttcttccattttgtttcaaattggaatttagttttgtactaccgtagattattttttactatagagaaaaagtaaaaagatatggaagaaatttaaaaaaataaaataaaataaatataacaattattatttattaaaaagaagcaaggtgattcaattagtaagcaaattttttttcttagttcattcaattattcttaattttagtcatttgaagttaattatttctcagatttaattaaataataataactttacttagaaaaacacaccttaaaagcaaatctacaaaagtgaaaaatgctcctgcctaaacttatgcatatttaaaaaaaaaattaataatgaatttaaccttccaccttccatatagaacgttgtatcaattattattatcaagttaagcttattttctcggtttggtgttatttgattcttgtgacaagataatgtgtaataaactataaaacagagtttttttttaatcttatttattggatctatgttttgactacataacattgattttttttttaaaaaaaagaggtgacagagaagtctgatttcgcttttaaattattgaatttagagaatatatctcttgttattcgtcagaacctaagattactaatttttttttattattttactgtttttcaaatttatgtttgctattctttttcctatttttcttactattggtttgttaaggagcatttgaattcttaagtaaaaactaattttaattttggcatagttttttaaaacattaataaaaaaaacaacaaaacaaaacaaaggagcttaaggtgaaatgatgggtggaatagtatacagtttaacttttgaaacaaaaagaaaattaaagactaaaaagaggttgagtcttttaaatttaaaaactacatagacgtaatagtaacatttagaataatattgtctagaatttaaccttagtatctcaatgcccatatcagtagataaattgtaatgttgttctaaatcttcattttcaaactcaaattgtcagctcattgggaaaactccattggtatatcttaacaa

SEQ ID NO: 7855 - DNA, 7145 bp, Cucumis sativus
  Intron number 4 from transcript Cucsa.240680.1 (locus Cucs a.240680) derived from phytozome v7.0 (chr-ID scaffold0204 7; pos 788072 to 795216 reverse strand)
gctctacgtgtaagattcaatccttgtaggttttctttttcctatattatctgataatctattttttactggtgttggtgtggtatgaattcatttaggggtctgtctcagaccctcactgcttttggacgaatcatgctaagataatgacatcaatctttaggattaggatataaacaattgagatagataataccatcaaataagaatacatagagtagggtagaaagttgaagagatgaagaaatgaaatactatgcattaccagtctcttctatctcctcccttctcattccaaaccgtttgttcctacctcatctatctcaattaatccgatcagttctctgagattttgatccgtctttcagttcttattgtttcatcattgattttacattcttccatcttgtttatatttcttttacgataattttgatgacttttagaagagatgtggaagaagttgttgtgtcagaaatatgtacttcaacatttggttggaagcagatcaatttttttgtcgaaaatatgaacaatcaggctattcctttctttgtcctccatttgtgatggtttgagtgctcttttggcaaattatttcagcttccagctaacaggcatttcttcaagtaagatagagacaatgatagcacaacttgtctgtcaacatgaatgtcctcctgtggttaagtgtgttgtttggcccccattcggaaggacgaagttggttcaattctttgttggttttgcaaaaatggacggcccatcttttggaaagtgctgaaagatttcctcaaaagatatgaagaaatgtactagtcttcaattcaattaccgaagcaatctacgataaaatcttgttctctaaggtgtagcattctctgtatggggaggtggaggagcttgaccatagtctttggctaggcataagggagtgatgattgatgagttccttttctaccccctttttgtgcgaagagtcattttttttgtggcaggccaagatttttgttttgtggactcttagggttgagaggatcatagagtttttagaacaatttagcgttctccaagcgatatttggttccttatttgatttagtgcttccttgtatgtctcaataatgaagatttttcttttttaaattacttatttggtactttggtcttatttttcttgattggagaccccctttttatagtttgtttctctttttgtgggcatttctttttgttctccttacgttctttcatttgtctcaatgaaatttgatcattccttgaaaaaaattcctctttgttgactgtgggtaagggaaagcctcttataagaagttgcacgtagtggttgtgaaaaaagaatctgtgaggtacctgaaccttcagcttccagggatttcttctgtagaaaacttaaatggatcattagtttaggtaagaaaggataaataagtggtgaaattgagtttcagtatgtttttggtttttatccaggttattttctcacaatagttgtaaatggatcactgggaccgtagctctaatcactgggactcaatatcatgatttacattttagatatgtttttggtttacagagaagtgattggaattctgtgatttcctcatcttttagcaaacgacgggaaataattgaccatgatgccaatgaaaagtcccagtgatcagcaactgagccattggggaatatggcaattttaaaaagtgaagggaaggaggaattaaaaggaatctcactctcccatggatctagctaaaaggctatccatctaccgtttcccaatctaaaagttgctaaagcatctattttcagccatgatctggaaatgctgacccaagggcttctcaaacattttccttctttgcctgcagtgtgccatttaaaattttttttgccatgtatgcttcttaccactttacaccatagagaatcttcttcctccaagtatctccagccccatttagctaatagggccaaatttcttgctttggagcctcctaaaccgagaccaccatccaccaaatctctggggactgtttcccatataacaaggtgattaattttgctgcctttgtgctcctcccaaaagaaattcctaagaattctttcaagttttgaaacgagtccttcaagcattagacaagtagacatatagtaggcgggaaggttggagagaaccgacttacataaggtagctcttccccctcttgatagattgaatcatttccatttatctagctttgtgtggattttattgattgccggttgccaaaaagaaatttgtctagggtatcctcccaatggtagaccaaggtagataaacgggagatgatctaccttgcattttaaaatggcagccatggacagcaactcactttcagctacattggtcccacataaagccaacttaacccaattaactttttgactggaacacaattcaaaaagctctaatgtctgcctcagattgtccatcatactgctgtcataattgcagaaaagaagagtatcatccgcgaattgaaaactgcacatgtatcttgtccttgcccaccacgaaatcttcatatagaccattatgatgcagagttcaactagggcaccgagtacttcgcttaccagtagaaagaggaaaggtgatggggggttgctttgcctgtttccccttgaagcaagcactcttcctcttggcccaccattaatgaaaaccgagtatcgcagatttttaacacagcccatcatccgctcaatccacttgtggtcaagctttttgcttttcaaaattgtctccaggaagtcccatttgaccaggtcaaaggcttcttttcatatcaagtttaaggatccaacttttttcttcttagctcgatgatcctcaacagcttcattagcagcaacaaggatgggatctaaaatttgcctaccttctataaatgtgttttgcaaaggagcgaatgatgcaaggcattacctttttgagtctttctgccagcaccttggcaacaaccttgtaagtcaaggttgtgaggctaattggtctgaagtcttttacagtcccacatgattagcattcctcccaaagttccaaaagactcgaaaaaatcccatccaatgtcttttgaactccacagtgattttatgaaaagtgcatcaaattcttctttcttagattcttgtataaggatcacatccagaatgtgtattttcaagaatctttcaaggcccaatctcttgttaacgtttttcgagcctctcgtgttccatgatataattttcattgttccactgccaagatatttaaactaaagcctcttctcgaacttaggccaatatcaaattgcacttgccaacaataaatttcaagtgtgcgggaatttcacaaagctgattctgtggtgatggtttggaaaagtgtgttttcattgatcaaatcaaacagagcattgagatcagtgtgaagggcttccttcaagtgctgattctctttttgatttgactttaaaattgccactttttccatccttgcgacaactgcatagattgacacttgcttaaagaggaaagataatttcactattttttaaaatatttttcgtctttattttactgccattgcggccttaaactttgtttcctcacactatttcaatcaatattgctccaaaatatattattcaaaattttaattctatgttctgtttaccatgctatactaacttctaattgagaacatttatgttttctcctttatttttcaatttcttccttggttttgtctaaacaacttcttttttgggtattctttctcaatgtttctaattattgaggtttttttggttctaatttaaagtgtagatgtgattttaccacatgaatgctctgaaactaggaatattaatttgtttaatacatattttcaatgatttttattgtatttaaaatgatgcttacgtctcaaactacctcaaggtttacataaagcctcaaagctgcatttaggcttcttaaaacttgggtttgaagttgtttctttgagagacatgtcttaggtttgtcagtaagtaaaggttatagaaaggcgatcaagaagtttcttctccgcttgcctttaagtgagaggttcaatttttgttggaaatcggagtttgtattattttgtaggatctttgaggggagaggaataatagaatctttagagggaggagggaggagggaggaggaaggagggagggagaaattttgaagttgtgttagaccttattaaattccatttttctttgggcttctataacaaagttattttgtagtctaaggagcttccatcttttgcccccttggtatgttgtgtggtgggtgagggaaaggaaacttatttttgggaagaatagtgagtgggagatagatccctctgccctttgtttcctcgttttttatcatacaatttcccgtctaaattccttgtctggtcggggagctcttgctctttttcatttaggttttgttgtttgttatctgatagggaaacaacgaatttggtctaccttgtctttacttggggagtttaattttatgtatgggaggagggactagagggtgcagagtcccaatcagtctttttgctctttggagaactaggtccctaggaaagttgagtttttacctggcaagtttaacttattagattgacttgtgaggaggttgcccttgttagttgaacaattcatttgtattctctgctgaaaggcggaggaaaattggatcatatttcttttcttgaagacgtgagtttgtggagtttcgtttggagttacttttttaagacatggatttatgctagcttgacagagacgaggacaaagattaatttgaaccttcctcagaaatttctctctcaagtcaagggagcctgatcttggagaacccatttcctctcttggttgaatcttctcaagatattccagatgacttccaaacgattttccagaatgacttccaaacgattttccagaatgacttcaaactgaatgaaaacgaaaacgactatcagattgtcctgattgaatcttctcctcctgtcattgaaaataacgaaactatggaattagaaagtgaaacggaattgggaccacctatttcgtctcagaagtcgttccctcttaataaagagacggtagaggctttgcttgactataacctcagtatccgggcaattttgcgtaaaggtgtagggaagaagggaggggcctcaagtaagaagcttatcagagaagtgaaagccttacacaatagttgggagaaagaagcgttaatcaggaggaaaaataggtaacagggcaatgatgcctccccaaaagagctctggtgaaagatctattggtgaatacaatccagacattgtcatcctgcaagaatcgaagctcagtgaagttgataggaagattgtgaaatcgattcttgaggcctggtggtgtattatcaatctgccctttttgggctctggactaacccttactcctgcaaaacctccattattgggataaatttgaacatcgaggaagtggaagtcctaacctccagatttggctgtaaagcagaatctctctcttttgtttatctcgcctttccggttggtgggaaagacatggctaaggaagcttggaagagaaattcataatgaagattgacaagtggagaggtttatcacttcaaaaggaggtagattggcaattaccccgtcggtgctcaatagtctccctttctatttttcccccgtactgaaagccacgattaaaatcatcaacaggctggagaaaattgttagatattttatttggaatggtggaaattataatccgactttgcacctcgttagttggaatcaaacttctctccatctatggtggcccaggcattggctcttttcaccaaaaaatgaggctcttcttttgaaatggctctagagattctgtcatgaggagaatgccccttggagacagtgaggataatcttgtaagctaactaagaaaggtaggaattcgagactgtgggctggaatcctaaagtacaaagaccaattccttcaatttactgcctttgtgctggcgtgtggcaatacttctaaattttgggaggatagatggtgtgactctgtctcttgctcaaaaattcccgaaaatttactccatctccctcaaaaaggaagctaaaattgctgattgctggtgtaatataaaccaatctgggacctggggcttagaagaaatatctttgataaagaaatggaagacctgggcgagcttcatgaaatccggacaccccaaaggaataggaacagacttaaatggaagattgattcctccagggaacttttctaccaaaactgctttttaataatcacgaaacatccccctatctctatttttcctttggtcaatactgtctggaaacaaaaaatttccaaaatagccaaattctaccttcggtcctttgcttataggagctaaaatacccaggacatgcttcagataaagtaaacatagctcgttatccccctccatttgttgcctctgctcgtaagttgaagaatctctagaccacctttttcttcactgtgaatttgcttataagggttggttgaaccttttcaactcttttaggtggaattgaactgctgcttatcttacaaagtggatgactggattcttcaaggcctcaacagtaatgcttttaggaaaagaaaaaaaaggaattctgtggcagtgtgcctcctgatctcttctatggtgtatttggaaggaaagaaacagcagaaatttcaaggataaaattgcctctttcgactctttttgggctcttgttaagaatagagccttataggggggttctctcaattccttgcctttaggctgtatttctctttttctctaattggaatatatttctctgtttcttataaaaaaaaaaagcaagttaaccatatagtacctcaggcctcttattttaatctctcatcaaatttgttgtctagtatgacatttttctcttggcaatgtgcattcgtctctaattttagtccatgtggttggtgcaggtcatagcagaaagactgtctgaagaagaaattgg

SEQ ID NO: 7856 - DNA, 1718 bp, Cucumis sativus
  Intron number 1 from transcript Cucsa.130490.1 (locus Cucs a.130490) derived from phytozome v7.0 (chr-ID scaffold0102 9; pos 548888 to 550605 reverse strand)
cgaggtgagcttcggattatatcttatttcagcatcgcaatcttaatcccttcacttctcttacttataatttcttcactactagttttgaggattctggagttttgtttatctgtggttttaattactgatgttttgagtattaaggctaaggattgggtttcgttatgaataattaatctggacagtgttcacaaggtttctcttttcttcaagtagcaatagtatattggaagcagtcttttgatggtttaatgttctgtgttcatcctagtttgtgggttttttcattgctttcaattgctggaaggttttatgcattcctatgggttgagttggtgctgattgttatccaatctgtgatgaccatattgaccaatgcagggtggaaataatgctttaaattacttggatgtattgcagtagatatggttttagtctatgattttgatcgtataggtttttctgtatgctctgcctctcttcaatggtgtattttctttttctttctttttgttagagacgagggcttttgttagatggatgatcttcatattctttgataggaacgaggtcattgtacattttccttgacatatttttctcaaatatattttgtagttattgtttttcccctattgattaatcaggcatggccttctaaaaaatgcttactttttatttttgtcatcttgatgtttctgtgcaattgtactttctgtgtaggccaatccaatttcaattcaaaacaatattgatctactactttcttcttttaattatgttaatcaatttatttttattttgatcaaaaatagatattttattgatgtcgtgaaatacacaggaaaaagaagacaatattcatctactttcaagatgcatagtttagtatgtggctgtaggtaaccatttccccttacaataccaataatattcagttccaacgactccatctatgcagttccgacgaaggctaacattcttaaaagcttagcagctttaatttttcaagaattgctgatatgggatttattgatcagatttttttttaaagaaatatgagatattgaatgtactagtagtcctctcaaaacatacaaatgagaggcagttaatgatgcgtgtgggttttcaatataaaattaattgttataaattcgtagtacttattaaaaattttgaatgggcactttgaggtccatgatttaaatcagaggatgggacttttatcaagttcaaacatttgtggtggatatttgtgttttcagaaatgtattgatacaccaattgcatggttttgttttttcctttactcagctgaccacttgatggtatacacttgctctggttgtattccatgagtatggcttgcctttggaaactagtttcaatagctgtgtcatgaaaacgttatgctggttgaatcttgtaaagtagcatagatgtaattttaagcctaaggtctgttagagctagtgtcgttggccttgactgtatgttagctgacgcacaagccattgctttcttttagaaacgtccagaattcagatgttctctattggaattgaaatattacccatttcaaccatttttctattagaagtttgtgctctgattctgaaaactgaattgaatttacagtttttcttgtagacatctcactaacatatggtagtacaggtttttccatttggatcagtgccattaaagaccta

SEQ ID NO: 7857 - DNA, 2892 bp, Cucumis sativus
  Intron number 1 from transcript Cucsa.263480.1 (locus Cucs a.263480) derived from phytozome v7.0 (chr-ID scaffold0231 0; pos 80535 to 83426 reverse strand)
ctatcgtactcaaatctccagtgagtttgtttttcttgtttttattttacatgcatatttcgttcattacttgtgtttcgataactcatttggttcttttggtcattgggtatgttgatcagctgcaatgtacagttgttcattttagtctttatgcactcgaagaattaccattgttaaccaatattagtggttgccaagctggaagatacccccaatttttcctatagataggcaagacgagttgatagccacaatgttagaaccttgatgcaaatagatgacactcggtgagattgattttgtgagttgtgagtacttttctaggaataatatgttcaatcagtggtgaagaatgttcttcttcaacggtaagttctcaattatgattatagtactttaccgattctggatactaataaatgatgaagataactacctcaaaggataagatcataatggtgttagctgacttgatcaagtcgtgcagtcttattttgagttgatattgtctatcttggatatggacatcacttaaattattgtggttcagtagtaaaaagagccagcaagaaagacatcccatttcattggttgtaggtgctcattcaattcttcaaagggcagcatctcctgatcatccttggtcaataatttttgtatcgttaggctattatcatatgttatgtaagattcttctgagaacttgattgaattgcttttgtgcatggtttgaataacacaggctctagtactcattatggtgtactgtatagtttcaagagtatcctgttaaattctagacatttgtggaatgcctgggatgtgaatcatttgaatagctgaatgtctcaaactattacactctaataaaaaaaagtatgagtgatattttatttttatttatttgtttatactaaattatgttttttcatttgaggtttttgctactgtctaaaatgtggaaaaagatgaatcaccttctatattcactcaacagcaacagaataattgagttaatgaaaacataacagaggatttttctatgagaactgaactgtcgagcactgcctaataatttgtttatatcttcaaatatgatgtttatgttttatcatttctcctctatttactcttctcttgtttcttccccttctttccctttatgtctggggatgttcgctcttaaaacttttgaatctgaagaatgtttagaggttgtttggaaattgttctaaatgtaatctttttttattgtttctaaaataatttttttaaaacatattaattctagataactgctttagaaggatttttttggtcttctttttagtgttccaaatgatccattccattaaaaagatatttgttcaaaatcatgaatttattagtaatgatttgttgcatcacttttgctagtccctcaatcacagttgtcaatatgatagttttgaaaactaaatgagaaaacttttatcaagatagttttccaaaccaccctatagcccttgagaaggatgttttaactttgatatttgcttgtagaatatgcactctttaaagatcttattcgcaaatatacccttgttttcctatgcgatgatggcaattcaatttttatgaacaattgaacatgtcattttacctaatttaaccttaatagaaaactagataagtagtagcactaacaggcttaatagcaatcatgggaatctttaagtatttgtggttgttgtacattgggtagttttgatgttgtggtactttagggcatttataaaaaattcttatgtgggaaggttggtcgagtgaaaattcccgttggtggagtatttgcatttctcaaccctgatccttctcatttattagtttttacatttaaaaaaaggggtagtctcagcgttaatcaaattaataactcttgagctcagcgacaaatgatcctcccatacattgttaaagattttattgtttattgatcatccattcagagacaagtctagaagatcttttctgcccacgctttcttagcaactctttggaggtttgggaggggggattcttaaggttaaaataggtctttctgggtcttttggatttcatttgttttgagagcttccttttggactactaaaactaaaacctttagtaaatggtttgttcccttgagttacgccagtttatgaatgcttttaccaaatctttgaatgttatttgtttgaaaggctttctttggctttggttgggaggatttgatgtaacttacgaagaacatggacgattggttcttaaagcttggaagcagttataaagctcaagattattaacaaagttgtgcagctgctcgataatcccacatgctttgggttccatggatgtaacagatgtttttcatctttttagatgatttgctaggtgggaattactctaggctaaacagacaacaatttgtatctgagaagcctccattagatattaataaagcaactgagatcgtaaatgtattacaggataaaattttctagacttatagtctgcgtggtggtggtaggtgctgtatttttttttcccttttcttcttttcttttcttttcttttcttttcttttcttttctttggtctctaaagtaataagtgaaattatttctttacccagtttgtatggcactatattttgtttcttattagacctctatagtaataatcgttttcttactttacgtatcaatacagtattaggtgcttatgttactatgtttgttttggtaatcttggatcctgtctatcagcaattgaagcggaagagtgaggtagcagattatgaagccgagtcaactgatagagcaattggtcctagattcgtgaggtagttaaccgtccccatcaaacacc

SEQ ID NO: 7858 - DNA, 1842 bp, Cucumis sativus
  Intron number 1 from transcript Cucsa.209330.3 (locus Cucs a.209330) derived from phytozome v7.0 (chr-ID scaffold0146 6; pos 58312 to 60153 reverse strand)
attctaaatttgtgtaaacatctctttcttcctcctcttgttttttttttttaattatatatatattgtttcgatttccttcgttgggttgtgttttccatttgtgcatcggctgtttgtttgattcttttgggtatttgagtcaatttgttgaggggaatggtgtttggaattgaagaatttgtgggttggatggtttagatagattggatgatattttgggtttgagtgtttttattttattcttttattttgatgatgggaaagggtgtggatctatggtggaggtgggtttgtgttatgggttccgatcgtgataagaattgaatgatctcatgagattggtcatcaattttttgttttttgcactttgattatgaagctggaggaaaattatggttatgcttcttctcctcccatggcggtcgatcttgctgttttgttttctttattgttgtgggtttttgttttaagatgatcttgctggctttacctgtattgggttcaaatttttcttctagttgctcgtgatgatctcttcactgcattgttgtttagagcttggagttatgtgctaaaccttctcgcctcttttacattttgatcatcgcttaagtttgttgcgtttaccagtttttcttaatgttatatatatacatatatagaaagtttttgtttgtagcaaggaaattcagaggctttgattatctgtaatatcgtgcactatccttatgtctttcttggatgaaacgccgagttttattgtgatgaatcaaaaaattcaagtaacaggagaaattaacgtagaagacccaaaatgaaaaccttcaatatagattcaatataggggttgcaaagcgagacatacagatgtgttagagatcatgaaatttgtggttagaatccccctacaactaatgtactgaaaaaatcgtagattcaataaagattccgatcaataagaataaggatgaaagaataactccaaaactctttataaataaacacccacattgaggtgttgaacttagctctataagttctcttaagaaaatggaaatgcaccttatgaatattttgagtttaattttgaattatttctgttcatctccctgttcctttactttaactatttggtagtaacaactcaacaaacttttactaactaatatactgaccagctaactcaatgtccaacaactaactcccttctctaactacttagtcctgagatctaaattctttttggtcttcatcattttttcttagcctactggtgttgttctcttcataaagtcctttttacccttgcaattaggaagaatatcctgtttgtggtatcttttcttctcaaggatttcatcttcgctctgagttttgacttgtaaagatgtgattgtcttgttattgaatatcagaatttgggattatgtttcaattggaacactattttctctcttagtaatcattcttgttcgatagatgccaataaatgtttcatttggtaatctcttttggcattgggagtgggagtgctgtcatccccttccctcttagtaataaaatttaccttttcgtttctaataaaaaagaatgtatactgagattacattgcttctctttggcatctgagttttttctgtaattatttgttgggatttattttgtttgactagagaccgttattttaggatgctcctttttcgtgggctaggtttattgtatgcccttgtgttttttcatcttttgtctacgaaattcgatcttttatctcaataaagcaaactgagattatagtttgaatctgttttctttgtctatggcaggattttggatcacagt

SEQ ID NO: 7859 - DNA, 1349 bp, Cucumis sativus
  Intron number 7 from transcript Cucsa.255410.1 (locus Cucs a.255410) derived from phytozome v7.0 (chr-ID scaffold0222 9; pos 3424672 to 3426020 reverse strand)
agcaaatctttggagaacactgaaaaggtatatattccctactaaccttttttgttgacgtggtaaaaagtagagaatttttgcctcttggtttatttaaaatatacacaaacctataaacatcaaaataaaaaatcttcacttcccatacccaaagcatacttggaggaattctcgcattcagtgagttagctcttagctgttttatatgtatttcatagagttgaaggttttctgtttccgggacatgcacttagagggctgtgttccttaaagttgaaatatgtatttaatatagagatcactcagcaaagtgtactagaactcaatgaagggtcaaacgttggcgaattgtgtaacactttttgggataaatttcgtagttagaggttttcttccaaaatcatgcttgctacaatctcgcctacttcaatttttggtaaacagacctttcatcagaagattaaaagctgaagaatacagatggaaagtcttctcttttcataattggtccaaacttgctaaagttttgtgaaactgtgagggctttattatggtatatctagcttggaagtaaatagagagtcttcgaagatacgttcttcccctagaaatgtacagttaacttgcttatgatttcataagaaatttcttttgtgactattgtgaactactaaaaagctttcttatagttgttttaggagagagttctctctacccctaccccagcccctatgttgctctttctctttgtttaatcatatataatttcatatctaaaaagaaaaacaattcttttgcttctttgtcgtgattgaaccttgatataaatttagaacctgtaggcgttaggtagtaaatgtgagagatgtggtcttctaggtgccttcactcttatcatttttagggggacgggatcaaacctccagcctctaggtagaaggtcatgtcaattactattgaactaaactcactttaactctgttttgcctttattcaggtgctttgagtgataattttattcttgtccaaaaaagtagtagttacttggaaaaatagaaatagcgagcttgggtcatgttgaaagctcaagcgtagttgagatttacattctcgtaattttttcctttgaattaggcttgtgttgcctataaatatttttcctttataccttttattatcatcagaaaataataagaaggatctccctgtactagggtttcacgtagaccttgtgttctttcttcgtctctatttttcaaaacaattttagttcgtaatagtaactgtgagactgacattggcttcaaacagatactggattccacggagaaggccgttgaggatag

SEQ ID NO: 7860 - DNA, 4265 bp, Cucumis sativus
  Intron number 32 from transcript Cucsa.142920.1 (locus Cuc sa.142920) derived from phytozome v7.0 (chr-ID scaffold010 79; pos 1167601 to 1171865 reverse strand)
aacaaccttgttttacttgcagaaaatttatccaggtatttcatataaattctacatttgcctgttttttttatataaatttatccaggtatttcatggaaaatttatccaggtatttcataatatcaaacagaaatcaagctttgattgagaggaaatgaaaggatataaaatgaaaatgaccatctcaaaatgagcttagttcaacgattattggcatgaccttctatcctggaggtgggaggtttgaatcccccaaccccattcgctgtgctcaaaaaaattaaaaaaaaattgaaaggatcacttgcacacaaaaactgatgctccccaaaggatcctagcgactgctatacaagaaagggctctgttcctataattcagcctagcatgtaattacagaacatctagaaacgatgtccaaatagtagaggcattaaacctcactagtagccgaatgtcttctcaagatcaccccattgttcctaaacacaccatcatcgctctcaagttaaaactcactatttgaagccaaaaacttcaaaggatagcttagaagatggttggccacaaaatccaactcttctcttcactttcttctcttcacaagtccaacaccttcgataaacaattggaaaaatcaagcccaagcccaaaactccctctaaagaataaaattatgccttcaggaaatcccacaacaaaccaaacggtgaaaaccaatatttaccctgtggtacagtacaatggtgtccaaggcttgtgactttgtctaggtaattttttgtcccttcaagaaccaagttctcatagatttgtctacaaatttgatataaatatataaaaagaaacaatcaccaaaagccaatgcatggtcgaacaaaactactcattcatcattcctcttcaactgcggtttcctttttgctcacatgaataccatcaaggaactttccgatatatttattctcacatggcttttctggttaatcaaggcagcagatcgagatacaatctaaatatttttgccatccaacacttactcatcattgaccttctcagatcgaacaatagatacctcgtcaagcatattgactttctaaagcttcttctcctcaagaaagcttttaatctcaatgaatttgttggagttggtgatgctagcattgatgggaaattgagcatgaacaaatcgcatccattaacggtagcccttgatgacactagtgatgagaagaacatggctaagagcaacatgaatggcagatgagaagattgttttcatctcttcctactgcagcttactgtctctctctctctagagttgtaatgatgaagggctcgaccaagaacgaacttcttgaattaaattttattgaataatatttcatttacgaccaagggcccctatgaaaacaactctacttatggaaaaatatcctgaccacaagtaagaactttggataagttgtgtgctagggtagaactccttgagacatgcaagaggtatttggaggaggacctaagatggcattctattgataagatgtgccgcagtgaggactgcatccccccataagtaggaaggaaaataagtagacaacatgagagagcgagcaacctcaaggaggtggtggttttttcattcagccacactgttttgctgcggggtaaagcggtgtattactcaagagttcacgaccattatcgctacgcaaaatagtaattttatcagttttatcagtgaggagaaagaccccaatgagacaaatacgatcatcaatagaggttacaaaccaacgtttcctccaaacatcacaatgaatgaggttaaatgtctgggtaggtttgtagggttgagatggaaacaagattgtgttgttttgcacgaattcacacatcaataacaaagaagagttatacactttagaaaataaatgaggaaatagatatttcatatattgaaagtttggatgaccaagatgaaagtgctaccacatgcaacctttttcgaacgtaaaaaaaaaaagatgactatagatgaatcctattgcaatccttaaagggagtatcatcatcaaggaaatagaggcccctattgtgtcgggtagagccaatcatcttcctcaagctcaggtcctaaaaagaaacagtattaggtgacaaaataacttggcaatgtagatccttggttatcttacctatagatagtaaattgtaagatatcttaggcacatggaataaattctgaaaaatgagacctatcaaaaggggaaatatgacccttgtgcacattaggagaaaaggacccatttgctctcctaattctttcattgctagcacatgagagatatgatataaaatgttaagagtatacaggcgagacacattctgcctctttgagtataacttctcaactttatcccatatatctcaagcagtagttgaatacaaaaggtttttcaatttgaatttccgtactgttaatcgacgcagatcgaagaagagagtcctcttctttccagatttgctcttgaaggtctccttgtctaggtctcagtacctctcgtgttagttacccaaatatgtgaagcccctcgagcgccatcttaatggattgagaccatgagaaataattctggtcattcaatttttaccctccaattgctcccatgagactttctatggagccggataaaaaatttgtagcagttaaggtagggaaagaggttactgggttctccgaatacattggtaagactgaaggggttgcaaaatttgtggagtttgtggaagcacctagatctgcctcaagataagtgatttgttgtggtttgttgtggaggcaccttgttgttcataactaggcaatgcatggtgagtaaaattcggttactacaagaagcttgttgcccttacctctgtggtaggcgaacgtctcactaatctcgttttcacaatgtatgttttggccagggtttccatcaaagggttatggtggcactagaattggatggatatgtaaggattgaagataacaatcaacgacaacttggacagctgcaccagtatctgcaatggaaaaaatagtggctctgataatttctctgacgacttctccaacggcggcagttttggtaaccgcttcaacggctacggtagtgctcgactgcagcaattttggctgaggtgggttggtgcaaaactatggttatcttggcacagttgattttcaccactggcggctagggtttcattaccactgtccgataccatattaaaaagaagaagaagacgaacactaggtatacgtagaaaaccctagtacagggagaaaaacctacgacagaagccactcattattttctaataatcaaaagagataagccctaacaaaaaatgaaataaaactagggtacaataaattcctggggttataaacaatccactagcccctaatttaataattttcacaaatgcccttggggcctaaacacttcactagctgcttccaacatttatcattcattttttttaataattgtttctaatagtttgtaaaagaatttagagtattttggatttatctagtaacattatttaataatagtatagtaataataattataaataaatagcgtgtccctaaagtgtcgtgtcctactttttgcaaaaattgacatgttgctgtgtcgtgtcatgtcatgtcgcgtgtcaatagtgagggaagactcccattcatgcacccctcatgaactctagcattacagaacaattcttctctcagggctatagattcttccatttttattaaggaagctgcctcttcaaatgattatctgatagtcttgatcgtgtagttcttgctcctatgtttgattgtattttgagcattgatctctttttatttcatcaatgaaaagtactgttttttgtttttttttaaattgttgttagcgtgtgtgtgacaagaaacaaccttttcattatcaaaataaatttacaagagggataccaaatggtcatggtagtcaccggttgggtttttttttccttaattgtggtatgttagagagttgattgtattggtttggttcatagttgaaaaattgtaatttaatgtgtatctttttagtgtaatctcattacaactcagtatcatttggctgtggacatttcaccaacattgatttctctttatttttgtgttctttcttgcccttctcgtcctactttttcttgctaattaaataaaaacatgatag

SEQ ID NO: 7861 - DNA, 1381 bp, Cucumis sativus
  Intron number 1 from transcript Cucsa.154560.1 (locus Cucs a.154560) derived from phytozome v7.0 (chr-ID scaffold0113 2; pos 93820 to 95200 reverse strand)
cggctttgaaacctccgctactacctacattcccggtatacacactctctctctctctctttgttttctacttctgtgttgctgaaatctcgcgatctgtctgttatttcttttatgtgtagtgatcgatcgtgtttttgctagatcggtgttgtagtttaagatgtttttgttgattagtggccttcttgctagtttaatggtgtattttgttggatttcaagtggatttggtgtttgattcttggctactgtctctgatggtttgtggaatatatttgggtttaccgatatgattttttttttcataattggacttatgtttattaataagatctgtttatattattttatttctatgtcgtgcataacttttatcttaagcgatttttaagcaatacttttttctaactgtccgtttagatgactttggtaagcttaatgttgactactggctggtggtatgtggataaagatattttttaatttggatacttttttgttttagttgaggactaatcttggggcttaattaattttgtgagtgtattttttcctttcaaatctggatctatacagggattttgttgtcttgttattctctcatttgatctgctgtctttacgtaatctcttctaaataacattgtcgatttgtcatcaacggctcatgatccctgttaaaaagaataatattaaggtcaaattacaaattttgatctctatgcttttagaagttagaattctgtctatacaaacctattttgcgttttttaaattaaaatttatcagtttaagctttagattttaggacttgtagtaatattaaaaggttttagtgtataaggtcttataaggtcaagggttttgacatatgcagtgtctatctttttctcaatggttgatgtccattttttgggtcttggggcaaattttccagcccttgcgaagatgagggtggtttaaatatgtacttgcttctcattcatttcaatgttatagccatttgataacccttcaagactggatttggatcttaatttaatctctcggtatacttcagactccgtttgaaaaccatctggttttttgaaaaataacactacgtccaagttccgctcccacctactgagttatttgtcttcttacttctagaaagccgtttaggaaccaaaataaactaagttttgagaactgtagaaagtagtttttattcatggaatttggcttgaatttttttagttttcagttagaaaagacaaaaatcatcgtagaaaagttttatgaaaacaaacttgattatcaaaaatcaaatgggagttttgaacttggtgcttataagataagatgatatgtctttgcaggtgctaaggtcagaattga

SEQ ID NO: 7862 - DNA, 669 bp, Cucumis sativus
  Intron number 10 from transcript Cucsa.271110.2 (locus Cuc sa.271110) derived from phytozome v7.0 (chr-ID scaffold025 00; pos 48301 to 48969 reverse strand)
gttacagcagtaatcttttgtgctgctattagtgagtaagaccatcactcttttaacccacttatgattctgtggcagtcttgataaatgtagatgataaaagataagcctagacactggaatctgcaaatctatttcattctcattgatgttttcggagtaacgactgggttgtcatggatgctcctggaagctgatgagatgggatgccatttgggactatgtaattgtgcaacaaagttttgtgaatagaggctttttattaccttcttttctattgtttcttttcatttgttttctgctggagtgggtgggactaggttggaaaatagcttttggaagttagtgaaccaagttggtccaaatgaaatgaaaggataataattttaaaagtatgaactgatagaggaaaagaagatcttaactagctggtgatctaacaacccatgtggagatagttataacgtgacgagactcgttgtcctattacaatatctctttttatttggacggtctcaggctattaagcggtttcagttgttggaatggaacaaaaaggattgaaattataaagttagtagttgtggtcccatgtctattttggttggaagaataagtattatattaaagtttactgcaatggattaaactgtgataactgtttcaggt

SEQ ID NO: 7863 - DNA, 4160 bp, Cucumis sativus
  Intron number 5 from transcript Cucsa.156410.5 (locus Cucs a.156410) derived from phytozome v7.0 (chr-ID scaffold0113 9; pos 744615 to 748774 reverse strand)
tgtggtgcatttgcaggtaattcaacctttttagtttcaccatccctcaatgctttttaacttatttttgaaaactggttgagattattaaattgtttctagcgggaaattgggaatgcatcagttttagattcgattgttatgatttatttacgatctagattttttttctatcattacaactactgcagtcagtgaaattatgggcataagcaaccagcacatacgcctccatgattctcacaatttaaagcccatttttaccttcatgttcaattagattaaatgtttctatgagacaaagattcatgcacgaaagaatattttatttgttaacgggctatagagttgcctgatatactcaaattactaactttatcggaaacgttccaaactgactgtggacaagaatttattgttttctctctttgagatgtctgttcttgatttaatttgctttggtaaaatgttcttgtatctatggaaaggatagttgggtggctgccaaagaatgtaattttctgtgcatttcacaaataaaagaacaacccattacaaataaagtaaaaataattttggcaaatataataccaccaatacaaaaaaggaaataatcaacaatccccctcaaggtggtttgaagatagtagcattgctagcctgtcaatcaatttgatgaattgccactttggaaggcctttagttaacacatctgcaatttgttccattgtcaaaagataggttatgcatgttactcctgcatcgttcttttcctttatacagtgtttatgaacatcaatatgatttgtctggtcatgaaggattggattgtggacaattgaaattgttgcctcgttatccacaataaacgtgcatgggcattgtctaagtgattctcaattcttccaatagtcttcttatccctataccctcacaaataccatgggctaaagctctaaattctgcttttgcattgcttcttgtaaccacactctacttttttacttcaccaagtaacaatatttccttcaacaaaggaggaataaccagacgtggatcttctatcagtcgtgctacttgcccaatcaacatcagtgtaaacttcagatgatcatgctttttaaacaatgtcttttccggtagtacctttcaaatatcttaggattctataaactgcatcaaagttagctagcctaagagcattcttgaactagcttaccatactaactgcaaaaacgatggcaggacgtgtgtgagaaagatatatgagtctcccacaagtctctggtacttttctctttcctttatcttattttttattgcagcttccaatttcagattttgctcaatggaagtttctgaaaccttgcaaccaagtaaacttgtctcttgtaacagattaagaatatacttcctttggttgacaaaaatgctgcttttggacctagcaaactccatgtctaagtactttaaggttcttaggtctttgatttgaaaatcatcaactaacttttgtattcacgaaagtcagtcttgtctcatcattgtttgtaagaatgatatcaacataaactattaaaaccataaccttgtcatttcttgtatgtttataaaacattgtatgatcggcttgactttggctgaatccgtagctcgcgactattttccaaagcattcaatctaggttctaggagactgtttaagttccgtataatgatctttttaacttgcacactttcttaatctcgagatctacctcaaaaccaggtgacaagtccataaatacctcttctacaagttccccattgagaaagacatttttaacatccagtcgataaagccggtcaatgtcaactgcaacttacaacaaaattatgatagattgattttagcaactggaacaaatgttcttgataatcactccataggtttgagtaaacctctttgcaaccaatctagtcttgtacctttcaacactactattaactttacatttctccgtgagcacccacttgcatcctattgttttcttatcttttggtagttcaactatgttctatgtgaaattttgtttcagaccattgatctattccatcgcagctaatttccaattcaaatcattcaaggcctcatgtatattccttggaacaagcaggttgattattttggatgtgaagactttatgactaccatacaatctataataagaaagatagttcgcaattggatatttgacacaattacaagtacccttcctatggttaattggaatatcaaggtcagagacgtcaagtaaggaattgtgaaaagaagaaccgggagaattagaagaagtagaaggagaatgtatgttatatggatcttcagaatcatatatcgaggtattaaattggtttttcgatagatcaagtgtctgttctcgattcctttgagccaagtttcttctagtgtaaatctgtagttcaggtttttaagtggtcaagtcaatctgtagtgtttctcaccatgaagaagaactctccacacctggcatcaaagaattagaattcataatttcaaatcaattatgttggggataggttggttaagtgtctcaaaaaattatcttcaaggatgtctccttctaaagagaattttggctaaaaagggttgattttccgacacatccatactcaatatactttttgggcgaaggctcaaaacatttgtaagctttcttaggggaaatagcctacaaaaatgcatttagtagctggacaacccacctaatccatcaatagatggaagaatggtttttccaagaatttgacctcaaatctcatcaaactcaacattgacgccagcaaggagcttgtaaatatgaccgtcttttacagtttacctgtaatgctattgatcttcggtgcacttacactcgtatgtgtcaaagagatctaggtcttgcaaaatattttttagtgattgaaagtattgtgtcactgaattagctccttggtcatgtcctaatttgagattcaactcaaatatctgtgatcgattgcctagatcagggtacatttgggtcacactatcccacagttccttgtcgtagagtagcacacgtaattacagtcgatgttttcaaccatggagttttcagcatcccatgcagcaaacaaagggtcgtctggttttggggcagttttctctctgataacgtagccaatttttccttgttcacaaatatacagtttaacactttgtgactaacaaagaaattgtctccattaagttggatcgtggtgatttggatagtggggcaattggaatgcacacgattgtcgactttagccattagtaacttagtatccaacatagtccaagcaataaagataaaaaatggagagaacatatatgaaaacaccaaccaaactcgtcaccagcaacggacagcacagaaaggggcgaccagcaaggaccacggcaaacgacgtcaaagaaaaaagaacaccaacttacagcaagaaaacgcagctgctggcgatgtccaacgagtggtggtcggtgacagcgatcggttggagtatttcaaccagcgggaacaatcgtcggggtgacagagcacgtgggcggtggcggcgggctgtaagagttttagggttcttttggttttgaaaaaagttaacgtttttttaaggtttcaagaaccttcactgataccatgccaaaaaatgtaattttctgtgtatttcacaaagagagaagggtattcttaaatagaacaacccattacaaataaggaaaaaataattttggcaaatataatagaaccaatacaataaaatataatacaaaaaaggaaataattaacagtagctatatcactatttcataagcggtatctggtccatggcttcttgccaatattgtatctaacttctatttctatttgttttccattgttacaagtgtttcttgcttataagctataactaaattaagaagtctttcttattatatattttaaaagtatgctgttctagataccaaagttcacctagtttcttcagaaagaatttttgttaaacttttctctgttcttaagaagtttttaaattgattatctaaaggcttttttgaatgcagaaagtaagtttggctcggagatttgctttggttcc

SEQ ID NO: 7864 - DNA, 7871 bp, Cucumis sativus
  Intron number 4 from transcript Cucsa.328140.1 (locus Cucs a.328140) derived from phytozome v7.0 (chr-ID scaffold0315 9; pos 515195 to 523065)
ggattttttgttaatagggggaaattggaacggatgtaagtttctgactttgttcacctttttccttcgcttcagttttatgatttgtcagtgtttatgttacctaattttagtcaactgtttagttgagttccctattgcttgagtagttggtgatactgttaggctcctagttagagatatacgaggttattaatagagtattagtaggatgagtagaaggggcatgttaataattaattagtaagttggttagggctttttagtaataaatagagggtttgggttgagggataggtgtgaagaattttgtgggatttccttgtgagggaatttgggagagtctacccctctcggaaggctagtggttaccttgttatttgtttttacgatattaaagcatatttttaatatatttccatataattctatcttttagtgttcttgtttgttctttgtgttttcaagtatttaggttggatacctaacaaattggtatcaaagttgttctttcttgtgtactgtcttattttgtttggcaatgggggaaaatccatggacatgggagcaaatgcgttgattgatgtctgattagaagtatgaggtggcaaagagaggagaaactccatggaccttggagcaaatgcataaatggatggaagattgcaagcgtgaaagaattgaaagggaaatccaggagaagttgcaagaaaattgtgtagagaatctactaaataaacactaaaatacccacacaatggcaaaacagaggcagcactctgatacactttatttatatataggccaaaaggatgattacagtagtcgcaatatgcaaaataacaaaggaaaaacataaatgaacatacccaacctctcttaaactagctgaatatctccccaggccacagtagccattcttaagaaaaagataataaatgacctagctacccaatccctattaaagacctatttatacctttttctctcattcctgctcgtggaccccgcctacacggtctttttccctcattccctcatcattatgtgcttgtacatttaccattttgccccttctttttatatgtatggacaattgggggccctacaaattgatgagaagaaaagaaaatggttaagaaaaccatggaagggagattggattctcgacataggcaagggtgagatcaaagaagggatgctgtccattcttcaacgtttgaagatattgaacgataaaatttagagaatcatgctggaagaaaaacaggaaaaggtaatggaaagtgtggaatttaaaacttccaattagctccaactgaatgctcatttagggaaggatttccacaatcatcacaaagcatcaaggaataaggaatggtgcttaggaaccattctgttggagagtaaatggacaccagacatagaaaagatgcaatcgataggaacaaaagagaaggaaggtgatgaggggctccccatcagaggagaagagatgacccaaagaattctaaccttaagagggagaaatcgaagaagaggaatgtattgaaagtcaccagcaattggacgaaagattgtcggcttaaagttttaaaaaatttttggccataaaggaaggagaaatcagagtggaaacgaggaaagagggatagatctacaaacaagaacaagggcaatcggagaggaaatgtttcgatctactaggtcggagaggcgaagaaatgagagataacaattctcattcgatgaagaatggaaagttcgattagggaggaagaagcatcgttggaaaaacgaagaattgacaaaaatacacagtaacaaacggacaaccactggacaaaagaaggaatcaaatgtgttgaaattagcagatgggtgaagaattttgtagtggtttccttcaggaaatttgggagaggattctcagccctctagaatgatattgtagattcattgtttgattttgcaatataatctgttttttttattgttctggttagtatccttgttaggtggtatcctaacaaattggtataagagcattttttccttgggtactattctgattgataagagtggaaacaaggaaagagaaatggatctacaaacaaaaatagaggcaatcaaagagaatgtttggatctacttgatgttggaaaggcgaaaagtgagagaaataagaattctcaatcgatgaagaacaagaaagttcgattagggaggaagaaacattgttggaaaaacaaagaatcggcgaaaatacacagtagcaaatgaacgaccactcgaccaaagaaggaattaaatatgttgaaattcgttagcggatgggtgaagaattttgtagtggtttcctttgggaaacttgggagaggattctcagccctctagaatatgttaaggtatattgtagtttcattatttgatattgcaatatattctatcttttattgttcttgttggttgttatggtgttcgtgggtatccttaggtggtttcctaacaaactcgtatcagggtactattttgtttatcaacggaagaaccatggaatgggagcaaatgcgtaaatggatggttgtcagaaatgtgaggcgacagcaagaggagaaactccatggaaaaaacagaagtaattgaggagatggtcatgtatttgaaacaatatgccttttcctggagtacctttcaaatatcttagaattctataaacggtatcaaagtgagctggcccaggagcatgcatgaacagacactactcaagtcttgaacttgtttatgactagctgaaacttcatcaaagtaatagacaccaccaatcatcctagcacatccaattgtctcccccgagttttgatcctgagaggtacaatgagtgtcaaagaagacaacacgccagttagcatccttagagattttactaacagataacaaattgcaagctaattttagaacatgaaagacataatgcaacgtaagttttgtagtcaaatgaatagtttcttttcttacaatatgggtgaaactaccattggctatgcgaattttttcattgcaatatataggggagtaggatgcaaataaggaagaggaattggtcatatgatcagaggcttcagaatcgttaatccatggagatgagtttatgcatgagagggcttgaggaaacttacctgattgtgccaaggaaacactaggattcctagatgaagaagtagcctttagtagtttcaggatttgatcaatctgctccttgctaaacaggttggaatcaccaacatttgcattcaaggtgtctaggagggagtttctctccccttgcttagaacttttccaattcgtaggttttccatgaagcttccaacagggttcacgtgtatgttggggcttattgcaatggtcacaccagactcgaggcatttcatgtatcttgttggagtgatcagaggctgatagaacactgatatagtgtttctattttattgataccttcaacagaaattacaatataaaagaacatacaagtaaaagaaccctaaccctctgcccttcctctctttcaaggaatgttgcagcccaatatctcaccaaaatcttcatgcccttcttccctccgccacatccctatttataaccatctaactatcttatataactaactacccttagccctatctaaatgtaggtatctatcagaggccttcatggctgtttgttcggtcaccagaactttctactgagtcagtgggttgttttccaatcataacattcatgcggctttcttccatgcgaacttcagaaaacacatcgttaatagatggaagagaggttttcccaagtattcgacctctaacatcgtcaaattcaacattgaggccaacaagaaacttgtaaacacgaccgtcttcaacagtcttcctgtaatgcttttgatcatttgcagacttccacttgtatgaattaaagagatccagatcagccaaatgctttttagggagtgaaagtgttgtgtcaccgagttacttccttggtgtatatttccccatttgagattcaattcaaatacctgtgattgattgcccaaattggagtacatctgtgttacactatcccacaattctttagccgtagagtagcacatgaaattgcagctgatgtcttcaaccatggagttttcaacatgggagcaaacaaaggatcgtctagttttgggaactctatggtaatgtagccaattttcccttgcccacgaatatgcaacctaacactttgtgaccaacaaaggaagttgtcttcattaagtgggatcatatttatctggatggtggggctattggaatgaatacgattgtcgactttaaccataggtgtcttagtgtttaacatggctgaagcaatacagttcaaaaaacggacagaacagtgagaaaaaaataatggagccaaacttgtcaccagcggtgaaatcggcagtgaacgtcttagataggggcgaccacagcaagaaaatgctagaaaaaacggcttatggtgagttttggtggcggcggtgcggcagttggagtacagtgaccggcagtggcaacaatcctcaaggcggcggacatacgtggcggcggctggctgtaagagatttagggttttggtttttaaaaaaattagggtgtgtagggttttcaagaaatctttgataccatgccaaaatactatatttcttatatttcacgaaagaagggttttcttaaatagaagaacaacctattacaaaggaggaaaaaataaaattggcaaatataataccacaaaatggaagtaatcagcaaaatagatcctccatcactgatagtggatgtcagtggcacaactatagtggtatctacttctttagagtaacaaccccttgatagcgttaagctactgggggaagttcaagttccacttcgtgtccaacatctcgtgaaggaaagggtagacaaaggagagggctagttttgaggttggggatcaggtttaccactctatttaaaactcgttggctatttttttggcgaaatggaaagatgacttctattggttcaatctagacaatgagaagattggaacaagggagtatcatctatgacaattagaagctatttgcctattttttcatatatcttaaatcgccgatcaacttaaaagctttgacgggtgaatgtatatttgatatatatcagcatgctaacactcctcatttgtgggcttggaatttttggaagaaccaacaagtgaaattcagtattaaattgagttaatgacattataggggttcaaacacacgatctaagattttgataccattttaaatcatcaacaaaccaaaagtttaaactggtaggtgaagtttgattgcattggtctttgatgtcttatggaggattaagattccaaggaaggtgatagaacactgatatagtgtttccactttattgatatctcaaacagaaattacaatacgaaatgactagtgatccacaaaagaagaaccacaattaccaacccaaacattcaagaagactaaacagaacttcacttatcctgaattcacaaaactataaacagaactactaaccagaaaaatcaagaacaaagcaataaagaaatcataaaaagaacttagaacaaaagaacctggccctctgcttcccctctctctcaaggagtaatgcagccctattccttctccactatcttcccccctctcctcttccttcctggcctttaactgccccttccaacataactgctggtcccaccctagtgatctccctctcatttctgtcctctttcttccgtgcctcaatctcacgtgccattttatttttgtttcttctagtatatgtaaacagcaatggggtctaacagaaaattaagctctttcatggcaatttttgcttggtcatgtgaataaaatggataagattttgagaaacatgtcttcgttagtgagtcatttttgttgtaccccttgtcggaaggcagagaaaaacttagattaccttctttggagtgttaatttgcaagatctgtttggaacctttttttgtggggtaggagttccattttttgcttgcttgctaaagggatgtttggttgatgatcagaaagtttctcctccctctgtctttcaaagaggaaagttgttttctttggtttgcagggggtgtgtgcttatggtgggatttctttttgggcaggggaggaacaacagagtgtttaggggtttggagagggatcccaacgtggttttatactttaggcaacatcttaccagcttggaaatccttttttagtggggttttttgtgggcttgtttttttgtatgcccttgcattttttctttctttcccaaagaaagtagtcgcttctataaaagaaatggccgaaggtaaatttaatattatatcaacacgctggcatctaccatagaaacttatagtacttacaccttgaatggacaattgcttcctctgtgttctcgtaatatggaatttgtagtggaatttgagaagtttcagctccgatattgatgtctagcttcaaggtttaaagggatagaaaggtttctctcaccacccaacatggatcctttttatgcttggaacttatccacaattagatattggaaggtgttctgtggttttgaataaaaaatgaaaactttcttgcgaattggccactttcaagcttagccataattgcacctgttttccttgatgacaaagcttacttggagttagttccttgaaaaagaagcaattgtttcacattttttgttgaattttctataatttcaagaaatttgctggcatttgaaagccatcgagaagaaatataacaagattgtggttctttaagaatttcatcttgaagacacttcgctcaatagacagctgtagtctctagtgatgtaggaagggctaggaaagttcgtggttaatctcaggttacatctatggccaatcctttagtttcttatttggatttcaactctcctttttagtttccttttgggttttagtctgcttttagttctctatagattatccttctcatgtattctactcatgtttcattctaattaagattgtagaattgattcttggaggtttatcctttcagtcacttaggccacatcagtttggtaggaaactgagaaggattgccatggaattacgcaagattaacaagtttcctaatttcttttttacaccatgtagtaatgccaagggtgggagtatttatggactactcattaggtatcttaattgaagcactttgctcaggccttgtaccttgatcaactaaattagcttctgtttctttgcccacggaaaaaaatacattagttagacgttgacaagcctattgttagttagaaaggggaatttctgcctgtggggagtagggcatgtgtcttttggatcataggtgacatgataggtacattggaattggttttaaaaggtattgagaattctggtctgtaatgcgctcagcttagggagggcgactaggcctctaagtatgtggttctgttgttttggactatttaaataaatatctgcctaatttttttccgttcttttccctcatttttacatttagcaacattacaaattttttaaatcttctaattctttgtttgtctagttgtgggcgtgtggttttagtattgtgcatacaagaataacggtctatactttgaatatttaattttagacttccagtttttggtttgctttttggaattctctatgcttatatttatttattttctttccaaagaagtgaaccatctggacaacctaatcaacagttgaaga

SEQ ID NO: 7865 - DNA, 1266 bp, Cucumis sativus
  Intron number 1 from transcript Cucsa.232360.1 (locus Cucs a.232360) derived from phytozome v7.0 (chr-ID scaffold0198 9; pos 352684 to 353949)
tcgcctcttctgctctctggtcgacgatcttcacggttagagttttctgatccgcacccatttaatggatgattgtattattgcctactattctctggattctttacttggtcttctgatattgcttgatttttcgttgcatttcgtgtttggatggtgatgattgaaggatcgggggaaaggaagagtttatttctcgtagatgagtggggggtttgttttctttttacctgtaagaccgaaattacgtaatggttgtgtgggtgagatcgtcgatcgagtaatttgctgatgattcttgaacgatggagtgaacgtaagagtttatttcttgtagttgagtgatgggattgttttttttttttctgcctttaagatcgaaattacgatatgtttatgtgggtgagatcgttgattgagtaatttgctgatgattttttaacgattgagtgaaaggaagagtttatttcttgtagttgaatgatgggtttgtttcctttctgcctgtatgatcgagattatgtaatgtttatgtggatgatatcattgatcggctaattcgttgatgagttttgaacgatacttgatttgggttttatgtatgaactgttaccatatcctggttttccggttggttaatacgggattgaattatccagtacgaagggtgttgggtttttctggttttcttgtgaaattttctgttatactgagttgtggcatgaaggcgttggtcttcatgtcgtcatccaccttcatcaagtgttggatcttggataggaacgttgatatcagttatgtgttatttttctcatcttggagcttattgcagcggttttgtaaaattgacagagtgatatttggattttgtttctctttcttttatttatttctttattgaggagtcaatatatgtcttttggatttgaatttggagagtgaaattcagtgttcctaatacttagtatcagttcagtgacttaatgttgctaaaaagcttctatgtttctatttagatcattctcttttctttcctaattttccatttttgtctatgatttaaatcacgtttttttcatgaatagatgtgccaaacttgtatggagttgcataccagtgtcttgatcatttgtgcatcatcatttggttatttttttttgtgtaaactcatattcaattcaatattggattaatttgcttcgaagtttacttttgtttctctttatgatagtcttctggagcagctctagacaaaattagaccaga

SEQ ID NO: 7866 - DNA, 1315 bp, Cucumis sativus
  Intron number 1 from transcript Cucsa.118860.1 (locus Cucs a.118860) derived from phytozome v7.0 (chr-ID scaffold0099 8; pos 727413 to 728727 reverse strand)
ccttcagtgattgggtgtcactcttttatttgcaggttctttctctttacttgtttttcgttatgttttaactccatttctttctcttttcactgtgttctggtttgtagtgtacatctggatgctacttgaatgatagatctgcgttcttgttggaattatatatatacacatttttgggtttaatgtatagttggaattgtatattagtgagctcgcattacactcacttggagataattttcaggtttactttagctagatttatttttggagaaggaactttatagtcatcagcttctctttcttcttcttcttcttcttcttcttcttattttctttaattttcggagctaagctggaaaaagatcttacagcgtttttgtgttctgggttttcaagacacaacttccctgtcattttgtcagaatcatattcttcggattgtcaatttcgaagcctgtaatgtcatgaaaattactgaaaaatgttatcgttctgaaactagaaatttcgtctgaagttacctgctataagcttttgggcttcctttttgaattcaacgacatgtgtgctattaatttctaacctcttggtcaagggtatatgtttgtaaccaagtttttggctacaatttacagtcattcttgagggattaatctgattttttcatcttatgccgttcgccttacatccatttctagtaaactctgtagcgggagaaagttttttagagcctgcatgttgaatttttaacttcagaaactaattagtgtaggatattatttaaagtggttttgggatgactcttgagagtactaattttaagtgaagtactttcgaatttttttttaaaaaaacttaaatttctctgaccaagtactacgtgaatcttgaaatttgtttttaatgaacttaaatcactttctaccatactaaaagtcagacccaactcatcctcgtagtttctcagtagttgagattcttcaggattaatgacttagccccccttcgttttaacagataagattgtcaaagacgactctgacttttgttccttgcactcttttagttgcacataatgttgcataattcttttttaacttctaagaaatgtgctctttattattttcttattgaatgtgtctatagttggcaagatttgaatcatcttcaaaaacaaactttccgatattgccattgtatctgttatttatttctttgtagttcttccctttgttaacattacctttgaaatctacattccacttttgtggcagccgcaggtgaacagccgggccagaacagatagttg

SEQ ID NO: 7867 - DNA, 3876 bp, Cucumis sativus
  Intron number 2 from transcript Cucsa.242840.3 (locus Cucs a.242840) derived from phytozome v7.0 (chr-ID scaffold0204 7; pos 2485496 to 2489371)
ttttacagctggagcatctgttcttggatataaaggtgaactttctactctttctagatctggatgtagttgcagtttgattttcattagcaaatgtgaagttaatgtgtaagggttgtttcttctttttctccgcttttctctactgaaggatgggatgaagttatattttatgaacgtggagagattttttttgtctaactgcagtttatctggcatatttgcacctgtggatgggtgataagcaacctcaaattgattcatgtttcagtatataaatgctaattccaaaaaagttagcccatttatcatttagttcactcattgttgttttccatctaacctctttggtttccttactctcaacctttttatgaatggttcactgcaggaggattgaaaatatgtttcttaagctcgattaattaggagtcttttctactgtgttttttgcatccttttggtgttctctttctaagtctttctgtgattatgatcttgtgcatattttagctaattagaagtcttttctataaaccctttggcctagcggggatatctcatctcacctttttgtatgactttcttcctactaacatattccttgttcgaggaaaaaatagacaaattatgaaacataactgatattttaatgttcaatactgacacggttacaggctaagcaagtggaagtagcactacggcataactgtgtgaaactgatacagttactcatgaaactttagaaggttttgaacgctcccaactagcatttcattccaatacaaagacaacatctacttgccacaccccctttgcatctatattgacatctaactagcatgcacttaatgcaacaaaaacatagaaagacaaaaatgaaatttctttcctgccctgtttctctcctttcttttatattttcttccttctgatgttgagtgatgggtgtgtgacgtgatgacacgatgaaaaaggaggaaaatccaaaaaaagaaaaaaacaagtggagaggagaggaagggagagcttttgtgtttgcttccttcaaccattttctcatttttcgttgtttttccctggttattcttttttctcagaaatctatagacctctgttgtcctttcctcctttctgtttggcctctggtttgccaccccttttttcttgctcgtttgtttcttgtttctgtattcatttgacagacagatgttaatgagtttttctgtgtcatggttgtactttgtgtgcaacagtcactagcccaccccctcttcttttgttagtgttgacgggcaacttagtgtttcccaatctgtaggtgaagatatcctccttgttaattctagcctcttgtagtcattattagtgaaaataattttgatttaaggaggtttttgttaggaaccaaggtagtatgggatgcgtttgtcccacattggttagaatgggatgaccactgtgggatgaccaatagttggcttttggggtgtggttctccaagtttcttaagtacctaacagttttactacatttaatacagtcgaaaaattttcctttatttacagtcttgagacatttcatggggggatccaaaatgcagttcttgggtcaagaactgaagaagacggttctcttattagagaatatcttcctcttgtgaagtagaagtgagagaaattgtaggggcgtcttatttctcttcatccaattgatccatttttagtcctcaaaatgaaaaagaagaaagaaaaattgaatgtttctactagtccattaaattggaggaaatagaaactttcttttcttagatgatgacttcctcttaatttttgttaatttactaagtattatgctagttcttatcatctgttaattcttattagcactaatgatgtggaactaaattgaaaattgttgaaacatcagggactaaattaaaaattttacataacaaagcaagcataagtagtcaaggaaattatagaaatgttttggagctctattaatagaggttgggatgaagtgaagttttaggaagatcagatggtattctcactctttgaaatgaagataaggtgaaggtaaaagatggcaggatatcttcaaggaatcttttctattcatgtgaaaatagtgttgtaagatggaaaataatgccgagtgtctaaattttgaagataactttattcaggaagagatcttgaatattttcagcaagtagtatggtaagaatacagaagtgttgatcattctcgagatttcttaatctcaaaggattatgggaagtggaaactctagctcacctattcctccattgttatccttgatggcttgagagaccacatgtagaagattacatagtgtatcatcggcaagtcgatatgttgaagatactccaagattttttgggagagtcacctcaatttttttgtcttattaaaagcaaagtgctgaaagagtggtggactaaccaagctgtctaccaagtcgttgctctaaggtcttggctaagaggttaaactgtcagttgcttgacaaaatgtcaacaagtcaaaatgcttatacggaaggaccgcaactaattgattctatctttttcttacttgggcattcacttgggcaataaatccacaacgctagagttttaaaagctctggaaggaaaatgagtcctgtataagttagaaaaatggaagctttacctttctaattgaggaaattttctctttgtcaaacagttcttgccaccttacctgcctatatttcatgtcaagttttcctatgcttggggaagtggtggtaagttttggaaaaaaagttgaagatttttgtagggatggtaattcggttaggaagcttagccacttgtaaactgtaatgtggtgttttacaactgggtatggcacttcttcaatgaatcaaatcagttttggcacaaggtgttctctagcattttgagaaggaagacgagtgtttactttttgagatttcattgtccactatattttattggaaaaaactattcaatctggatgcctcttgccggtagttcaattcagaatcatcatttagattagattacagtaaaaacgtaacattgaacacctattagaagcattctgtaattgccagcaaacagagtcttggaaaaaggggaaaatagttgtttccagatgtcattcaacttctcccacctaaacatggaaccaaaggctgtgttaggatccacaatatttctaagcttagaaatgagcaagcaagtgctgcaggacattctttacacgtagtgatacacctgacttatccttcccatacttgctacagtctttctttgccatagtccattgctttctagacggaactacaacatgcatttggtttaaaatatgttgtttcacttggctatattcatgaagtcaagacctctgtgttccaaagagcgagagacacaacactgtacttcattaatagacaacctccatcctagtgtgcaccttcctaaaggatcccctctcatatgttcatcaaagcttctaccaactgagccttaaagacacaaataattattctgcacatttgcaacaacccctttggcagggcagagccatgagttgggcacaaataattaaatgttttggatattgtttgtttgttatatacttatatttaccacaaaaatccctaccaacacatgattataaagtaaaatggcattttcatctgtctgatccattctctctaggatggctatactctgttttcttttaatctctaataagttaacttgctctgagaagttgttgggttaattgttgttattgttttctttcaggaaaaagcatttcaacagctttatccgctggagctgctttgg

SEQ ID NO: 7868 - DNA, 5189 bp, Cucumis sativus; identical to SEQ ID NO: 7435
  Intron number 1 from transcript Cucsa.237110.4 (locus Cucs a.237110) derived from phytozome v7.0 (chr-ID scaffold0202 3; pos 124634 to 129822 reverse strand)

SEQ ID NO: 7869 - DNA, 3914 bp, Cucumis sativus
  Intron number 1 from transcript Cucsa.178270.1 (locus Cucs a.178270) derived from phytozome v7.0 (chr-ID scaffold0122 7; pos 376516 to 380429 reverse strand)
aacccaactgtaagatttccttttctcttttccatcattattctcttactatttctcctacttttgattacgcctttgacttgagaagaactttgtttcttgctgctttaatgcatgggctgcgatatatttttttttcgtttcataattgtttaagaggttaactctatgtttttagatgttaatgtttgggtattttttcaatttagttcatttttttttcttttacatacttccaatttattttttggtgaattttagagtttcctatcgataaatttacacgaacataacatgtaatgaactgaggaaaatttagaggggaaaagatgtcatctaatataagaaaacctaaacttctatcaattctaagaatttgttgctttcctcacatttctccctctaaattttgccagtttgcttattgatttgtttcttttttggaagctttgaagtctctttggtttggatttggaatagtccgccgtttagagtgaagggccatattttatgaaccacttgtttcttcactaatgtttgagagatttggattgagaggagtcatagaattttaagtgagggtaagagatttgtgggggagttgtgggaaactactaggttcaattcctctgtttaggcctcgatgcctaaggtttctgatgctaccctttcttgttcttgcaattgagctgttttaccgattttattattagttattatttgattacttaaatatttcagttatttgttattttatgtgggtcaccaataatgctgaagtactctaggaagggtaaaaagggaagtccagaatgaaagttagttagtatggggattgagaccactgagagaatgtgtgggagtgagtgtggtcagtatttgtaataaagagtagttgttggtagggttgtgctttctggtgatagggaagtggtcaagaggagggagagaactaactctttgtaatcggctggagtgtgaagcattaggtccatcttttgattatcgcatactagtaatagtaagggaatgctttacatcttattagccaacaaattggttgttaggttgatagacttatgcctactattataaatgttagtattctttctgtattttggaccattatgaaataaagaataactttactccttggtatacaccaaagttggtattggagatttcatttctctggaccaaacaccaaattatatcctccaaatcttcaatggaacacttgatgtcatttgcacatcgtttggggaatttatagactctagtgtaggagaaatgagtctcttgacaactagaacaactaatggtgcctaaaaactaaaatcaagagaatatcaacactagacaaagtgttaggaatggagaaaactgaagggaaaaaataccacatgttgaaaagtccccatctccaaataacctaagaaaccataatcataaacatgagaattaagaactttgagaaaagatcaagattatggattctcaagtgtggaaggaagacttttcctatgggaatcaagtagaaggtttaagatattctcattaagaacatgacaatgtaaccctgaaaaaatagaactttaagtgttttcttgattggttaaaaaatgtggatttttttgtacacaaataccccctaaccaaccagaaaatcagactggtaaacttgaaattatgcaaagctgctagtgcttggtgcaatccattcaaactgaaaaaaggagtgacaatgaaaatataaggacaaaaacctaaaaccttcaatcaagcattcttttagttcttatagctggttaggaatttgtgcattctccaccttaactctatgcacgacgtcccatcactctttttagtcctagcaatctttagatttgccttgctcctgctggttcagttgctgcccagtgggacgatgacacgaactcttggtctatagtgtttcgaagattgctggaagatgatgaaatccaagacttccaatgttttctactcctcttttcaaagagagtgtcagaattggtagacaggagagtatggtcattagatggctaggggctagggcagattctctgttaaatcccacttgacctacctctccccatctaccctgttggtctatagtgcattaatgatggtgttaatggtacctttgatcccaagggtgcaataacttgccttaccaacttaatatggtctctactctcgtaccaaaacattccttaaaaccataaaaaacgttttaatcttgggctcatggcatttataactacatgtacttatatcaacatgtaaactgttaactaactttcagaggatacaccttttaagcatttctaccattaactttcactatattgggtatctattagataaatcggcagggaaagggtggaattcgggaaccctaagaattgttattactagtgaaaagggcttttttagtgacatttcatattccaacaacaatttaggtctcgcaaatataagactattcaaatcagtgcattgagtgtagttcatgaggaaaaagatgagcttttgaggagaatcttgtctttggtttcaaactggagctttgtgaattttattgattcactcaaggtcttcgtaatagtgatgggatcactagtaattgagattccagtttatgtagctttggtttattttttcttttcttgaagtggtaattccattccatgcaagttttctttaggtatagcttcctattttctcaaggcatctgtttttccctgtcaattttctacatgcaagatatggtataagaaacaatttcactgctacaataaaattatataagtgggggaggaaagctggccattagctaagggagattagctcttctgcacagagcctttataattttcttgctgtccccattagataagctgttttccaaggccttatggaagacgaaaagcccacgatcggttagtatccttgtgtagattatggtttttggtcagctaaactgctcctcggtcatgcaaaggaagctccccttcccactggttgccttcatctatttgcccactttgtgaagcagaaggtgaagattttcagcacctattctttgattgctcttatgctggctgatgctggccgatgctggcagaggttattttcattctttaaagtcgcttgggtgtttggtgatacttttcgtgccagctttgaaaatgggccctcgtttgatttggactaatgcggttaaggcaatgatcgctgaaattaggtttgaaagaaatcaaaggggattctatgacaaaagacttgggtgggtggatcattgtgaattggctcccctgaatgcttcatcttggtgcatctcatccaagacttttgaagacttctccattcaagacttatgattaaattagcatgcttttatttccctagcttaagattgtaattgtgttatattgatctcttgactgtttatgctttttgtccttcattatgtttggactgcttttgttttgattatttatggatatgatgagggtcctaagtgggtgtcaacctagttgagattcctaggtgcatctcctaatcccgcggctatcttcgctctttgtttctctcttgtactttgagtaataattttatttcattatttcaatgtagaggcttgtttccattaaaataataataataattattattattgaaaggagtgtttgcaatttaattactgaaagaagcttaaatttgtaccaagtaaaacccacaaaactgtgagtatttatgaaacaatccaagagattttctttgttgttgaagactccatttttgctttattttcttcaaaatgatgcattatgatattttctcccttgtacgctcagtttaaccgatagttccttttatttgttttttag

SEQ ID NO: 7870 - DNA, 2603 bp, Cucumis sativus
  Intron number 1 from transcript Cucsa.011470.1 (locus Cucs a.011470) derived from phytozome v7.0 (chr-ID scaffold0015 4; pos 703775 to 706377 reverse strand)
tccttgtccctgacgaagacggttccttctctttctcttcttcttttctctatcgcctctttttcttgatgctgatcaatcattttctgataatgcgatgttattcttctgttttgatcaattccgacctttaatttgatttattttttagttaatttcgagaagaggagtgaatgttttgttttctaagtgtttgtaggtgttgaaatatggtttatgagtttttattgtaatctatgccctaaattcttttctgctatcatgcagtcgtcttacctgacctgaaattgtgtaaattagttgataagatatctagtgatccgagtgttggctgattttgatgatttgcctgtgcacgattgattctctgttttgaaagttcttcaagttccgaatctttaaataggaaacgaacttcctctgtccttttcttgatgcattttttaggtgattaaactaattttttcattaacatttttgggagaaatagatgctgttttgtcgtaatatatatatatttcttatcaaatcaatggcatttgaaaattttgaaaattttggaaagtgttttaggttagttaagagtagctttttgaaaagcagaagttctttaaataaataagaagacataacgtattgttttcttgcagtcttgtagcacatgcttcctgcttttatttctattactgttgatcataactttacctagttcagaattcagatgtggattgtgatatgcaaacacttcacacaagccattttatagaagtttaggacatggcctattaacaattggcagtctctttttccggggggtggggtgggggggagcggggagattctccctactccagcccttaggctgtttttgcctttttctgaatgaagttcctgatgtttcttttcaaaagaaaaaaaaaaagtgtttagaatatgaccttagaagagacgggttgaaccaaatttgtttcagaagtaaggaagatcaagtggttgatcgataaacttgatttaataactagtcttttagtttttctagaacaaagtaaccgcctttgaaatcttgcttttcttagtttgctttcattgatgacttgtattatagagcaagcctagttgtcttagttcttttgaaactatcaaacttgtgaacagtgattttcaagtttttgctaatttttacaattcactcacacaattctatgacatatattctttataattatatacaaaattccgtacaaccaccaaacacagtacatgtgaatggagcttgcatctttctccttctgtaaaatacgatcaaatgtcctacaaacaaaaaacatctatattttaatatttatcttcatgtcttctcacataacttcattgcatttatcaagtaaacttatccctgccttattctagtattttccgtctgtttagtttctacaaggtgtttatttatttcttaatacgattgttgaaaaattgttggtctcttttccttcaatttctcgtctgagcatgttttctatgtgcctaaaacatgccccgagtcctattgaacttaaggactcataaacagaggtacaaactgttatcctattttagtaataaggtcttattgcatgcttccatgttccaaacatgcccaaaatttaaaataataacaataataaacgatttaattctagttcagatagatatgctgtggagggaaactttgctcgatttgattttgttcttcactgagctttgtatttgttttctgaatttgagttttctattgtaattggatgcttttcttagaatgagttcaggatgtcttttaagagggtgaaaagtgcgtttaacccatcataagtacttttcaaaattagtttttcgtttgattatcaaaagtaattttaaaatttcgaaaagcactaaaaaagccttactcaatgtgccttatagtatttcttgtataaccaaatttaggactgtgctttaaccaaaaaacatttatttttctcagaacacatcctaaattcattgttatcttagataaccagacaccatgcgatgcatgtgcttccttgagttggtttgtgaatgttttgcagtcaacaataatacttaccataaattcatagagtcatagaccagcaatatgtacaagataaattgccaattgttgtttttctagtgtggtcataatatagacatatttatcacttttaccctctttatgatacttttaagtcaattggtcatttttgaggaagaccatctctctcacactgttctacaatagttctcaacataatgtttactggcttcattagtaggtaccatacgacaacttgaagaagtggataatttttttttccaatattaatataatgctgctgcacctcttgaacatgttcagttattaaaccttctggacaacttctcccatttctctgattactctcttctttttcttatataattacaatgagaactgatgtgggatgacagtgtcccatatttgaaaatgatactgattcatatatcatatgttaaacaaatactaatcacaacagtgctgctgccctcatttgatttttttttcttttttcttttaggttttg

SEQ ID NO: 7871 - DNA, 1833 bp, Cucumis sativus
  Intron number 5 from transcript Cucsa.128340.1 (locus Cucs a.128340) derived from phytozome v7.0 (chr-ID scaffold0102 4; pos 374521 to 376353)
tttagcaaccctgacgtcgttgccgaggaaccctggtaacgtgacatctaatataaaagtaaaatctaatatatatgtacacttttctgaaatgaatttaaaacgttttagtggggtttcacacaaaatcaggaagaattatattggaatctcattacttttcttaattgatatgtttcagattctttagggatgaataccatatttaacataaactaataattaattcttgcagtggcatacaataaaatatgtattccattattttgttttaaatggaaagaataaatttatattagtaaataaacatttattatttctaaataataaacattttattttttatctattttgtatcatttacaattatttttctatttttattatatttatattaataacatcttaatttatataagttatgttttggagattttttttatgatagaatgaaaatattaaattcatgaaaacgtgaaaatggaaatttgtttttgtgagtaatgtcatatttttagaaaaattatgaaatggaaaatttaaattaataaataattattttacgttggacaacttgttactttttttaaaaatgtttacgtacttttatgatatatgatattaagaaaatgctaatttccataactgtaacctaataaaataaaatgtgggaatttcattggaaatgtcacgtggatggaattttaatacccttttattcattccaagtttcaatcagttggtgcgatttcttttcacatctcataatcacaaattggaatagtattttcaaagtaaaatataatattgacttttcacaattcatattcatagattgtggaaatttattggttatgtcacatgtgataaaattcttataccatgattacagttcagtttatttttattttactaactttcttattccagtgggtttcatttgtttatttccatttccaattagtagatggggtttgattccataattcgaagggaacaaatttattttcaaccattctattcacattttattatcaaattttggggaatggtcttttcgaagtgaaaaaataaggttgacttttactaactattcttccatcacggttttcaaaaatattgaaatagaagcccgcaaattctttatagtcccatgactacattttcttagcttacttcataaatacgtctccactctccatcggttgggaacttggttgcggtgactttcttttcatgagtgggtgtggtggtcgaatataaaattggtaattgttacaagggtgtgataaatgttgaattagattagtcattaaaataggtccaccgtcaacttttgactggaagtcctccctgctatgatgccacttttaataatttgttgattttaataattttagtacgtaccaatttgctattgtgtgcattaaattaactattggtccaaaataatattggtcccatgtgttagctaaagcttcatcttaggtaggcgcctcaccaatctcccatgcgtgctttttttcacaataacttattttatgacagttcagcactaaagtaagcacttcgaattcacacagtcctgcctcttcaaactttgatccgacgtctctcatccgttccttttcttatgtgttccatttccacatgaatgataatttccacttcctttttccaacgtcttattctaaatgttatttctgtttcactgaatattattttatgattatagctattgagctaattaaatttggatacaaacatacagcttttactggttcaattgtatcattcatttcttagatatattttgtggtggtgggaacaggt

SEQ ID NO: 7872 - DNA, 1976 bp, Cucumis sativus
  Intron number 10 from transcript Cucsa.373450.1 (locus Cuc sa.373450) derived from phytozome v7.0 (chr-ID scaffold037 26; pos 345889 to 347864 reverse strand)
tcattggttacacccctgaggcttccaggtcagtttcacattacaactctctctattcatctatttatttatttattattattattattattatttctttttttccttcttttgttatatgtagtgttagtgaatctggttgaattaggtttattttgccactccacggttaaaaaaagtaaaagaaaaaaaacttagtgataaacgtttcaacggtattcttaaaacgttgaattggagtgagctataatagctcactttttgtttagagttaggtttagatttagttggcgattaggattagtaatagtatgcactcgagatataaactattttaacatccccatgctaaaataatcaaatattattctagtttgttataaatcagactgtaattaataattttcacctcaaatacaaactataataacacattatttattataacagaaaaaactataataagtaacacataatataataactcattttgtaccccaactgtcttctagtttttagaaaactactcggactttcaaaagttttattaatattcttagtcttatatgataatgattttaaagtttagcggtactttttttaaatgaaaaacaaaaacaaatagcacaatttagaaaataaactagaaaaatagcacaaggataaatattttaataaatagctaataatgttgactagtcaactaatcaaattttttaaaatgcaaatgacccttcaatgcctattatggatagctgctatcaatgataacaattgatcacacactctcaaatggaaagttatatttaatataatttctattaatgatagctttcaatttaagataatgggtaaaaagcactcataattgtggcaactagaaagttatcacttatactagttattagtgataataactaaaagttatcaaatataaacaatcgtatatcaaatctaaacgattgtttttcaaatttaaacaataatttttcaaatataaacaatcgtgtattaaaaaatattgaaaaaaaaatcatttaaatttggttatccaaatttaaacgattgaatataaacattcgtgtaccaagacaattttaaaaaaaattcaattagatttggacgatcgtcaaatctaaacgaccgtgtaggaaagaatagtcaaatttaaatgattgtttttcaaatatattatggaaggtgaatgccaaatatattaggtgcagtggttaatcataacattttttgtatcttccattctaaacatatgagcttttttcgtttttgaaattgttctataccgtgtaaatattttggagttttgttatattttaaaaaatacacctaattcaagaattgtttttacaatttttactatttttagtagttgtgattaatccaatgacgtgtttgaatgacttaaaaaagatatttttcaaaattttatttttattaatttctttaaaattgatagccatcttgtcagagttggtggttgaaagttcaccgatagagttgttgaaaggttagccggcaacttaggatgcctaacccactcaatgatctcaacctttaaaacacacactcatgattacaaaacaaaaaaaacccaaacttttaagttgttgttaaggacggatttgttctttttaagtctcgaaaattaaactaataaatacaactttcaccaataagtttcaataatgtgttacatgccttaatttgtactcattttcaaaattaaagaattatttttcattttagaaatcgatataatcgaaatattgaaaaagaaatacgtataagttttaaaaacaaacgattaattaagccaaagttgttatgaaattgactcttagttgataccatcaagagattcaatcgatatacctaatgtttactcacatacttatatgtcaattgaaccttttgtatttgtaggttttttcgacagctcattactttatttgcagtgc

SEQ ID NO: 7873 - DNA, 8215 bp, Cucumis sativus
  Intron number 10 from transcript Cucsa.313610.1 (locus Cuc sa.313610) derived from phytozome v7.0 (chr-ID scaffold029 95; pos 2803621 to 2811835)
gaggtgaatttttacaaatttatcattaattgtgatacagagccatactatttctcagtttaaattgtagataacatggttggtaaaaatcatgaaattattaaatgatctcttactctccaatgttctttacttttttttgaaatggaaacgagcctcttcactaatgataatgaaagagactgatgctcgaagtacaaaagaattatagtaggagcaaaaggagtaaaatgacgaaacggtgaataaaaaaaacaaaacaaacaagccaaactcctctaggtctcaagacaaaaaggagaacgaaaactacaaggcaaaaatagtagcttttcaataagaaacccattttcagctgtagacgtccacactaatagcttcacaatggaaggagaggagacaacaagaaaaggcaaattcagtggtggtcttccactctccaatggcctgaggatgctaatgaccaaactcttctagcattcagaccaacactttccacaagcccatcactgatttctaactctctcaaaagcctttcctctttctgctttatatcaatcaagagtagcatgtcagttttttacagtaagtttcactttacgaagctgctcatgaagaatgaaaccagcccacctaatgcatgggggcgcttttcaagacttcctcaatgaccttgttgcactcttttatcaacaaccaactattgcaaaatctaaatggggatgacccataatattgcacctgcctctaataatagaggaaagtgatcagagaagattttagctttacgggtcactcttgagttttcaaattcatcatcccatatactgttaataaaaaatctgtccaacaaagatcttgcagcagtgccaccctctcttgactgattaaatttgccattttgaaggggaatttccattagattggcagattctataaaggcattaaactggctcaaccctcttgtgcttctgccaactggaaacctctcataaacctatctagtgatgttaaaatctcctcccaaacaccaagcctcttctttgcattctgttatagttaataattctggccaaacaagtttcctctctctataaccgcatggaccataaacattggtaacccaacaacacttcttgcacaaagttacttttattgagagaaaataatgtcctcttatggtttccaccactgtgattttacttttatcccataaagtaagaatgcctctggttgcgccataagattccactaattcccatgtgtgctctacaaatcttcaaaaccttttgcattgatctacagtgatatttgagggccttctagatgttggtccataacttctattgatgaccattctagactaatgtggacatacctcatggacaaatccatcaaatgttctttaaccttcactctataatctttgattctccattcagtagagtaatattcaagttctaagaatagataatgttcaagactatttcaattcaactcttgggtcatttatttttctttttgaaacggagacaaacttctttattaatgatagaactcaaagtacaagagaattatatgagtgtaataaaaaagcctaaaaaggaaacctgaggggatcatgaggcgcacccggacatctcaactaggttgacaccccatagtgccaaaacatcatatccaaaataaacaaaataataccaaactaaagatatttgatgtccaacttaatacagaaggccgagacaaaggaaaacaacaggaacaaagcagtagaaaccagaaaatagcccctatctactatggaggccaaaacaagtacatgaaaatactatgactaagaaagaaaaaatggaacaatccaccaaaacttcaagacttcaaaactcagaaaaaggcctgctgtaagacaatttcaatgctgagaaatctgcagtccaaatcaccaactgaaagaaagcccagttgagacatatttcttgaatggagtaattctcaaactccttatttaagagtaccaagctgccgtgttacgctctgcagagcaaataatttccgaccttggtctttccttatcatgaaaaatccgatggttacactaccataattttgcaagaagagcttgggtcatttattcatctcattgtattgttactagttcatgtgtggacagtccttaacaaaatgggtctgccaaaagaaaaagaggcaccttcgtaaggttgcttgctctcttatgattgccaataatgttcttaatctgttttgggaaaaaccaccgcaacctttcttattaatcaaatgtgtcgtcacggtgctctttatccaaagctttccaagattattcattaccagagatattattgaattggcaggccttcatcttctcattgtatatattttttgaaacggagacaagcctctttattaatactaataaaagagatcaacactcaaagtacaagagaaatatactaagagcaaaaagaggaaaaaataagaacatccaaacaaactaaacaaaaagaactcgggaaatacaaaaggtaaatcgaccaaacaaacaatcatgaagaacaagctaataaagtgaaatccaacgaaaaaataaagctaagtagaattaaaacgaagagaagctgaatacaaaacataatggaatatctctctcataaggaaaccattcgaatctatagacttccaagaaaatgcaattggcaaccacaagtctatcatgccaaaatagtccaaaaaccagaagaggctcgaaaaaaccagaagtccaaaaatcgcataaaagatttccttcttggactcttgaatcatgactacattctggctgcaattttttatgaacttttgagggctgcacgtttggaggaatcattcgaacccctggtgttctaggagacaatcttcattatagctgggtgaaaaaatgggatggctgcacttctaaattaagccaatataattccacaatcagtgactaaagacaacaaatcttttggcaaatccagggaaattttattaggggggaagctttcatcatcgaacaaagcattaaggtccatcccttcaattcctgagtctaatttaaggtcaaccttgctggtggttttggctgaatcttcactactaacactgataggagaggaaatttcaagctggttcttgagagaaatatcatcgttgcaagggaaaccttgcagaaatgatgcattagagttagaaatggaaaatttagaaaaattgagacactttgatgaagaagcaacgttttctgacctaatgaagcattcaggtacctgaactttggagctgtacacttccagaagatccgggttattggtagaaacagagtgcttgatgggatggttcctaaaagagtccaaagggggaattttaaggtcacaaccccatttaattcggattttagtagggcagtccgcacattgttgaggtaggtttacttgcggatatactacttgagtatttctgggacatgagaatatttactacttttggcacacttgaaacagttggaaggagaaaaatggcccctgcactgacaaaatgtgaagaatctgattgtgaagcgttcggaagagttttttgcaataaaaatgctgagttgccatccgatttaattgggtaagaatcataattactcatacagttattaaagtgcgccttttccctttaattctctcatttaatgactcactaaacggctcttcgactctcggaatttttaaaacaaaatcattaaacatggacccattggctttttgcaacatctggctttcttgggttcggaaaaattaaaaaaagggcctgttcatttgcccgctcaatacattcttcttcaaccaaacagtcgaccactgtcgtctttttctgtgccggtggggactgttcaattgcccattcaaatagttcatcttcagcatgattgtcggccaccgtcgtcttccccggcactggtgggatggatggaaatatattaattaaaggtggctttctgttttccttctctttcttaccctcaaactactcgtttctgaaagggaaaatctgacttggtgtgacccacaaaattaaatagacaattgttcataacaatcgtgaaaggtacaaatccgcaaagattctgcttaacttgaatcctagcttcactgcagttggtaagatttaaagtgtccatgacaatactttgaagtcccccaaaatgatccctgatagcctcgaaggttctcctgcttcagtaatccaaagggaggttctttattttgagccatcctccatagcctttcatggtgagcggccgactgtgtttgtgtttatcccacctttcgaattttaggtgaaaagaactcaacgcctgccatttcccttcattgcagatgggatcctttatcgaaccttggtcaagactaatgggaccattctcattaaataaatcttctttcacttgtttggtcttctttatttagctcattgtataattctcttgtacgagttcttattattaataaagaagtttgtttccgtttaaaaaaaagggttaatgactatctttgcttggaagtagttttctaacatttttcgaattttccttcgatcgtcgatggcaaagagcttagtaatgatccaaagattttcaaaattggttgggataacttcagaattcctaattactcattgcttctgcttgtcaatattcaaacatgaggaaggacaaggggaaatctttgctacttttgtatcggccaacgctacaggactcctgcaatcccttgaagctttctttgtgacaaacacaatgcactttttttgtttgactttatgagcataactcagcttggtttccataatagtgagaatgtgcttcaattggtttctagaaaaccatttgacatattcctccctagaacagaaattgtccagcatatttagagaagatctccatccctgtttgttatctcccaagcacacctttatattagaatgccctcctgatgaaggccataagtcacagcttaaaacccatccagtctttgatttaagttttggaactttcaatctacctctatccacttcacccagcttttgaaagaacttgtcctctagccctcttaataattctgagaccaccttcaacaactattctagatgaaatctggagaccgacaagattctacaagcttccacatcttcaacatgaatttgatttccctctttccaggtatagtaatgagattcaaggactttgcagctgactacctccatatttggatgaaaacgtcggtagccggaaggaaagaggagagaggagagaggagagaggagggaggagggaggagaggggagaggggagaggggagagagaacttacattttcaagttttctgtgttttagggagcagatgttctttagtatgttacgagacagctaagctctttcattttgtcctaatgaggtgcatctgattcaagctcttcaaagattacttcttgcatggttatggctcttttaagcacttttgtttggtttcccaacatttcattagtattgcctgtttttttggttgttgttttgattgtttttctgtcgtgtttggagtttgttaaactcttcgtcctttttttgttagttcgtgtatttgggttctggattctttgtctcttagagattcaagctctttttataattttcttatactttgagtattagtgtcatttcattatattaatgaaggacttgtttccttttcataaaaaacagctaatataacactgtaaataaaaactaccaattaactttgaaaaataaagaaaaaaggggaaactaatgctcaaagtacataatttccaaaagaaaacattaaaaggagaaccgatagaacaatgtgatattctggagaaatatttcattctcttatttcagaaaaagacccaacaacgggtaaatacattacaagagaaattctagctaagcaaattgatgttaacatgagtgaaattcaaagaagatgtgtctggttcaggtggttgacattcaaagtctagcaaggtaacctctatccttctcgagtaatcaatagcagtacaagttgttgagactataggttaaggaacttgagagacttcaggttcataaacaatacacggatccaacacataaataggtagctcattagaggagctaatacttaggttatgatgtgagtgggagtgtgggacaagtagactaaactaactggacacaaattctcacattttcccccttgaatttgaaaaacttggtgaaaaaaggttagttctcaaagaacgtaacatcttggggtggggaatacatttgtaccccttttgatgcaatgaataacccagaaaaatgcaccgaacggattttggatcaagtttggatcaatgaggagattgattgtgaacaaagcaggaacatccaaaaacccaaagaggtaaatttgaaaagttttgtcattgtgaatgaatttggaggaagatatctcgatgagttatatacattgagaataataaagaagcataaagcgaaaagctctagggggatcagaaggtgcacccagacatctcaactaggttgacacccccttagcaccaaaacatcatatcccatatctaagcaaagaaaataaaattagaaagtacaaactatgaaagtccagcaaaataacataaaatatctgtgtttgaagtcattaaaggaagatatgttctctcgtttaaacgcaatactgtttgcaagaagcctagttaacataatgaaagaaagcttgctgaaagctttggcaaatgaaaatgctcattgaaatgccaccttgtggtgcattctttctaaggaattcaacatgtggtgagacataattacagtgcaggagaagggaaagcccttgttgagctggttagctatataaagagcattgggccaatgatggagcaatgtgatactctagtagctgatgctttgtggggaatgattgatgctgaggttcaaaattttgttcaaaacacattggccaccatgttacgaactaccttctggaagaagaaagaaatttcaaggattctttctgatatacgaaccttgtcagctgattggatggcaaatagaagcaaatctgattctggagcacaatcgcaaagaggtgaagaaagtaaattgaatttcttttgccacggccatttgcacctacagctacccaactattgaaatacgtgaggacttggacaaaaatcaatgtggctgattattaaaagattgctaaagaaattaatctgatcgttgtactaattcaagaatctgaagggacaacttcgataaagcattcgtaaaaaagcatctagagctcaaaagatgttggctagatttttgctggaagctttaaagagttttggggtacattcttacaaaatttctctttaaccagaataatgtgttgaaggcagtgctggcaagattttgtggcttagtagactgcttcgagttcctctatacattggattgcattagcaagacagttttggtcagcctttatagcctctccactttgaagtcctcaaacattatgtcttccggattagccctctgcttcaaccagttttctgcttaatcgaggattattcttcaattgttctcggcctgctgcctttgttttatgttttgtatggacaaattattattatcatattttgtttgaccttgtatttgtggttttttgttgatcttgtattgaaaataagagcctagtataaaggtttttattttctcttcttggattttaccagggcgttaaagggtgtcaacctagttgagatgcctgggtgcgcctgctgatcctccctctcccattgctttgctttttgtataaccttcatgtacattgagcttttgtctctttatttttcaatattaataatagtgggactcgttttcttttcaaaaaataatgggccttgtttccttttgaaaaaaaaatagctgttattagtatatgattatatttgtaagattatttcttcttcttaagaaaccttgttaaaattattgtgagtatgacaaaatagttctatttacatcagttctcttgatgtttagtgaattcaaagtttatttttgtgatttattcagcttcattttttgacgagattttctgttatcccttacttttgtagg

SEQ ID NO: 7874 - DNA, 3349 bp, Cucumis sativus
  Intron number 1 from transcript Cucsa.014740.1 (locus Cucs a.014740) derived from phytozome v7.0 (chr-ID scaffold0018 9; pos 70057 to 73405 reverse strand)
agcgttgtggaaccaccctgctggccctaaaaccagttagtttcctcgatctttcacaattcatgttgtaatttttgttctttacggagcaaattgaagtatgttacctcttttttcttatagtcatctatttcttttttcataccatctcattttctaagcagaatttgggtcgcgatagatccattttcaatatgattgattaaatttatttggaattgtaacgttgcgatgctcattttctcgtgtattatgtgggtcgggtagcccatgaccattgattttcagatggtttgaaatgcagatgaagcccagatagttttatagaatgcttagtgcaaaatctgaaatgagtatttagcaactactagtcagtcaacgtgaaattataacgtggatgtaagaatggattctttggatttagtcctatcacctttgtatttagaccccatgcatagcccacttgtttctcgtgaatatctcgtgtagaggaaaagattaccttttgattggatatagagctattacctttgcgcaaattgaaaacataatgatatctcaaggagaagcaaataatcgaatcaggagatatgagtctcaatttatcgttttctggacaaacttttcccacctatgaatcgtacttccttaatattcctgctaggatgtgttttgatagggaattgtgcttgtgttcttttttctttttttttagcgtcagagcttgtttacgtgcatctccactaatctcaagggacaacttgcttgatcctacaacatttgagtgtcaaggaaactcgtaagatccccttcttagccatttacttacaactagctcaacccatgaaggttgaattgtgcttgttttagaaactcgtaagatccccttcttagccatttacttacaactagctcaacccgtgaaggttgaattgtgcttgttctcttaaaagcacaaatatgggtatgacttatgcgacagatatgtgacatggacatgacaacatgctattattttagaatctacatatggacatggcaatgacacatttattaaaatattcatttgaagaaaatatgtatcatttttacacaagggaattcgaagtcaatgagcttatgcatgtatgtacttaaaaaattagtttgatttcagtctaaaatattattatttccattataattatttttattatatgtgtctattacttagcaagtgtttgatgcataaatgttccatgcacttcgactttgtataactagtgtctaacacatctataccactaacaagtgtgtgatatgtgtccgacaagcgaaactgaagtgtctttatcttgtagctcctacttcatggtgagggtaaagttactaagtgctcttggttgtgcttcaaaccattactatttgactcgaacctgttctaaaaaagtctaggcattttgaattgtttgttgacacagacaaagtcaaggaaaacctcttaaattatttcaatattgaaccttggacatataatagttccaaatcgaatctctttagaaagatcatttgtttgtctcatgatagcctgctccagttcccttatgaaactttcgttattgggttagccacacacttcacgttcttgacttgtagggcatcaatgtatcatcacagaggctgtaattctcaagttggaaatttctctgcaagaaatttactcacatattcaccaatgagagtggaaattgcccataatatttttttttataacaacaaacgacttttattgagaaagaatgaatgaatacacaagtgcacaaaaaacaagcccacaaaaaaaaagaaaaaggaaccgctacaagaagagattccaactaaacaaaatcaaattcatcagataactccaaaaaagcttttgatattgaagcccaatgagagacatgaagatagacatgcgctcacaagtctccactcaccctcttgacccccctaaacatcctactattccttaaaccctacaacacctgtaaaatagcacaaacgttaacactccaatattattgtgcctgattctttgccttcatattcttccactttgtcatttcttgtaagaaactcctatcaaaggcataaaaaagacaagcccacaaaaggagtcatctcctatctataggaaaggacctcaatccaaaagaacactaccaaaattaatagttataaaaagtttagttaacgaatgcccataaaaatatattaaatctcacaacctcccaactcctccaaagtcctccacttctttaaaaatgctcatttcctcatgaggagacactctccaaaagaaagtgaaaaaaaggcataccataggagtccctttatcccaaagagggaaagatcagcagtatctcctcaatcctagaatggtagaggacaatacctattgtgttccacaactacaaacacactgaggcacattgactccaaggggagtagcaagcaaccccacaaaaaataatcaagatcttccttctactttgtgattttcgatgaagtagtattaaaatgttccaagtggttacctaatctgaagtttgaactatgaatttttgttttttaatatggatcaaaagaaactatatttttctcatcacagcataaggacatcttttgtattttttttttttatgttgataaccttgtttcttattcacaaataaataaacaaaaattagatatcttccttgcttggactaatgtctcatgatacgattccttattgaaagatttaccaactggattttataataggatgtggctcatacctacattaatgtaaaataaattgtgacatgatatgcctagaaattttattgcaaaatctattgtaggaattcctggtattagatatgaaataaacttctgtggccttgtaatgagcatcactaaaagtaattacaatatattttactaatctcaattggaaggctttgttttataataactctttggagaagggttgcttcttctggaacaccccagtttttgtccttttttgttctttggtaatatcttcctctctttttctttttcttttgaaaaggaaacaagacttttcattgttaataatattgttcattattaaaatgaacaaccaattatcatttgtggtcttgtaatattattgttgctgtagcttttcagttctccgcaatgttggcatgtaatggcaataattgagatcattctattgataagcaattttttcagtctatgctttaaactaaatatgccatctgtacatgatttctatgagctaaattttgtttgtaacacagttcacttctgggcaccaacctttaagtggggtatc

SEQ ID NO: 7875 - DNA, 2958 bp, Cucumis sativus
  Intron number 1 from transcript Cucsa.078360.1 (locus Cucs a.078360) derived from phytozome v7.0 (chr-ID scaffold0079 3; pos 707709 to 710666)
aatccagctctgcacaggtttttctttctcttttaccttttaggtgtttgaagaaatgacaaagttagagaatgtttgtttgtctgttgtcgcttgaatgggctgtacgcggaatttaagggatttgtgaatataaaggattgaaaatggtaagtcttaaattcatatgaaaatatgttttcatttagtttctggttagattacgccatcataatgtctcaaaatgcataaacagacccaacttactatttgttggtattttgttgctttttgtttttacgaccatcacttgatgtaaagtaaatgtttcacttttccacttttatacttcctgttcttttgtgactcctttcaagtggggtttctacccttttctttgttatgtaatttcatatcaccaataaaactgattctcatactaattaataaagaaaaaaaaaaagaaacataaactttaaacgaacatatcttgtggagtaatttattttgataactcgctagtttagaaatgtacatatttgatgggaaactaggtgggattggtagctgtaattgaatcgtacaagcaactttttttaggatgtcaaaaccttaaacaaatcagcaacttctagtggaggaggtagagcctgaggctaaaggcaatgtggcgtgtgggtgtaaattgcattcatggaagggcttgggtagagaaaatcccggtagaggatcaactgatatttgagttttaggcatattatggaacgaatacacagtttcatggaacaccacgtctcttgagatgaagatctttttgtgctcaatgtcatacaacttgtaaagccttcatgccttggagatagccaatagccagcatgagtttgtattgaaaatggtccccaaatgtctacacgaattaaatcaaatgcatttaagacaagtgattattggaagtaaaagataatttcctttgtttttccaaaggacacactgtacaatttgatactttgtttactgtagtggatttcaaatgtaaaaggtttcgtaatgagtttaatcaatcagcagaggaatggtccagtcgttgatgccataaggatgctttattaccaacaatagcacaaacggatgtatttgcaggaaaatctgtgggagggtcaagaatgtatagtcctggaaaagtttagcactgccaatcctcttcaaagagtacttgtccggaatgatgcaagtgttagtagaaaattgaacaaaaactgatgaatcctttgtaatggcactcactgagagcagattgacggaaaaatcaagcatatatagaacatttctcaaaagaagtgtgttagataatttcacagtactgctagtgctttttgacctcataggtgtttttatttggcaaactaatgaatgcagaacatggttctttgtcagtaaagaattcttcagaacaacatatgtgtatggatgctcctgagtcaattatacaatatggggcaaagagagtacctgctatgtgagtggtagaactacttgaagaggcagtgaattgagattgaagctggttaaggaggttttggcactgtaatagggcctctgttggattgtggtgttgttcagattgggagagagctcactggtctgtgttattcccgaatttgtactgttggtggaggaagtgctcgagttactgttgttgagtcgctgctgtttgggcttatatccaggaggatagccatagtgactttgtaacacttgtaattggtatgtattgagatgttacaatgagtgcaaataggccgatctttgcattgtttatgtgtagagttgtttttcacgtttgaagagacaacaagtgcgacggctggagcaacagaagaaaaagaacttattgcttgttgttcttcttcttgaagaaaaagggagaatgcttgagaaacagaaggaataggttccatgaggaggagttgagcacaggcttaagccaaagactcattacatcccgtgaagaagtccgtaagttatccaatttgaagaaaattagtgatctcttgatttcctccacatcggcagtttccacgagtacaagttggcctataggagtttaattcacaacgagagtttaaactttgggaaatacatactcacagagtcttgattttgaacgagggttgcgagagatctcttcaactggaaaatgcaaggagcattctttcgttgaaaacactctttgaaatcaagccatatacttcttaccgaatctgcgaagaagatgctggatgaaatcagctaggatacttagttcaagatccaggatatgacaatgtttttgtttctgatccatgagggaaggagattctcatttggacgaggaagagttccatcgacaaatccgaatttgttttgactaatagtctgatgatcatcacacgactccaggaaacgtagttttcttctgttaacagctcagtgactaacactaaacttgtgttgtcgttatggggcagataatatggattgagatttccttgattctgatcaattgaatgttgagtgccataagatgtaggaggaacgttttcttgagttttagaggaggtggacagaatcgggtttgcagtttgggagttctcggtacgcatagtggttttggtagggaaaggtggttgagagggatcaaagtaaggagaagtcactcaggagggaaagtatgctttggtaacgtattggaagctaaaaagaattctaaatgactttctcgctttattgaatggctgtccaatgatatacacatgtgagaagggtaaataagtagttaccacgataagagatgtttaactaactaacgaattctagacctcttaactaattgtttaataacttttcacttgatgaacatctccaattcttaaaatgatccagcactgtgttgtattattgacaggctattgatacggcagtgagaattctaaaggaagg

SEQ ID NO: 7876 - DNA, 2243 bp, Cucumis sativus
  Intron number 11 from transcript Cucsa.341540.3 (locus Cuc sa.341540) derived from phytozome v7.0 (chr-ID scaffold033 56; pos 3956402 to 3958644)
agacagcaggtatgtttgcattgtcagtttattattcattcaaaatgctcattttagtgaaaaatatttatttgctttttttgaattttgcaattagtgtattttggatctgtagattttatttagtttttataatttagtatagaaggaaaacctctgattattattctcttttaaaaaaattatgatagatcccttaggccaagggctttgggccttggggtttcacgtaggtgtatgcctaatgcacatcttcttttgtgcacaaggcgagccacaagacttgggcttagcagctagttgccctttggggagtgcttttttaaatgctgctttatgcgatgaatacttttgagtttttatttttccatttatatttatatatatatataatatagtttatcgaggaagccaactctaaggagaggtaacaaatgaatatacaggcacattgtgtaaaagaaaagaaaagaaaaaaagcttgaaacaaaaggacaagaaactaccaagttactatagggggctccaatcaaaagaatcagagataaagggtaatgaaagaaactccttagtaactgacatcaattcttttgagttataatgaaacatagatcttatactctcttggtatatgagctaaaactgaatccgtcagtatctaacatgtgcttaagtagacttgggggtgggggggaagggaaaatcatggatctttaattgattcatgtattttcttacctattgtcaattttaccgttcctttaagactcgggtatatttgaatcatcttttggattaagaatgccaacaacaaaagaggattgtttccgagatcacggaagttaatgatacgtaattaactcacatacttaattagttaatatactttacacattatttacctttgttaactatcttaaattaattcatctataacaacatatcttcttaaaacatgttcaattaatttttaacaaggagctctaaagagagtgtttgtggggcatatttgcgttattgatcctttgtgaatgagatgttcttgaaatgtgggaacaaagaggtgaatatgctcagtagaagggaagagtcagaagactaagggggtgtttgaggcggggaatgagttattataatagtttgtgggttattattctgtgtttggggtgcagattattatagtttgagttattttaatctatgtttggagaagtaaggaatagtgacatataggagagatggagaggaatagtgggggagagaggaatagtgagaaattgtgaaaagagggagtgagaaataggagaaataaggaaaaaaaagtagaatagtcctaatcctaggattatgataatccttggggcaaacatggagtgagctgaaatagcccgctccactccttcataatctgaaggccaaatggcttgctaggtactcttgcattaagtggaaatcaatgactactttgcaagaggtagaccaatgttagagcactggttagacctttgaaacttggagatcgtggattacatttcattagccttctgcaaaaccctcaacctatattggggcagacctgtaagtttggctcgatgttggaagaactaagtacaacttcccgctattcatatatgttatgattattactgatcaatgatataatactaaatttactttccttatccaaaatcaatattacattttacttcacccattggcttaagcttttgggttaatgggctatttaagatggtatcggtgcaggtggtccaaggatattcagtgttcaagccccaagaatgttattttctcctcaattaaaattgatttccacattttgggttgtctttatattacaaagcctacaagtgaaggttttttttttttgaaatggaaacaagtgaaaggaaagtattgaatgatataatattaaattttccttgatctattagcttaatcttttgggttaattggtgatacaagaatcacgtcttccagtttgttcttgtttatttatgatgctgtcttacgttgtaatctctcaaagttttctcttgactacttcaatccatatatccacttttcaggcttggattgtcaaaaaggttttctaaaccacggtctgtgcctagtggccacagaagtagatgttcggttgagaaaaccatttcaatacagagaatctagttatgcacacaacctgctagtctattttacatattatttaatgaaattcttacagg

SEQ ID NO: 7877 - DNA, 1086 bp, Cucumis sativus
  Intron number 2 from transcript Cucsa.345950.1 (locus Cucs a.345950) derived from phytozome v7.0 (chr-ID scaffold0344 3; pos 250140 to 251225 reverse strand)
ttcttgttaattctatctacgaatttgagccaaaggttctttgtttctctatcctctctcacactttccctctattttcatttcttcttctcgactgtcatctcttttttcaccacccactaaatcatgcattgctcgcacgtccttttctaaggatagaaaacatactttcctataactatttagcctcttaatattaacttaaaaagaaaaaagttgtttataataaaatcatttttatttaaattccttttgtaaaagtatttaaaatcacctaaaaaagttatttagatgactttcaaaatactcccattttttacaaaattaaacacttgagatccaatccaatctaaatctatactcttaaacactgaattttttaatactttagttcaggaaacctcttaattacaaaagaatatactttcaaatgtctcattttaagtatgttatttttaattaataatttaaatccctctcatgcaaataattttcatatcacaattaattgaatagaatagtaataacaatgattgccatgaaacaaacaaaaatttcaatgtgttgctttatgaatgtctaatatctgttcatttttagtgacatttttttatatttataaatattttgattatttttaaatatatcatgacatgccatacttaactgagtgggaagtgaaaaacaatcttacatttacaagaaacaatcaacacaaacaaagccgaagatatgtctaagcaaacatagttcaacaattgtaagacgactctttttggatttttttaatctacgaaactaaatgaaattgtcgtcgggataattaacgtagcttctcccgacaaccaaacaaccgttaggagaggatgtttttccaaaggatttttatggatcgagaaaaataatcgtaaagaaagctaagtaatttgaaactatcaaacagttatttaatatataacaagagctaaatatgaactatctccattttaagaacaaaaatattaccttttaataattatgtggtacttgaaaacttgaatgaatgatatttaactttgtgttccatcaaaatattacaggaagcag

SEQ ID NO: 7878 - DNA, 882 bp, Cucumis sativus
  Intron number 6 from transcript Cucsa.109520.1 (locus Cucs a.109520) derived from phytozome v7.0 (chr-ID scaffold0093 4; pos 455860 to 456741)
gtcttgggaaagcaagattttaagcatctgctgaagtaagattcacaccctctagatactttcattcaagttttattttattatttctttaaaataattgtaattctgcattttttaaaatgatatttttgttcctataagcataagcattgggtatttttgtagtttagtccttcaactcgtgcgtgatgtaatgtggtttttagatgctggagagggttaattcatgatttctttgcggcttcaaaatttgaaccttttctgttattggtctatgctcatgttttggttgaaggcacacacaaaaataacgaactcgacctgaattcttatggtgttgggccgttgcctttctagcttccgttgaggttgctaattcatttaccttttcaattactttattaactagttttatggattatgattttagatatttattaactactttaggaactatcttcagcttttttataaaattattgtcatgtacccatatatattgctcactccaaaagaacaaagttaactgttttgatgattaacctctattggtaggctcagtagcctttctcgtagtcttcataattcagattggaggtgttacattaatatcataggtgtagagctgtatggggtcattaatagttaggcttatgggtaagtcttattcacattttgttccacctgatgggatcatataggtttggtagagcaatagatttccctcagcctggagcttattccttcaataggaaagcaaacacaccatgaaggttgatatactgtaatggtggttgtgtatgttgaattttaataactatgcaaacaattctttaataacttcaagattttgaattttattttttatcattcttcatgtag

SEQ ID NO: 7879 - DNA, 1166 bp, Cucumis sativus
  Intron number 1 from transcript Cucsa.257400.1 (locus Cucs a.257400) derived from phytozome v7.0 (chr-ID scaffold0222 9; pos 4707325 to 4708490)
ccaacaccaaagagtggattcttcttgagttagatgtacgtgattttttttctttcttttttcttctctctctctctctctctcccccctcccttaattgacggaagtgttgtatggatacttgagaaattcaattagaacgaattattctgcttcgtttttgcggtgaagtgaataattgtgttggtttttcgagcattaaggcagttctgttttggataaaataatgatttgggtggggtggtggggtgttaattttatctttcagatagttttacatgatgggaaacgtacaagatagaagaagaaaatcctagaaattgttaacagaggaattttgaaacgttttctttagttaaaattctgtggtcgtttaaattctaccagcttcctgggaactcggttaaatttttatttcatgagattagttgaggggcgaataagttgcataccaacattcatggatatgttataaaaaatattaaaggaaggtagtgactgtgttggacagaccaaaggattttagattgtgccttggatggaggagtgacttcgaagtagagatgcgactcttaccctcactctttttggacttcaacctttgtgtggatgagtttatggtagttctcctccaccttgataataaagttcatacaatgcagtaaataagcagttctattggagcctttggctaaacctccaaagacatccatttaatgcttctagcagatttctgaggttatttggaaggctcactaatgtctcttcctcagggttcacattcattttccaataagaactgcttttatgttctctatagagcctcttgttggcatgccctaattcctttttaagcatggcgtttatttgttttttttccctttaaagaattaaccttgaatggatggctttcttgtaatggattgttttggggtggggcgccttctattctcaaactctaggatgtattattttcggtgccttatctataaaggagatttattatttcctttgttatatatattgaaaatttttatgttaccctatatctcatctctctgttcatcatgttttcttctgctctttcccttatatttacttgtccaacttgttttgtatcttttttatcaggaaccttgtttattatcacatattcgcatctacaa

SEQ ID NO: 7880 - DNA, 2298 bp, Cucumis sativus
  Intron number 21 from transcript Cucsa.242310.2 (locus Cuc sa.242310) derived from phytozome v7.0 (chr-ID scaffold020 47; pos 2058528 to 2060825 reverse strand)
tacataatcgtcaggtacaaatcctggatggttggcattgccatcagtagtctattacaaagaaaaaaaacattaggctttttcatgacaagaaatgctaagttaaattacttgtcttgtaggattagtcaaataggacacccgatatgcttacagcattttggtctgttcacagacagtttttttttttttggctttcttatgtgtgtgtgtgtgttaagaaacagtacaagcgaagataaatttagtgaaacatcaacatcatacacccatatgattgactcggacataatatctatacgtttaatctaatccactggaaaatgaaaactattcaaaatagttgggaaaaaaaccaacaccttatttataagctttatattaaccttcaagatcaattgttgctttgaagacttgagaggcaaaatcaaactgcgagtatttcctattccatggttttcaatttcttaactcatccgatggtcattcaaaacgtcagtcttcaatgaatgttttttatgactctaataatgaatcacaagtaaactttttgaagtggccattggttcattattcaaagagaaaaatcagtttaatttttttaacagaaagacgtttctgttttgggggatttcaaagagacctagtgatagtaattatctctcttctttttcttcaatgccaggataaaggaaaatttctttcttgattgatgtgcgtggttttcatcaattgagtaaaattattccagcatcagaaacaaatgccagaataatttataatggtctaatttaggagttttggctctgggcgatctttgtttcaaatgtagatcatcctgtggttctcttaaagttgaagcgtttgcttcaaaagatgccaaagttttaagtcttatcttcatccgtctacttagcctttcatttccacaagtagttttgctagtgtaaaactaatttctaatttcttggacacaattacaacctaggtagggacctgtatttaaaggctacaaaccagtctgaaagatttaaacgaactaattaaaacaatttaattaactaaacaaattaactaaaacttaaaaattagaatgtgcaaaaaacggagtcactgaccaataaaaagcagaggaaacgaaacaaaacaaaacagagcacacaacttaatcttttacccaagaggatatttaactaaaaaggaatttaatcctcaacttaattacatcatttgctcttgttatttgtgattgtaaaactgtgttattaaaagtgtcgatacagacgagcaatctcttatttatagaggatgtaggctaactaacaaccaattaaaacattttctcttagttcgaggatgtattgattttcttgagtagagcattgatgtcaaaaaaaatttaagttcatatttctgtttatttcctaactaaaataaaattgcaaaaaatgggacaccaatgctctagccattttcaccacctaatccaccgcctttgcttacacctggttttgctcctgctctcaatgatgggcctgttattagctgggacaaagtttgcgatgcacttctgatgcttgttcaggaaacaaagttagatggcattgactctcttatgggctgctcttgacgctattgactcttctgaatgcattcttatcctatggagggcacctgatttcactatctaggaggttatacatggtagatacactgtttccattcacacaattttggctgatggtttttccctttggatttagacggtatatgggcctccttctcatggttataatgctgattattggcactgatggatctctgaggaactgatctggttgaaagagaaggaacttgaatctgtgtgcaattaacctccaaagaattgggattttgatctaaaatcaatcctgccctgtgttcttccctatagttacctttgagtgtctttgggctttgtcctttatgtcattgtatcaatgaaacgtttctatttctagaaacacaattgcaaaaatagccttcaaatagtatgtgctacatcaactattagtttgtgctatctcttagaatagtttctttgcacaaattgaggagagaatgatcctttagattggttgaaatatatatgtcaattctatgtaagtgttgctgttgcttttgtttgcctgtactatgtgcaactgtagttgcttgagattgatttgtaaaatgatggtgatatgcattggttgatgcttgtatgcggttttctgcattctaggttgttcattttcgaactcttgaaaaacccaagga

SEQ ID NO: 7881 - DNA, 3220 bp, Cucumis sativus
  Intron number 1 from transcript Cucsa.095530.1 (locus Cucs a.095530) derived from phytozome v7.0 (chr-ID scaffold0091 9; pos 1388557 to 1391776)
agcaggtcacactggaagaagggcttaagaagtgagttttttcccctttttgtttttgatgtatggtttttagcttcttgcgtttatggaagttgcttgaattaagcgatttggttgattttttttcttcttccatggaggaaattgattttgtacttcttgttcaagctcttttccctttaatttccagcaattttcatttttaaatggttagattacgagattggttcctcggagttgtgttttacaaggccctgaatgtgtctagtaagtccacaaggcttttggggtttgtacttgacgaacaatttttacactttttctctccgtctcttaaaattcctcttttgaacattccctaagcataccggctatatttatggaccgagctggtttttatccagctgtgaaaatatatgagattatttgtagctaacgatttatgtgtgtatgtggaatttgaccttttgaagtctcaggtcagaactaatagcatctcgctgttcttttccattatttgcctgttatctgaatttcaccacatcggcatctgataatagtcatgtctgttgcttttttttaatcaatgttttcttagttgattttatttcttcaatttctcttggctcagttttcaaccgcacaaagatgttcaagtttctattgagggatggcctttgtttttaatgtgaaggccaaagttgtgtgatttaaaactaagttttacgttacaggaaagaaaggaatccatatgcttaggaaaaagcttggatgctatcataaagagttttatttgacttatgattgtaaactggattcagccttatagggatatctaaggtgtttttgaaagctaaaaggtgcaaccgcttcagatttgatatgtgcagaaacaataccatttactgttttctcttaaatgagccataatgtgattggtttggaagttaaaaaatatctatgccaatgtttcaaagtcattttttttttaatctttaattttacgaaaacatgcctcttcattaaaaatgaaatgagactaatgctcaaagtacaaaagaattatataaaggacataaaaaactaaggattagaggcacacttagacatctcaaatgacaccccctagtgtccacatcatttctgaacaaacgaacaaagactaaataacatctcaagctaaggaagaactacaacaaaatgatacatcataagaccaaaataaaacaagcagtacaaaacccttgactatgtgaggacaaatgcaaaagagactcaaagcaaaataacttgatgagctctgattcgtaggtgctacactccttttttgtgtcctttacccaagtgtttatgacgtagattgttctaaagaaagatcagtgacggtggtgtaggatcctagctgcttaaatcgaaaacttgagaagaaacttaaagtatcggaaatttgatgaatggatgcttttcattgaaatattggtacaagtctactgatcctcttgaatttacgttaatttggaacttggaaaagatatctctacactagttaaagttgcaagtcggtcctttatcataaacaatagtggaaggttggagaaggagctagaaaatcagatttggagattagttcacaaaaagaaaccaaccagtaggtaaaactaactaactgtcaaataactaatgactaacaattaatttcaactcctacatccaaaagtgaaggttcttttattgtctccctccctcatagaaaaatataaacatacaagacaagatactaggaagaaatccccatttttctcttctcctgcaaatgtgtatgaacctgcttgcataaggaatttacccgagcctcttgttggaaatgacttcctacttgagaactctgtttatatctagatctagggttggcaaggaaatgttaggtaaactatgtgggaaattagtccagacaattattcttgcaccttaaaccactatgagttgacctaatggtcaatcctataactattttatagatgttattttcatagttggagtctcttttcacaaagggccccccctttttgtgggattatttttctttgcatgcccttgtattttttcatattttctatcgattccatttagaaaagagccataaatataataaaggagttagatggaatgagttcaaggcatgatggccctccacttaggatttaatatcttgaaatgtagcatggttaggtggttgtctcatgataataggcatggtttgtgcaagtttcctcaactcgcacaaatataaagagaaagatcttgcctttgtagatctagtgtggccaaaacaagcacaagaagattctaacttaacgttctaccatttaattggtaaaatgagttctacttgaatttcgtatatctctcttgtacaatgagcttttgtctcattatatctttattaataaagagacacatatccttttcaaaaaaaaaaaggttctacttgaatattttgtgctcttggctcctggaattatgagaccatgcttcctatgaatcctcgtatgactttgaggatccctaagatgtttttcatttgttaaaagccattctcaaagttgctgtccaaaaggattctgttgatgtgtatctggagagtgtgtcgtgaagataagtccacctcatttctcgactctgcaaccttgcatgaattatggctttgatcaaatcctccgcaattgagagaccttggtgctttagttattttgggagagggaattcctgcctctctaggctgtttttttttgtgattaacatttattcctgtttcttgttagaaaaaaagaaaaaggaaaaatgaagaacagttaaagtttctaataatttaatgaacttctaagttctaactgctaggaaattgtttcagacaccagactgtgaagatgaagctgcctcttggctaaaactctatcttggaggcttcttttcttttatttttccatcttcctttcttcctctcttcattttctaatgtttcttaaaggggacaaaaggtcatacttgaacagttttttttttaagataggtcatacttgaacagttgaactgctgccttctgtgcattgttttattatcattactttcctattgtccttttaacctaactaaccttcttatcatatttttggtggtccagttttttagtgaatgatgttagtttggtttatacacagat

SEQ ID NO: 7882 - DNA, 3171 bp, Cucumis sativus
  Intron number 3 from transcript Cucsa.142170.1 (locus Cucs a.142170) derived from phytozome v7.0 (chr-ID scaffold0107 9; pos 467543 to 470713 reverse strand)
cgaggtatgctccctgcttgactttgtctctttgttgagatcgtaatcatttgatttcacccctactgttataaaaaaggtaagctagtccctactccttcgtcgtcgttggcccttttgacataacattctcggctgcctatggtccatagaaaagaaacctgtagagattgaatggattatcccaaacctacctacaccacgacaaaatcatttgtgatggccttgtctaggtggattggggtgcctgtttctatttttacttcctttttttattactttctatttttttagttgttggattctagatctagttttagtttcaaagtctttggcaaaaaagcattcaggcagcttccacaatgagtggtgagcttagttacgcttagttcatgttggtcccaacctagggtttaatctgtctccttccagataggggaagggctgtccaaccagaaagtaggatgagttagcgtccaataatgagttccatccttgaattaggaaagttcttcatcaatacaactcgattggactttatttcacccatttttccacgttgctccttggaaagcttcagttgtattaattcttttcttcaatgccaaagctgatgattagttgaatttaaatacagatttcaactatcccacttctgatcctcctgttctgctctgtgcagtgttagtagttagtattaggctttgaacctgttgtgttttgggtttctctattctttggatgattgatcaagcttcttcaaagtcaatttcttgtttatctatcaaagaaatggtttagtttcatgccatctttgtcatgttgttacttgagtcgattattctattcaacatcaattggatgaatacatttggaggagtttgttgaaattaagtcatccatgattttagattgaattcacttgcttgcataatcagaagcgggttatgttatataggtttgaagagggaaagagagtatgaaaaagaaccataagaacctggtctagttgccaaacttgtatgccatatggtttgggattcaagttttcaagactcttgtgtctggcaacgcgatcaacagttaagttacctattaccaagactctgggagtcattcaggatggtgtaggtgctgtttgtcattttagttcagttagaagcgcatggttcttcattcctacctaaacagataattttttgtctcctctaaagcatctctcttattttttttagaaaacaattttagaagaaacctcaaaaagagtttattctatcaaagtcaaatttattcttggttaatgatctattctcctttgggaggatgtgcatgctattactatgagggcctgaggggtatttatttcccccttcccaaatctttacatctgtctctaagtaaaataaccaccgatgtaatattagaatatttagagttcttggatctcaattttggaagaaattaaagaatagtatccgaatgacatccatgtgtgaaagttgcttcccccttgaatttgagaagtagatcttggaaagggccagagttgttcagttagaaacacatgtctctattggagatcactgactagagccaaactatgcagaggatctcttttcagagcttcaccatggtgtttgtccaaactttttcctcttgtgctttgtttgatgttaggttttgcatagaaattatttgaaattgtatgatttaaaatgatggaaattatttcaaaatcctatttacgtttggaaccaaactcatttcagatcagagaaattaaattttattgtttgggtattaattctccgtggctgcatcaataccaattctccataggcggtaggattttaggtttttgtttattttgttttcttttggtctaaacccaatttccaagttttcattaagaacaataatatacatcttgtaccctttgcccctcgccgtttttgtctaacaccatcgtcacagcaggatttcttggataaaaaaaataagaagaagaaaacttccatatttagtttatattaccagatctattttctaatattttagattccctttcttgatcgatttatttatttttgttttgtttgtatagatcaggtttatgctcaattagatgggatgagtttgaagaagccatagatgcatataggacgtagaaacatgagggtaaaattggaaaattgtttttcaaggactaaaatcttgacaaatccgaccattttgatatggaaatatttttggaaaaaaacaaattttgaaatctgttatgattttaaattctttgattttcttttgcaatcaaatacttgatttcattttaaatcagaacggatttcaaatctttccaaattctgaggttccaaacaggggtttagtgattgccaattgaaatcaaatcaaacacacatcagcaccagtattgttgccaatttaagagccttcatgtagcttccttggttttgtttgagagctagccgttcccttctattctttcatttataaattttgttttgtttttttataaatgaaaacaaaaatttccctaaagtaacgaaaagttacgaagtgcagtgttctgttcaggagtatccatagatcttccttacaatcaatagaattgagaattataaatagcccttcagaaaattaaaaagagcacctcacttaggaaaaagatttacacatacatctcattctctacaaaacaaattcaacaaaaccatctagaaatacacttgactattcatttatttgagaaatatgaaacattttcttaaatcaccgaatcttcaattgaccaaaaaacttaatttgtgggtttgaaatatgaagaagactcaataagtggaaatgagaggtaacaatattgcacaagaccacctcgaccacaatgctctgataccatcttaaattaccgattgatccaaaaccaaaatgacgacaactgttatgtcaagtcaatcaatgatttaagatatggagaacagatttcgaagatacgattgctatttgccttgtttatatttttgttcagtcctattcttctttgttttgttttgtttttccttctatttttgtgcatgtaaaattagcctcaaattttaagaattgctcttctctgcaggaccaagaagatttctgtttcgccatacattgggt

SEQ ID NO: 7883 - DNA, 5862 bp, Cucumis sativus
  Intron number 5 from transcript Cucsa.145090.1 (locus Cucs a.145090) derived from phytozome v7.0 (chr-ID scaffold0108 3; pos 104169 to 110030 reverse strand)
tattcataaaggattgcaatttggaaaagtttctggtaagaatagaaaatctgtaggaatcctaacaaaactccatgttgagcattgttttggtatgggatactccaaacacttgatttgagcttgattttaaaatttatttcattattgttagagttagtgtgcttaagcccaaggaaagattatgtaagaaccccaattatccatacctataggaggaagggtagaaaggtaactgcacaggacaatattatggaggaatgattggaaggaagatcgtgctgggtagggcccattgggctgagaaataggtgagcctataaataggattattaggtatggagtagctaggtatattttatcttttaaaaggtagggctgcagcagccgcaagggtctcttaaatcaaggaggccggtatgttcttttcttgattttccttgtgttctttgttgtttcttttcatcttgtgacgttgtaagcatttggctatatataaataaagtaaaccagggcaccgcctctgtttaagccatttttacagtattttcggtctaaatcagtgtatcctaacagattaactctaatattccttctttacattaagcgtgttgtctatttattttcccctattgtaccttttatatatgagaaaatattaagaaagtcagatcgtgatttttctcccggtcctatggtttccacctaactcagtgtcatattttcatttactgctttcaatatggtattagagcggggtaaagacgaaaccctagacaccaatatagatggaacccaaatagagactaaacacatgacatccgttgctgtcgtcgagatcaatgccaccgtcgctgccaccatcaccatggaaaaactattccactagcttcagacgttgctggtgagtagtcttgacccctagtgaaagattccaaccgcaagtgccaagcaagtttgcccatgcaccgttgctaccaagcgcatctgtccatgttctactgtctatcttctctaatgctcagtgggcctactcccaatcggtctcctctgtctagtcgcataacccttttggttagctgtcgattcatgcgccaccaaccctaaatcacgcgccactgctgccaaggtcatacatctacatgccgccactgccctcttttcacacaccgctaccttttgacttgttatagcagtcatacatacgtggtctctgaattgatcagctccatactaaatcagggtttgaagttgccaaaccctccaaggtttgaagcacagtttgattatcgggtttgcgaactttagaaatccttgtatgggctgaagcagtcaccaagagcatggttaagtttactatctttgtcaagtcccaaggatatagtcagaggcactttggtcacactttgtttacaataatctccaaggttgggaaaatcactgtgttgattgtctatgctgatgacattgtattctctaaagatgacatcgtcgagttcatccaattgaaaaagaagatgggtgatgactttgaaattaaagacttggaaaatctgaagtatttccttgagatggaggtagctagatcaaaagaaggtatctccgtatctcaaaggaagtatacctttatttgctaactgaaacaagtatgctgggatgtcatcctgctgatactcctattgagttcaattgtaaattgggaaattcagatgatagagttccaattaataaagaaaaatatcagtggcttgtgggaaagtgttagaccacctattattctgcaatatagtagaaagggaaagacaggaataacacgtgtaaagaggaacctagacaatgagaagagggaccacagtgggacccaaggcagttagagtcattgtgtctattataaatagaatttcagtaggagggaagggcatatgtgcattttggtgagaattctgtttcatccttaagagaaaggataacaggggtgagagagagtttctttgaattttcaattcctagtttctcaaattgatctcttcatcaattcgatagtgtaattcattcatcgtttatattgaataagaacattttattaccgtgatcgtttacatttttcggactccatcatattggcatcaaagcttttttctctaggaaatcgaaagaggatggcgcagaagcgaattgaagaaaaattatagatgttcgaccaagaaatattaggaattcgaatggaattgcacaaattaccaaccattgaagaaaacttcacgtccttagcaaaaagtattgagatactggaaatgcaagccgagaaacaacaactgttgttgaagtacgttgaaaacacatcaaaggaaaagtcagcgatgagcgaaggaataataggatttggaggccaagggtcaacggtgacgaaaatgatggaagaaggtagtactccaataaaagaaattggaagcgaaagacgatcgaagaaaatcgaaatcaaagataatccgagtgatggaagcaagttcaagaaggtagaaatgccagttgatcccgattcatggctatttagagcagattggtattttgaaatacacaaacctgattcagagaagatgatgtggcagtcattagctttgattgagcagcgttagattggtacaggttgcaagaagaacacgatgagtttaaagactgggcggacttaaagcagaggttgttggtgaaattctaatcagtcaggtaaggttcaatttgcggaagattctaagcaatccaacaggagtcaattgtggaagaatatcgaaatctttttgataaattagtggcgccattactgcgattaccgaaacaggttttggaagaaacttttatgaatgggctcactccatggattaaggccaacgttgaatgctaggaactggttgggctagcacaaatgatgaaattagcccaaagagtagaaaatcgggaaatcacacgaagagaggcaaatttaaaggagaatcctgaaggtaagtatccatccaactatttgaataatagtaaatctgttaatttgataagactggaaatatatttcctaatgagaacaattaccctaagaggggtggcggttggagaaaatcgacgggaaggtctagtgaaacagctttttgatgctgaatttcaagctcgaaaagaaaatgaattatgctttcgttgtgatgaaaaatataacttcgggcacaaatgtaaagccaaagaacagagagaattacgaatgtttgtagtgcgagagaataataaagaagtggaagttatagaggatgattttgagaggaagaagagatgaattcgttggggatagaggaagaagttagatcaattgtagagttgtctataaactttgtagttggtttatccaatctgggaaccatgaaagtgaaaaggaggattaagggcaaagaagtgatcgtgttaattgactgtggagctactcacaatttcatatccaagaagatgttttgaccttgtagttgccaacgaaggaaacctctaactatagggttatattggggtcagagactcctataaaaggaaaaggagtatgtgaagcagtagaacttatgaatggaaagtagtggagagctttttgcctttggagcttggggaagtagatgtcattttagggatgcaatggttatattcattgggtgttacaaaaatggattggaagaatcttactacgatgttctatcatgagtgaataacaaagtagtcataagagaggatccaagcctaaggccagagtaagtttgaaaggcatgatgaaaacttggtcggattttgatcaaggatttctgatggaatgtagagctctagagggaggaatgaccttggcaaaactatatggggtagatgcgtgccaaccatacaagagtccattccagcaatattagcaaaatttgaagacgtgtttgaatgaccagaagaattaccttcgaggagggaaattgaacattgcatccacttgaagaatggtacagacctagggagtgtaagaccctacaaatacgtgtatcaatagaaggctaaaatggagaagtaagtggacaaaatgttgacttctggggtaatttgcccaagtaccagtccctattcaagtctagtgttgttagtaaaagagaaagatggaaactagaggttctgtgtcgattacagggctttgaacaatgttacaattccggattagtttcctattctggtaattgaaaagttgattgataaactaaatggtgcaacttttgttttcgaaaattgatttgaaagcctgatatcattaaattaggatgttcacagatgatatagagaaaaccacattacgaacttttagtcatactctttggttgactaatgccccttccacattccaatcattaatgaatactatcttcagatcctatttgaggaggtttgtattggtgtttttcgatgacatattgatatacaatagaagcttggaagagcatttgtagcattcggagttggtgttggagatattgagagaatatgaactatatgcaaaaaagaagaaatgtagttttgcacgatcgacagtagaatacttagggcacataatatcaggaaaaagagtggaggtcaggaaatttagccttgattacatccgcttactccgatgtcgcatcctctagaaggctattgtcccactaactcaacacttccaagctggttccatttgtagaagatgtgtgcaaacccaggacagccaaagaggaacttggaatatgtctatcatcagccacaatttttggaataggaaaaattggtctattagagtccagaaacgcgaaatattggatgaatggttgtggtaaggccaacccatatgccacatgaccaatgcgagcagccaccagaaatggaccaatgaattgtggagcaagtttaggatgggtgtagtggccaatagcgattggagataaggacgaagtttgacatatatccaatcattgacctcaaaactgcatgttccgtcatttagaactggcgtactttagcattctttgctgggccttcatcaaattcttcttcaaaacagtgagcataacatccctctccttagtgtcctttagaagatgatcaatttcattcatcgggctggatcccttgtcatatggaatggagggaggtgggcagtcatagagcacctcaaaaggagtcatacgaatggtggtgtgataagcggtgttatagcttacttacaccattgttttggggtccccatggcgaagcagtgcaaataagtcgcaaagaaaagcctcaaagaagtcaaacccaactgcccgaaaaccaattcgatctcaatccctgagatagtttagattacagattatgtagatgatcaaatgaactaaggataggacaatgtttgtgctcccatcaatctttggtcctcaaaacactccacaagataaatcaattcagttcatgaaagctccaaatattcatgcattctatcacaagaacacacaaaacacaaagcttgaaagctttcaaggtttaaaaccatccatatcaccctacaaattacgtagtttcttgtagcctcaaaatacaatttatatattctatgaggcatttccaaggttgaactttctaaatttatggccataatcaggtgtgtaacgtaaaaaggaaataaaatgacttaaaacagaaaattcaaataagaaacaccataaatatgaaattctttgcttttaatcacctgtctaagaatttgtaaccgttcgttagtcatgaagccccgttgttccttaaatgaagcttgattattcttcagggcaagcacagagcattcttgtagctgaaagggtg

SEQ ID NO: 7884 - DNA, 5959 bp, Cucumis sativus
  Intron number 6 from transcript Cucsa.364950.1 (locus Cucs a.364950) derived from phytozome v7.0 (chr-ID scaffold0361 1; pos 2424677 to 2430635 reverse strand)
caggtaagcactattggacatggttactatacttgatcttggttgtttgacttgctaaaattgtatactttactggcgtctttaacaaaattttatttttccttcattaattattattatatttttttgtttcgtccatcttcaggttgttcatgacattcttatgctggataaccacttcactaatattgagattatgtccttttattttcatggtttttccttttgttttttgttctattgacctgattttgtgttaggaaaagcttttgcttcgtagatggaaaagtaggaaatttttgtataatagatcgtgcctacagattttggaaaagaactcgtgatggtgacagtttgagatcgctacaatatgatctcaagagtttgtcatctaagttaggtggcatgtggtatgaccacttaaatatatgcatttatcaaatttattattgttagaaatagtgggcttgggccttgatgaaatcccatggatagttaagatttactttgtcctattttttttattcttttaattaggctcatgttgcctgtaaatttttccctttttgtacctttatgattatcagaaaataacaagaaacatatatattgtggtttttcttcatgtactagggttccacgtatatcttgtgttctttcttcgtctttatttttcaatatggatcagagcgggatatcgatgaaaccctagatgacttgacacttgatggatgtcaaacgggggagacaactatcgggattagtgtcgccgtcgatgctggatcgcaactgcaatggaggagctgtttcgttgcctacataacccaccgaccaacccttcccttcagtcgcaactttcaaccagctcccttcctcagccgcacagtctacatgtgctgctgccaatccccacatgccgttgctacctctgcacgcaccaccaatcagtgacctccagttgcaaacccatgtccagctgccacccactgtttctgctgctcacattcattcaacctttgagggtggtgagtcttcaacacaatcaaatcctcacgtcctcacatataggtttcctttcttggaatagcctagcaacaatcggacatgcttcgacaactaattgcagatcattaggattgcactcaatccaaatgggtcagtttcagatcattaggactcttctaccagcttttggtccatttatttcagaagattgcttaatgatgagaaaatattggactttcggtccttgttaattcagatctcctcttgacagccagtctccttttcaaattgaaggttttggtcccttgaaacctcagatgtcttcttggtaaaatcattggttaacatctttcaacatcttctcctttgaatagttctttgtacaataggctttggcaatttgtccaagaagggtaaatatctccgtatggattatgctgtttggaaaattaaactgtgtttcagtacttcaaagaaagcttccctcccatgtcctctcacctcatgtctgccccctttgtgttgataacatgaaaaatatccagcaccttttaattaacagtgtctttgcatctaaatgtttggttccgccttctttaagcattcgatatttgttgggatttttatcatgattttaagaacaatgtgacttaaattcttgccggtccagccttgaagaagaagacaactgatttgttttgggtaaacacagtaaaagccttcctatttagaatctagtttgaaagaaaccaaaatgttttccatgataaaccatcgacttggatggagtgttatgattctgctcatttgaacacatcttcacggtgtttattatccaaatattttcaggattacttttcgcaggaaattgtgttaaattggccaacctttatagcctccccaccttgaagtcctagatcatcatgccttatggatcaaccctttgcttcaactagttttttgctcaatcaaggattatttttctctgttctcggcctgcttcctatgatttatgattttgttttggacagattattttatcattttgtttggccttttatttgtggcattttgatttgatcttgtattgaaattaggaacctattgctctttgtataaccctcatgtacattgatctttgtctctctatttttcaatattaataattgtgacttgtatacttaaaaaaaaagacaacaaattgcaaatattaaagcaacattgggggccacttcctcctgttttagccccgacattcataaagtcccaccagtgtattctaagagtccggtagcatcattcccttctttatcctcaccccctatgtgtctaatacagtggcacaatctacataatatttttaagaggaaaagctgaatggccaaaattattttttcatggtccaaatctatcaaaatgattcttgaagggcaccacaagtttggctttttgacaggtatatctcgtcctccattggtagacccttaggaatggtactaaaagggggatgattctcttatccggtcctcattgattaatagtatggaaccacagaccgacaagcccttgctgtatgctgcaattgccaaggatatttgggacatgactaaaaaattgcattccaagtgtcataatgcctctcgtttatacacggcaaaaataggttcacgaatgcaaatacggacaatggatgtgacatcattttttagcagactttcccttatctggtaggaaatgaacctatggagagaagttgtttgttattgtcttagtgatgtcatacaacactccaggatgtaggaggttgacaagatttatgctttccttactggtctcaaccctaagtttgatattgtccgcgggcgtatactgggccagagacctataccctccttgatctgaggtttgccttgagaaggatcgtactagtgctacggatagtctgacgacccctgctattgattccgctgccttctgtgcaaagtcccctagtcatgacagtgagagacacaacgggaaaccaatccctatctgtgagcattgcaagaaacagtggcatacaaggagtagtgttggaagttacatggttgtctccctggaggtaagagacgctctaacaatgacaaacagaacctgaggcaggcttatgtcagtaagtctgccagcccctctcaagcatctggggatctttagtttcagtctgcttagttgtcgttattgttttacaacattgtattttgttttgcttggatttggtttttgctgccccttgctcgtttttctgattttgtatttttgggcctttttatttggtgtggtcaatctcttgtatctttctttgatggttttatttttgttttttggcaaatatgatgagttggggtgtcaactttgttgagatattcgagtgtgctttctgttccttagtctcttctttgttttggtgctctatgtatatctctcttgactttaagcattagtcttgatttcttaataataatttagaaaaaagtatatttcttattcatgtagaatcaaagtaaagttacatgtatataatatatatagataacaaataatctaagtgttgtctccaaattgtaaaatagaaaaaattctttggagaggcctttagcgtgaagtcttgcttttaaagagctcaatacgtcactaacaagaaggaacgaaaagggtgagaggggatccccttgacgaattgcccccctttttatctttttcatgaaatggaaacgaaaaatttcattgattatgaaaaaagctcggccttggaggcctcaaaattcataattctgccttgctagcaaaatgggactggagatttgctatggaagattctgccttttggagaaaaattatttgtagcatccacagtaaaaagccttttgatttgttcacaatggaaaagtctagaaatagtttaaggagcccatggattagcatctcaaaggtgtggaggttggtggaatctctagcattaactgaacttggtaatggtagtagaacaagtttttggtcagacacctgggttggaacctcaccactgaaaggcctttttcccaactttacagaatagccttacttccccaaggctcggttgccgatcattggaattttgctaccctctcttggtccctaccatttagaagaagtttaaaagatgctgaaattgtcgaatttgaataattactccctcttctcttagatgaacaagttcttgatttcgaagatcacaaggtttggtctattgaccccatggctggtttacggttaaagccttatggaagtcctcaagcccccggagagttaatgttctgatttgggtccctcaacagtgctgatatacttcaaaagaaggcctccaacaagtgctttcttccctcagtttgccccctctatttgaaagctaatgagacttcactcatttgttcttattttgccctttcgcctctttttgctggaacagatttttctccatcttcaacattgtttgggtttttgatggctctatttgctcctcgattcttcagtttctagagggccctccattctccaagaagccaagactattatggttcaatttgctaaaagctatcgtctccaaattgtggtttgaaagaaatcagaggatattccacgacaaagaaaaaccatgttcataaatcctctctgcaaaaagaagtgcagcagcttgggttttcttgaacaatgagttcgtggcttactctattcaagatatttatctcaactgggcagttttcctatcccatccagccacttaattttcatccagcattgtttccagccccatttttgtatctctcagtagctgtatttttgcttctgtctttacatcatcttgttactctttttttctagtcttggcctatgttaatttgctggactttcaaattttattttctgtgcttagttcatgcttagttatgggaaatgatgttttggtgctaaggaggtgtcaacctagttgagatgtctgggtgcaccttctgatcccctggggctttttggtttatgcttctttatttttctcattgtatatacctcttgtactttgtgattttatcattaataaaaaagttcgtctccttttcaaaaaaaatgaaaaaagtgtacaaagtacaacaataatattaggatcgacaagtgcatccagacatctcaactaggttgacacccactgtagcttgaatctggccccttggtcttccattgatgaagatggagaattttggatgggtgacacacccatcatctatgctatccaattttggatcaaagtttttgtcgatcaggagtttttaatgatagtccaatctgctcgatcaaacgacttttacatgctaatttgaggatccatcattttttccttttggacctataatcctcatctactttatttgctataagaatgggatctaaaatttgtcttccttctatgaatgcactttgggtgggggttataatggtattcataatcttcttgagacgatgttggtttgcttttttctccctttgttatagctcgttctcttggtttcattgtttttgttttggcctttttgttcgttattatctcgttgtgtttcatctcttttctttgtactttgagctttagtttaactcattatatccatgaaaatacttgtttccgtctaaaaaaaagagagaagtaaatttgctagacatatatgaaggaagagaatggaagtatgatataaaaaccctgttataaaagtaacaaatagccttgtaatagataaataattgacttctcacgtacacattttttggttgatgtaaggttgatagtttctttatgcttgattcaatggttggtagttactttatgcaccttgactgctcagttgttgagcaacgctattcgtttacttgaaagaattttttttcctgcagc

SEQ ID NO: 7885 - DNA, 6616 bp, Cucumis sativus
  Intron number 3 from transcript Cucsa.078440.1 (locus Cucs a.078440) derived from phytozome v7.0 (chr-ID scaffold0079 3; pos 779949 to 786564)
gattcagggttagttttatcctgctggtcttagttaattcattgcttgatttctgttcaaatatgtctagcatggttatgtaacattgcatgtggatgtccatctgtgtggccttagctacttgattcgggcagtagagaagcatagcatcccttgcgatctatagcaaatttctgttgaaatgagaagtgaagatattggagagtatttaatttattgggaaaagaaaactgaaaatttgttttctgttgagaggatgctgtatagatcctccttactatgtattgatatgagataaaacagccttgggagaatacaaactctccaggcaattcaagagagctgggaaactatcctctctccttagaaactactatgactaaaagcattccccttcccaatattttaaaagaattaaggggcaacctagaggcgttttctcctggtgaggcaaggtgtaaacctctaggcagtgtgagccatatttctaattaagaaaacatatttaaattataaaacataagatctcatatattcttaacattatagtatatttcctattagttcactacatacaaaaaatttaatcttgacaaaaaaaatctcaattgttcatctaaatctcatccacaatataattatcattaacagtaatgggatcttccatagagttatcaccgtacctaatagtttcatcctcatttttttgtcactctcaatatctaacccattcctctttgtccaatgtcatcaatctcttccctttatctgtttatgaaatatattttgtaaattaaagttaggactgagtgaatataggaaacttgttaaattttaaaattatttcaataagttacatatctccacttttaacatttggttgtctagtcataaacattgatgttagaatcatcatcatgctcaaccaagaaatcaactgtagccgaatattattttgattttcaacaatccacacatcattaggtgacacttcatctactaccaatggatcaacttcttccatgagaccctttcacttctagtgtctattctttgatggctaagacgtttgtttgccctatccccaaaaaaggaaaatgtgactaggatgaaagattttggaccgatcaacttaattactagtgtgtatacgattctcatgaaagtgtgggtaaaccgcttgaagagggtgctttctcctttggttggggacttctgtttctttcttctttggtttggttggggaattctatttctttctcctttgcgttctgttaactgttgtcgaataggaaaatgccttaggtagcctatcttctctccttgattgagggtttggactttaggcttgggagaagggatcttcatgtttggagtcctacccctttggagggattctcttgtaagtcgttcttaggaattttattggatccttcttttattgaagtcagtctttggcgtattatggaggatttaggactccaaagaaagtcaagttcttttttggcaagttttccttggttatgtcaacacggtggataaacttttgagaaagatgcctttgttcatgagtccttttagttgtcttctttgatgaaaggcagaggaaaacttcgatcatcttttcttggagtgtcattttgcaatatctgtgtggcatggcttctttcaagagtgtgattttgcacttgctcgttagaggggtgttcgtttgatgatcaaggagttcctcctccatttgcctttaactttgaaaggcaattttatttggtttgctggggtgtgcatgttgttgtgggatcttggggaagaggaagaatagagtatttcatggtcagaagaggaaccctaacgaagtttggtctttggtgagctttcatgtttctctttgggttcagtttctaagactttttacctaggcaatatcttacttagttggaaaccttttctttggtgacttttttccttttgtggtatttttttttgtatgcttttgtattttaatttttttttttgcgaaattattttaaatgacaacttttgaaaatatttacaaatatagaaaaatatcacaatctatttgtactatcaatgtttatcattattaagatatatacagattgtagtctatcgcggtccatcgtagatagactgtgatattttgttatattttgtaatatttgaaaataagatctttttttcctcaataaaatggaaaattaacaagcaaggagaagacacaaatgacctctttattaaatgcttttagtcatggttatattcaatagaaaatcaatgaattttttgtgacaaagaaagatctttgagttttgtggatgttaaacggtgagaaagagaacactaggtttatgtggaaaaccctagaacagggagaaaagaccatgacagatagtcactttttattattttcacacaatgaaagttacaagataaataatacgaaaaaggaaataaactagggtaaattaaaatactaaaataccctcgaggctataaactatcaacaaaggcccttatttctaacactttcctttgagttggggcatagatgtcaatcagactcaacttactaacacgagtcaaaacttggcttaagtaaccctttgatgagaacattaccaacttgttgacaagatggaatatacggaatacaaatattgccattgtccagtttcttttttataaattgtgttaatctccacatgtttcgttctatcatgttgtacaggattattggctatatttatagccactttattatcacaatagagcttcataggtaaaacactatcttggtgaagattagacaattttcttcaaccagatttgtttatagatttccaaactgatagctctttattcaactttagcactgcttctagcaacaaactttgctttttacttctccaagtaactaggttaccccactctaaggtacaataccagaagtagatttttttgtcaataactgatcctggccaatcaaagttgatataagcctcaatattctgatttatactttagattgaacacctacttgcacccaactacttaggaagagcacaaaggtcccacgtattattctttttcaagagctccctttcttccatgtactgcatttcctttatgagattcttcctttagtaagttatcccagggatttgtttagtgggtagaacagtgtcatggacactcagtatgggaatgatgggaatgaaggtcagtggggacttaaaatgtggacaagttagtctcttctcttgtactctcccctaaagaaaggttgatcctcaaggagtgttacatccatgaccatggagatggagtattttcgggaagaaggatggaaacatttataagttcgctggtgaaggggattcccgacgaagacacatttctgagcacaaagggtaaacttagtttgagttggagaacatgggaaggaattcaattaataagatgagttgcagtgagaactgcatcctgtatgatggaagcaaagtatacaacgcatgagagaccgtgcaaccttgaggaggtgatgattttccttttagccacccattttgttgaggggtataggcacacaagtttttgtggataatgcctttggaaaacagaaagtcacgaatggtattattaaggaactcacaactgttatttctatgaagaatagtaatttttgtgtcgaacaacgtcttaatggtagtttaaaattgttgaaatatcgttgaaacctcatatttatcagtgatgagaaaaacccatgtgagacgggtaggatcattaataaaggttacaaaccaatgttttcccttacaaactattatccttactcgagggacctgaaacgtcactatgaataatggtgaagggttgagaaggtttgtaaggttgagacgaaaaggtgaccttatgcacggatgtacacatcataagacagaaaagagacaaactttatttaataaatgaggaattaaatatttcatattggaaattttggtgaccaaggcgaaaatgctacaacgtataatctttttatgaagttgagaaacaagaagacaacaaactagtcctataaacatttcttaaagggagcatcatcatcaaggaaattaagtcccctattgagctgggcaatgccagtcatcttcctcgagctcaactcctaaaagaaaacattatctggtgagaaggcaacttgataattcagatctctagttatcttactaataaatagtaaattgtaaattattttgggtaaatgcagtacattttgtaaagttaaatcatcaaaaggagaaatatgacgtttgcctacaataggagcgaaggacacatatgcaattcaaatctttcattaccagcactcagaagatattttaaggatctagtcaaatgatctctgaatcaagtatccatggttgttaccatttatgatgagatgaggagtcttaaggattgagaggtacttaccagggtcactttggcaatttacctaaggttgtgactagggggcactcaccaattcacttataagagcttgactagagttggacttgtcatttgaaagatgtcttctgccatttggtggtctaccatgtaacttcctataccagggtttcttacagcattcacacaccgaggtctgtttccccattttgcttatcactgtcagagccagatatctcgagcagtcgtaacatacaacagtggttttcctatctgagatttcatactattattcaacaatatgattgaagcagggagtcttcacctttccaaatgcgctcctgtggatcccctagtctaggtcttggtatctcaaacttgtgacgccactcaaggcccattttcatggattgagacgaggagaaataattctgatcattcaaattttctcctgcaattaactctgtggaatttcccatagagctagacaaacagtttgctgtaattatagtagggaaagaggttactggattctaaacacacgtaggtcgaaagaaatgtcaaaattcattgtactggaatttatgtttgtggaagcacctagggctgtcccaggagcagcaatttgttgctgaaaacttgtttgaagattagccaattgttgtaccattaatcggagataaaccaaccaaaccttgatgttcatgactaggcgacgcaaggtgaggaagaactggtttctgtaagaagcttgttgctgcggcaagggatttacccttgtggtaggtggacaactcactaattgcggtttaacggtgtatgttttagctagggtttccatcaaagagttatggtggcgctagagttgggcggatatgcaaggactaaagacaacgatcaatgatggcttggacaacagcggtaatgtcgatggtgaaaaagttggtggctttgatggcgatcgtcagaggcccattgccagctatgacagctgcgagattgttgcaaaagtaaggttatcttgcactggttggttccgttgatgacaactatggtattgtacctctctaataccatgttaaacagtgagaaagagaccattaggtttacatggaaaaccctagaacatggagaaaaaaccacgatagagttactttttattattttgacacagtgaaagttacaaaagaagacaagataggctttagcaagccttaattcaaaaaatgaattatggtaaagtaaaatactaacctaccctcggggctacaaactattacaatgtggctttctggaagagcgccaaatcttggatcctgttttaatagcaagcgaaactgtggaggactatagaatccaaaaaaagaaaagatggatctttaaattagaccttgaaaaggtctttaacaaagtggattggaatttttagaaaatgtattgcaaaacaagaaaatgtattgcaaaacaagatattgtgttatattgccagcctttacagcatccccactttgaagtccttgatgatcaggacttccggatcagccctctgcttcaaacagtttttttgctcaatcaatcaacgcttattcttctttgttctcagcctgctgcttttgtttttgtttttgcttttgcttttgctttggacagattctttttatctttttgtttggctttgtttttgtggttttttgttttgatattgtattgtcgctttttggttgtgttgagggcgctaagggggtgtcaacttagttgagatgcccgaatgcacttgttgatcctccctctttcctattgctttttgtataatccttatgtacattgagctttgtctctttatttatattaataatagtgagactcatgcccttttcaaaaaacgcctcttatttctaactgatattactatcttagttggtttgaactgaagtattatcttgaaaatcttttatattctttctcattatttttcatcaattatagagttagtctttgttagggggtggtaaatttaggaatatttaattgtgcctcttatgtattctacgtgtttctattttattttattctttttaatggtgaaagggtattcttttgacatgcaggactgcggatcatacaaagtgggtcggcgcttttc

SEQ ID NO: 7886 - DNA, 1220 bp, Cucumis sativus
  Intron number 1 from transcript Cucsa.121040.1 (locus Cucs a.121040) derived from phytozome v7.0 (chr-ID scaffold0099 8; pos 3078277 to 3079496)
agtttagggtttgtttttctcttctctagttgctatttccagcagtgttttactgatttattattttatttactttattcatagttcgactaaagatgattaatagctgttgtagggaatgaaagttgtattccaataactaggagggtttctcataattttgctaaggtaccttttcaaattcgctctttcaattttttttccagttctgttttttatgtgtatcctctgagaatttggatggcccctattgtttatatgcattattgtactgacggatcgagatgctctcttttgtaattatgagactataacatttttatgattcattaagaaattccttcttagctacgctcttgaatggactattttgtacttgtcatagtttcattcacaaattcaaaaagttcaatctggttgatgaccatatttccgatcattatttcttatttttcttctgataatgaacattcgatttctttattgaaatgatgacttttatgtttgaaacaaaagtaaattttatttatattgagcttgttgtcttggaattgcttccaatttcaatcttctatggtcacatgataatgcaatagtttaataagtctcatatttttctgttaaatctggtctttaattaatttatttttatgttgctttatgttctacaacttaataactttgtcatgcttgatttcagctagtaacttttagtttgttaaatgcaaaacacagctgactctttttttgtttctctgcataaaggtacctgctgactatgtgactctcaccagtttaaattcgctgacagttgatttgccttttgaaaaacttgaaatgggacatttggatgtaaaagttgatgaagtgcccgactctcttagttatgctgattctccaaaatttttgatgtgtcatgctcgagaaatgagagctggtattgctgctcaagcaagtaaaactatcgttaaagataatgttggccctttaagtgagaatgcctatgatcatcacatgcacgaagtccaaaaacgctcaagtatgcctaatttaatgcacacagacagaggaatgtcatataactttgatctttctttgggtgcatcgtgtagctccacaaacgcccttttttatgacaaaaactacaatatacaaccttatgttcaaccgctcgaggtcaacaaagggatttgcactaggtatctttctaatattttgga

SEQ ID NO: 7887 - DNA, 1363 bp, Cucumis sativus
  Intron number 4 from transcript Cucsa.322210.1 (locus Cucs a.322210) derived from phytozome v7.0 (chr-ID scaffold0308 0; pos 1995469 to 1996831)
aggtattctcttctcaacactcatgcatttcatgcaaacactttcaccttttcttcttcttgttttagtataaatcattagttttaatttgatattaccatttaaaatacaaaattattaaaaatatctgaaaatacctatagattattttaactttgttatatttgtaaatattttagttcactttcttatatttgaaaaaaaatattttaaattagtagataaaagtttagtgaacatttgagctaaatagtgagttattatatagtcataagttatcgttgctagattagaataatttgtgtttggaatgcatattgttttaatttgagttataattgtatgtgttttgtgtatagattattttagtttaataaaaaaaatagtaaatattgtagtaaagaataaaaaaggatgcatgttaaatagtaaatattgtagttttgaaatagtgtttagtataacaagacttttaaatattatttactgaagcaaaatatggttattacagacttagataataattgccctattgttttattcactctccatcgttgttcaattttagaaactaacaaaagtaatttttatttgtaaaatcgaacaaagaattcaatctatatgcgagaatcatagattagtatctaatttaagagaaaacatacgaaaatacaaaactaaaaacaaaatcgctaacaaatgtgattctttgatttttgaattctaaaagatgtccaataaatccttagatttttaattttgcatccactaaatgctcgaagtttcaagtttgtgactaatatgtaattaacctatttaagagttttccttctaaagaaataaaattataaatagacaaaccattacatgaaaattttagagtttcgacacaaagttctaatctatattataaagattataagcacactttagtctattttatttctaaattttcaaatggaacttgcgaaaatcactctgaattatatgagattaatttaatcttgaatttttaactcacatttatcaaacattacaatttgtctttacaaatcaatctcttatatttgaaatgcgttgaacttgatatgtgatgtttcgaaacctaaattatttatgtttatgaccctagagtttagagaaatgcatattataaactctctaactttaaagttacatttatattatgaataactattgttaataaaattatttctcttctatctcgatgtagctaacgcactgttggcaaaccacgtgaatcattctactaattcttctcttttctttatttgtcggctccctaacttcttagattcattgctgacaataatttgttttgtggtaatttcaggtaaccgta

SEQ ID NO: 7888 - DNA, 3871 bp, Cucumis sativus
  Intron number 4 from transcript Cucsa.213620.1 (locus Cucs a.213620) derived from phytozome v7.0 (chr-ID scaffold0154 3; pos 1466049 to 1469919 reverse strand)
ctcaaaaagaatccatagattctttcttctcacaggtatgtagttcttattatcctactgtatttatgttgtggaattacgaatataagtttctttcttatttctagaattaattttgtgcatcaatttcatttgaaagaaatcatagatgtcctctatgatactcttatatatgaagcatagataaaagatttgattttcatccatgattctatatgaatatctctacttactctccttagcttaggtcaactggtcaagtaggtaactatttgctaatctcttttagcttagaagttggagcctttatctttccttctctttttggtaaatttatgctatctatatgtttgtcattcttaataataaaacacatgcacagaggttatatgtattttctggtcagttgtgactgtgagtgcctaaacttatatatcacagaatatacattaaatatatgtaagatatatacatctattatagtcagtttagtatcctaatcttatttagattttagatacaaaaaggtacgttcttttataacataggtgctgttaatgatgtgaacttttttttggaaataagttagtgatgtgagctttagaaggaaggttatgatttggtgggcagagcagaatccaaatgattgggcaggacaccaatacatggacaaactgagggttttgaaatcctgtattagtattatgaagtggaacaaaggatattttaggaatatgattgctatgaagcaaaattttcttggcagatcgtgcatattgatgaaatagaagagcaagagattattttgcctcaggtaattgaacaaaaaaccaggttaaaggcttccttgctgtagttaaccattagtgagcaggacattttgaggcaatggtgtaagataaattggctaaaggacgaggtgaaaacacctcttttcttcataggtgggttttggcaaggaaaaataaagcctttattgctactcttgaaagcgagtctggggagttcttatcctctgaaaaagaagtagagagagattattggtttctttcaaaacttatttaagacagataatggtgggtcttcttttacagtggaaattagggtgggtttggagagtacatttcaattggaagagatcctttaagcaatcaaagatatgggaaacctcaaatcccctggttcatatgagatgacgtgggaattgcatgaaataaaaaatcggaaaaatttgaaggctgacttaatagaagtgctccacaaattctttgaaaaaggtatcatgaataaacgaactagcaaaatgatcttactcgaacataatcttttctataggttacaactatgcccttgagttctgaaaataaacgaacttacaaaactaatatttacttgatttgtagcagtgtcggaggcccttttttagctcttttgtagtgtgccctttaaagggaaagcaaagattcttggtctggtctggtctttgcttttctttcaagactttggtttgaatggaattcaaaaatcttcaacaaccatgagtctaacagggaggtgttttgggatcctgccattctttttgctttttcttggtcagtgaattctaaattgtttcgtaattgtagtctctctcaaaatatcatcaggtggggctcgtcttttctgaccatttggtatgtggggtatctcgtgccttctttttctttttgcaaccaatctttagataatgtgtttttgagaaaaaaaaaagaaaataaaaaaaaagaaaagaaaaagaaactactaagaagaagattgcctcaagagtcagtgacttttgacccataagcttgatctcctcgttgaataaaattgtagcatatacaataagtgattgtcaggctgcctttatgacaggcagacaaatattggacgccatcttggaagctgcagagtcagtagaagtttgaaagcttctaatgaaaggggctttgccctatagcttgatttagaggaggcttatgaagtttagctgagatttccttgatgcagatttgaaactgaaaggctttggtagaatgtggagaaaatggacttctccattttgatcaatggaagaccaagaggaaaattttcagcttgtaggggtctaaggtagggatatgttctccctttttttccagcattattggagacactgttaaattaatgattcaattctgtcttgaaaaaaggaatctgtagggctttgttgtggtgacaagtgctgtgaattattaattcccattcttcattatgttgatggtacggtgattttttacccagacgaggcttctccttttggaatttggtgggatattttgaatctttcttggaacggttctggtttgatgttgaatgtggctaaaatctcacttattggtttcaatatgagtgaggagggagttgaagaatgggcagaggagttcaatgtaaaatggaagcatttctgattagttaccttggtttttctttaggctaaagaaaagctttttggaatctgttggttgatagatagatataatgatagattacaaagagaggcccatagttatgattgttgagataatgatagtgaagtttggaatgtaggccttcgaagggctctctttgacagagttaattagttggatggctttggtagatagaaacaatgcagtgcatctgggtgaaggaatagatgaagttttatggtcgttagagggatctggaagttattaatgtacattggtgattggctcttcagtctgatttgaacctaattaggttgatttggaagaacaaatggccgaactttgtcaaagtttttctttggtcatggccttcggaagtctaaatattgatgatagattgccaagaaaataaagtggttggcttcttttgtcgtgagggtgtaggctgtgttttggattaaggctttgggaagaaatgatgggtggaatcttaaaggaaaagccgaggtggtgggtagctatgcttttagagctctcctaggacatctgtggaaggaaaggaatgctaaaacctttgtagatacatttctaagttttgatatcttttgtagttctgtacaaaattcaggttcttggtggatgtcagtactaaattattttgcagacataatctactgatgattattaaggatttaaagactctctttgtatagtctctagggaggttcctctactccaaccatcagtttgtaccttggcttttttggaatatacttctttattgtttcttataaaaaaaatgcataatgcataaattaactgttagatattatattaaatttgtattcacccatcagcttaagcttttgggtcaatagatgacttaagattaacttatgtattaggtgagtttttatttagttattactatgttgccttctttttctcttatctttctctctgctttcctctccctcgacctccactccttctccactattagttacacttttggaagaattaattgtggctattactgcaaacatagagaagttgagattgaggagagctttgggaaatatttttgctttgtaatattgtgctcttcctgaatcaccaattcaccaaaaagcttaagctagtgggtaaaggaaaatataattacatagcatctaactcccctacacttgtggacttgaaatatatgaaaagcccaacaagtggaaatcaattttagttgggaaggaaataatattgaaggggcttgaagacaagatcttcttaaatcaccaattgacccaaaaacttaggctagtgggtgaagacatatttaattatataatataactgttctcatttatattatttctataatttaatgcagaattcggttattagct

SEQ ID NO: 7889 - DNA, 1388 bp, Cucumis sativus
  Intron number 2 from transcript Cucsa.220370.1 (locus Cucs a.220370) derived from phytozome v7.0 (chr-ID scaffold0165 8; pos 1823962 to 1825349 reverse strand)
agattattcacaatccaactgttaacaaggtcttgatttgtttttagggcttgattcttcagattttttaaatctacaaatgaatcttactctggtaaacttgatgatgcttattgtgttctatttggtagaggggaaagaaagttaaagctttgtgtaatattttattgtccaatggcgagttgttatgatctgttctactttcaaacagaggtgtttcttttatccctttctgggatcttcccctttctttctgactgaacctgttaggtatcaagttcccttaacacagaaactacccaacaaggacacttacagaggcaataaactctgtttatgatactcagataaaggaagcacccaacaattacaagatagttaaaatatccaaaaagaaacaagaactcagtgacaagtagaagaacaaggaagaaataaaacacaagaaaaagatatgacagtattcgagagctgcctcttctcccaaaagcttcaaaagctttccaaattcagcacccaaaatgattccccaaaccccttcataaacctcttgccgatggttcccacctcatgtcacaattctttctgtgtcaacattctctttaattcccaactttcctcttctacccctcctctggtatgagtgaataatgggaggtctaacagaatcatgcatcttatttgtagaggaagttcaaattttcaattactggtttattactgactagtgtgttttgacatctctcttttattcatctagtgatgacatgctccagccagaaaaaggcgatctgttttttattttgaattttcatttccattcccaactatgcatttttttatcagtctgaactgtgatttgaaaatttggcaagatggtatctcagttgctgtcctggtcccgtgagtgtggtcttcagtctggtgaattgactatgaggattgaagagctttgaccttccagtctttgggaacaatgcaattctcacccctaattttttgtggaattctaaattttatcgttttgatctttttattttctaaattctaatcatgtttccatctagaatatggagtaggatacacttgttgaccaacttattgtgtttggaagcagtaaaagtcttgcaccaatatctggatttttgttagatctttgaaaatttaactttactgccatccttttcctagaaacttcgaaatattcattctttggattttctgctgtcttttccaacaaaaaaacatctcggtgtatgactggtgttcaaaagtttataaacttgattgtttgttaccatcctttcacataactcttagttttcttgttacacgaatgtagaaatttaatacatattttcgaattctacatgtagcgtttggaggag

SEQ ID NO: 7890 - DNA, 1655 bp, Cucumis sativus
  Intron number 9 from transcript Cucsa.164280.1 (locus Cucs a.164280) derived from phytozome v7.0 (chr-ID scaffold0114 8; pos 129373 to 131027)
atcaggtctgttatgaataataaataatacatatctgttaattatatacatgcacatatacacacacagatttatgtgcatgtgtatatatatttatgtgatgcataaatggtgccattatatgatgaactccacatgtgggtttacatttcctttctctttgaccattttttaatgtagaatgatttcatattggtggtcacttttagattttactaccctataaaatttactgtccacactcgtttatgcccttttgtcgtgtcttttcaccgaatatatacttcatctttattcatcctctagatgtgaggcatctgtgctccttttacatttttcttttcttctttttctttctttttgtccagttttcacttcttgaacatgacatctagacttagtttagatttactttttattttttttaaatattaaaaaaagatattgaacttttcattaaaaaaatgacatctttattctttgggaagcaggggcgtgcactattctgtgggtgttatggtgagaaataaaagagtacttagagatttggagagggaccctagtgaccgtgaagttttatgtctccgtttggacttggatttcaaagtcttttgtgactattccttaggatatatcttagtttgctgaaccttgtttctttgagggtttttttgtatgctcttgtgttctttcattttctctcaatgaaagttgtgttttctaacaaaaagaagaaaataaaagcaactgaacatcagaaacttctgaaaatagggttagagaaagtacccaagaagagaacaactcaaaagaaacaataaaactccccccgttcaagtcttggatggaataatccttttaacttctggataatgagtatcataatggagatattagctggggtgaatcaaaacactcaaaacctcagcgtgatgaatctgcttagttctaaaaacatatttgaaggtagattgtggataaaaaaaaattgtttgtttttgttttttgtttctaaaagtaaattactactcaacaatttgaactagaaaaagtgtatgtctgtgtgtatgtatagatgtttgacaacctataaacttctcagtggtattatgaaatgatcaaaactgttcaaaaggaaaagactctagaagaggagttaaaaaatgttaatgacacaatattaaatttacctttgctcatatgtttaagcttttggtcgattggtgatttaagatggtatcgggagtttgaacacaggaccaaccacttactctgatatcattttaaatcatcgattaacccaaaagcttaagctgatagatagaggtaaattcatgtaacaaaaagaaaaataataacattcaaaatgcttaatgagggaaaatgaaatcatcacaatgtattttttttaaaaaaagagtgaaaatatcaaagaaattatgaggaggcaagtataatgtataaaagaaaattctatatcgaacatcgtacatgatttgaaaaccttacgctgtaaggattcaagcactttgttacaaaagtagcgataacttctctacaattatatgacttgtagatatttaattatctcatggtggtctctaaccgatgttccgttttaatggttgttatgtaggaatattcctggagtcaaa

SEQ ID NO: 7891 - DNA, 3420 bp, Cucumis sativus
  Intron number 2 from transcript Cucsa.365670.1 (locus Cucs a.365670) derived from phytozome v7.0 (chr-ID scaffold0361 1; pos 3513503 to 3516922)
gctgttctagttcttcttcaaaggtaatgattaactattccttctaatttgaccgttagctttaagtgattcatatttgacgcatgttattatacttgccatcagtttagatgaattaaaatcatattagctcgcactgcatacaatttccattagtcttgtttcataaccataaagtatttgaattaaatcgaacatttaaattctagatttgaaggggtttagagagtgtgatagagagaaaatgagggttttagataagatgactattaattgtcttatgagattagtcgaggtgtgcgtaagctgaggcctatagactcacggatattaaaagaaaaaagagataagatctttaattggataaagattgctttgattaatgataaaaagagcattaaaatgttttgtgaatgcaatatggtaggcaccacaggtgttgatcttttcttttgataaaagcatcaactttcattgagaaaaaaaaatgaaagaatgcatgggcatacgaaaaaaaccaagcccacagaaagagaaccctaccctactacatgaagggactcgaagggaatgttgaattgtgctgttaaagtttgattatgtcactatttggagatcaaaattctattatcttgttttattatttgattttattttaaagttagacaaatgaattctttgtttatgccttttggttcttttcttcgcatgttagtaattcttatgcatttatcatgtgtcttctggtgtcaattttttaaaaatatttctatgtaattttaaagtattttaatgcaattgtaattaaaaatgtgtatcctggatttgaaggagtttagaaaatgggagtttcatctttaattggaaataaaatttaaatttaaattttatcatcaaattatcataaacactttgagcaatgtgcatacggttctctttttgtgtgtgctaccatttgtacgatcttgtggtttttatggggtgaatggaacaatatgatttttagaggtgtggagagggactctaaggacctttggtcttttgtttttatcacgtttccctttggactttgttatcaaaaacgttttgtaattttttttggttttttaaccttagctgggattgttttttgtaatgtgactttctaggccttgactattgctgcccttgtaaatttttcattctctcttaatgaaagtgtcttttctctttgaaaggaaacaagtctctttattcatatatgtagaatgaaagagactaatcctctaagtacacgagggttatacgaagagcataaaacataactaggatcagcaggaccacctaaacatctcaactaggttccttagcttcctcatcatatctgtaaaacataacgtcaaaaatcgatcacggcttataaattcaacaattagagataggacaaaaaaactgttgatcactagctgactaaggattcaaaaaaaagaaaagcatacagaaggcctaagccaaaagtgcaataagaggtttaatctcaagacaaaaattaagatgggaagataaaaactctccaatttgagtagatttcttgaatgatgtagaaagtcagaatcagcccctcaatctctctgtacgacttagttggagtcccttggtcattaaccagctcagtaattagatttctccatttttttctagcaaggagttgatgaaagaaactcgtgttttcatctcccaaacggatccagtttagtttacttttctggattaaattgatttcctcctatctgtacagtaccattaaatcaggcttcaatgagaatctatcatcttcttgaacatccgaaaaatgagctgattctgccaatgcaacccttctttcaatatctctaatcagatcatcctccttcctactttggttcttctgaaatacagcaaaccactctttcacagcattcaacccttttcaatttaacgctgtgatagacttcctatcgtatataaatataatagaagagggaaaaaggaagtaacatgtgtgaataaatacacgtgggagtgatgtggagtgttgggtaacgaaaaactagaatatatagagaaaggagtataggtgggagggttaataaggatttcatgtgggtagattcattctctgttattcgttgagagagaggaaagcagtgggtttcctatttccatttgatatttccaggaataatcgtttacgaattatcaataaagttaaagtttcatcaaattggtattagagccatgagatctccggccacgaaggtaatcaaatatggtacaaactcggatggaagagaagatggagatgttcgatcaagaaatttagggtattaataaggaaatcggcaaattgcctgcgattgagaaaaccttgaatggtctgttgaagaatatagagatacaaaatcaaacgatgttgaggattatggaagcggcagctcaagatcggtcgacgatgaacgaaaaattaagtgagttatcaatgcggaattttccggcgaaaggagtagaagacggcgaaggatcctcaagtcgagggaaccatagtaagaatggagagaagatgacgattgacaagagtagcaacgatcgaaacaagtttaagaaagtggagatgccgattatcaatggagacgatctcgactcctggttatttcgcgccgaaaggtactttcaaatccataaacttactgaatctgagaagatgacggtttccaccattagtttcgaaggaccgacacttaattggtatcgctctcaagaggaacgggagaaatttgttgattgggctaatatgaaagaaagggtgttgatccgatttcaatcggtgagagaaggatcattgtatggaaggtttttgcgaattcaacagacaaccacggtagaggaataccgaaatctgttcgacaaatgggtagcaccgttatcagatttattggagaaagtggtggaagaaacatttatgtctggacttaagccgtggattcaagcatcattggaagtcatcttgatactttaaacccatttagaaacgttgaacattcatttccattgtttcaaggtttcaattgcattttaaactggtttatggacttatctagttgggaaccataactactcatgtgtcctggtgatggaacatattctttatttctgtttttcaatttaaagctgaactttttactgtggttggatatattttcaggagttcatatgttgtttgaggttagttaattgatttaatctgacctttatggctttcagttttttgagattaactgttttattgcactaacttagttgatatcagatcagttttttgccttcttgagctgctaatgattataattcaccatttttctctctgcagctatctgggtcaattgccttgtctacacgtggtga

SEQ ID NO: 7892 - DNA, 991 bp, Cucumis sativus
  Intron number 1 from transcript Cucsa.107990.1 (locus Cucs a.107990) derived from phytozome v7.0 (chr-ID scaffold0093 1; pos 255886 to 256876 reverse strand)
tggaaggtctccagaggccattgttggctgttcaggtaaaataaatatgatgttattttcgaatttaaccctttatagttgattttcacttaaattgtttaaataatgataataattttagtgtaaagaaacacaagccattacaattgtaataaataataataataattacaaatatatcactaaaatctttatatagatcactctcctaatctattactaggtaaacatgatgttgctacatatttaattaataagtggagtaaaattaaacaaaagtccaaaatggtcaaagtcatataaatgcaaaatatatatatatatatatatctttcatatttattaaaatctttttaagattcttggtaaattaacatttttaagaataattataattaatggtaattctaaaaataataattaaatatataaacatttttaaaaattacaaatatagtaaaagttagaatgtgttagtgataggaacaatatttacaacacactaatagtctatcagtacttttatattgatatactttaacaaatattgatatatttacaaattttttaaaaactttgttatatacttaattataagatagttgcaaattaaattattatattcaaactaagcaagtatataacaaatgtgtaaatataataaaattaatctaaaaataaccctccattacaattattccttaattattttcagtctaatggttatatgtgtgactatatccttttctaatattttcgtttcattattaaactgaattttcaataccatgttagcctgggtcccaaagttgtggatccccggcacaatatggcatcatgaggattgtgggcctaggctcagtagttcaatggtccaagcccagagcaaaatagttgtaactgggctaataaatcagcttcagacagcccactaacaaccaaatactgtgtgttttccgtctagataaccaagcttaaggacggaatcgca

SEQ ID NO: 7893 - DNA, 3893 bp, Cucumis sativus
  Intron number 1 from transcript Cucsa.157300.1 (locus Cucs a.157300) derived from phytozome v7.0 (chr-ID scaffold0114 1; pos 275412 to 279304)
gtcagaggtaggtgtttcatggctgtttgtgttatttgaattagtaatgcaaaattaaaggtccattgtttaagctttatcttgtgttcttttcgaattggtgccgtggatcgagctgaattgatttcttaccctttttcatgtttgacctgattcatattaacgtcttcattattgggagattgcatgttgtttttgttgttattttctcttacttgactgggtaatcccccagctacaatgtgctgatttgttgaacagtttttaaggattttatagtggtttgagccgttttggtttaaagctccctctttggttttttgttgtctagtaatttttgtaaaatttcatcccttttttatgagtcccaacccaagagggcttcttttaattagtatatttaaaaaggagtcatcttctttgacctttgcttgacaggttatcttccatctcctgtttttgacagatgtttctttttagttccgatatgtgaattgcccaccaaagtatcaatttcagtagttttttctttttattaatgacaaatggagtttcttctctaaaacaaattaatgcaaaatggaggtatatctgtaatcctcttggttcggtcaatatccatcactcacccttgttttatatcgtcatttttatatctccattttcatgtaaggaagatctgtttctgtctctctttatgaaacaaaagtcacgaatcagtagcaacagcaatggttgaggatgaagcttccaaccagtttattttagaaagttgtaataaaaagacatacagaaaacaagccaatgaaaggaacttccaacctgtttattttagacaatcaagatctgtcttcacttttaggggactttgagtgattacttgaacttcccattgatctaaatttgttattcttgtgacttggtgatctcttaattataggaacttcatatgtaactgtaccctttccgtgatcattaacaataggaaaccattttctattctctttgggtgtgggttccttcttccccagttcttaggttgattatttctctttgcttaatatattcttgtttatttttaaacgaaagcaatttttttacttctaattagcttttgtgccaacaaggcacctgtcattcaaatgaaggggggatgaatcaggtcccaaaagaattatctttccttttcttttgatttcttcccctatagcatacatcttgaatgaatcttagaatgaatgattcatgttgtccgaatattgtactcataaaattgagagatttttttttcactgcttttgagaacttcgagatctaaagcttgtgttggtcacttctttagtagattgggtaaacaattgctcaatgatttagctcccttctgttagccaagattgctcataagaataaagtcatttaggaactagattggctgtttgtggattgaagaggtgtttaataaaagagcggatgatatattgaagtctccaaggtgtggactgtgagtaatgggagaaaagttaacctttttgctctggtaatggcagggaaggagctaattggttggaagtcattcattgacgatgtgtggtagtttctataaatttggggtctaaacgaaacatgactagaggaataagttaagggcaaggagtagatagaaccccttcccaaaaagccaagtgttgtatgctatgaacaaaagagtctcccaagctatgaattctcaataagtagaatagatcttagcctcccccctgaagcaagttccgggcagtgcttctaagagctgatcgtcaatcttcttagggaggcgaggcaaatgagtttgccaaactcatttaaaataaaagaccagcccttagccacaaaagagcaatttagaatcaagtgatcagtgcttctaagacagtttgttgaggtggtgaaattgaattagtacacagttctgctcaactttcaatccactttggtcatgttttggaggaatttcaatcttcaattcttcgaaccacactcaaagttgtgccaagaacttagttccatgatgatttggtgtcttagatttcacactcaaagttagaggatgctgattgtgaccttctctagttagatgtgcttttgatgtgtaaaacattgacttccatggagaattctccatacaagctgcagttaggttccagaaaaattggaaataccgttgtatagctaggaagggattatgagaagttactgacaattttttgaaaggctaaagttgacacttgaccttgaggttttttcatcttgaagaggtgctgtaagctctgaggctgtctgatacctccaactaagaattttaacaaatcataagtatgaccaagtattgtaaacataatagtcatataagaagagggaaaaaagaaaaaacacactcgtcaattcccacttaagcaaaatttcttaaaatgatacctttaacctcacttctattatcatttactgtaaaattttgtcttcaatactcacatatatagacacgcacacaatacttttaaagttacagtagtaatagttcatatcgactcaacttgaacttttatagttttttgaagaatgaaacaaatttatatcattctattagtcattacacaaagcatggagactttagccgtatgtaagcctcttgtggttcaaagagaggctcaagtcttaatatcctattaaaacattggttgctggcgatagatataaagaactccttatggaaagttttgggattccttgcctttgaaagaaagccttcaaactctctctaccaaaccaagagaacagaaagaagaccaacacatttcctgaccgtagtaactcgtgaagcctgtcttaaacagaatcctcaacaacaaatcagcaataaaatcaaatgtgcccaataaaaatgaagatagttctgaaaattttgaattgcaagacaaaggaacttttttcgataaccttaagatgttctaaagtcaaagagaagcttctctgcaaacacgttatgcatttttttttccttttcttttttggagaatggattactaatgcctgcataagagaacatttatacaactaatccctaagagaactttttcatgcctaatccgtaagaaggcaactgttaacagaattagagaatatagacccactagccttgttaaaaatgcttaaataattctctctaaagtcttggccaataaattatgtaggagctgtctggaactataacatagtgtcgtcaactctattataatttgccaatgaggcagttgacgatgacctatgaagaagaaagaaggcttggatagtgaaaatacatcttgacaaagcatgttcttcttcgtcatgtaaagggtgggccaggggaggttgatatctacttgtttgagggaaagtagagatgccttagcctataatcccaaatagtacaaggacagttattttttagatttgaattttctccttaaaaatccttcagctagaagattttagtgagaaatggatgagatggattctcttagtaggcttctgaacaggagtggaaacccccaatttatggatgctattcatttcttcaccaatgatgatggaaacttcaaaattttgtttatgatcttgaatgatatttgagaagccttccatgtcgaaaataaatttcagtgcttcttcttttgctgagattcagacgtaaaggaatctgttatatatcacattaactgctcatcaaagttatctggagagtccaaagttttaactaatttgtttgtcattcttagtttatttttttgttccatctttaatgagggggttctcatttttttgatgtttgttttctcgcagctaagcaattcttgtgtagaagatcgatctgctgt

SEQ ID NO: 7894 - DNA, 4738 bp, Cucumis sativus
  Intron number 13 from transcript Cucsa.159140.1 (locus Cuc sa.159140) derived from phytozome v7.0 (chr-ID scaffold011 42; pos 1194983 to 1199720)
caggtaatattttcttacattaaatggtattcagtcaatgaaagttaggatgcctcttgttcattaactttattatttagttttggttaagtatcatactgattgaagtcgagagctaacatcagcgactaattcttttgtatttggagagaagaatatggcttatttgcggaatatttgaggaagaagcctaaggtcttaattttcaacgttaatggtaaaatggctagaagatggtttgattcagctgctaaagggcctgattaatgctttcttttgtatgaaagatggacgtaactatggagtaattcgtttttcaaagttcctttctggagatggatggtttatggaatgtttggtttagccggagatgggggcaagaaagcaaatatatgttccattagcagctaacagggagttggttggcatttagaggtataatcactgactgtattgcttcatcccatgcttgtgagatcaattgaaagtagacaagaaggtgaagtttataatatgtcctctagaaacagatctcaatgccctgtttcaatgtgaggaagagccaaaatctgcaaattttccttctgcaactcgctcttgtcccagtcttgtgaaatacctgatcatttaaagttgatgtggttcgttctaagccattgatagaatttggtaagagttgatgtaattttgtggaaatttgagactcccttttctcacttacaagactagactgtgattacaaatcagattatatggatgccttaatcatctgattacatatcagactgtgattaaaattagggaagttgtgtctaagaagaaagaagacagcataatagatagagacggtttcgatgaataggacgatagtcatgggcaactcgatttgaagaagttcaaatctttggttgcaacttattccttggaacacggcagggtagaatatgtggaaaatcatgattcatttgactcgacctacgcaattctatccattaatgtattaatttctaacataatttccatgagatctgatctttttaaaatttgtgcagcccgtcttgagttcagtcttccccagtttcgatttgctgccttcctcagtgtgggtttatttcaacccatttcacaaactttgggtttatttcttatataaaaaataaaaatcaagtctcctcattaagaaaatgaaatcagaatgtacaaattgggtaaggatgctaatttaggcttatgcaacaataaagtttgaaacaggtttatgggttgctttgactgcaaaaatcttgctggcagacgtgtatataattctcgacaaccaaagaaaatttttgatgacgttctcactcgacagtttccagattttttatggtctcctttaatctttgtcgttgcagtgcaagatttttataggccaacaattttatttggggtttttacaaatcattataaaaagagaaaaattgtgttattttctttttggaactcgaggatgagcttttttgggagggatagaataatttagtaggatcagggtttctttttttgaaaagaaaacaagtctcttttattaatataataatgagacaactcaaagtatatgagaattatacaatgagctaaagaaccaaggaacatttggtgcacctggacaaacagctatgttgacaccctccaaggcccttaacaaactcttacaaaactaccaaaacttttcatttgaggccaactagaagcctataaacaaaagcaaaagaactaaagagaacaaaaaggcccatcggctctatgtccacagataaggtgaaaatgtataagctctccaaatcatgatgaactctggaaatgctgtaatcattgaactcttcttagaaggatgcaccaagatgtagcattgctacaagtgatttcgtaaagatccacccaagggattagtcatgaaataccctttgattctcttttttttaatcttgaataagtgccaagaccgaattatgtgattccaaaaaaatctttggggggtcgatctctttctgaatctttcaatcctccgttattccataaaacaagtttcattaactatcgaacttttcactatcacgttatgaaatgaaaaggaaaattaaaccaagacatgattacattcaaataccagtgacttcagatgattatgagattccataggactgaacttaattatccaaggacagctgaacaacatccagatcttcctgacgctggaatagagcattcaggtctgccactatttgttcggtttgtctttgactctctttatcaaccgacttttcaaaaactatcacgttagggtgcttctctattattctcattgtacaattctcttttacattgagttttacattaataaaaaagcttgtttccatttcaaaaaaaaaaagaaaaaaaagaaactaatcctaattaataaaaaaaactgaatcttttttcttttctgaaacggagacaaacttctttattactaatagaaactcaaagtacaatagagatatacaatgagcgtaataaagaagcctaaagtgcaaaaagcagttgggatcgtgcatctcaactaggttgacactctatagcaccaaaacatcatatcccaattaaacatgatgtgaatagacaaaaagctagagaataatcaacagtgtccagcttaaatacagatggctgtgataggaaaaattagaaagaaatagaaacaaaagagaaccaaaaccagtataaaaaaatggagcctaactaaacagctactgtgaaaacaagtccaaatgagaaaactgagctacaaagagggcctcccgaagagtcaaaacactcatgtctgaaatcaacttccaaacttggtatttgacataataaatcccaaagtgacttgggatgatcaaagaaaccccttgacaacttcaattatgctgacccctaattctgctcccatgattcaaatacacaacacgaacttctgaaatcttccccagaaggctgtattcataactgttgtaaagttcatcatcaacattgaatgaagaaaaggatagctcgacaaaaagaaactgaatcctaattctaaatagtaaaagaaacaaatcctaatcctaatctaataaatcaaggatttgaccataataccctattcctacttcatcactttctttaatctagcgtgttggtgctgtctttcaaggaaatatccagcaacttttagttggggtggatttcaaaaaaatccctcaatcactattgtgtacatgccgtaaagtcacttttgatggaattatggtttgagaggaatcaaaaggtatgccattataaagcccttgtttggttgaatcgctttgaatttgcccgtaagaatgcctcctcttggtgttctttctccaaggcttttgaaagctacaacattcaagaaatctactcaaattggagagtttttatcttcctagcttaatttttgttttgagttaaatcactttctgcacttttgcctaggctttctgtatgctctttgttgaatcctttgcaagcctagtgatcttttgtctttttgtcctatttgtaatggttgaatttataagccttggccattttttgatgttatgttttgaaggaggcgttaagggggtgtaaacatagttgagttgtctgggtgcgtctgctgatcctcgttatgctttatgccttatgctctttgtatagccctcatgtacttagaccattagtcactttcatttgacatttatatgatcaagagacctatttacttttagaaaagtcacaggaaaataatccaagagaagaatattctggataaaaagactcttttaatttcatgtacggatcttgctgtgaggctggtaaaaacagcccttcaaaccaaagccttaggtgctattgtactgtttgacttttctgccttaaatttctttcatctattcggttaagtgattgcaattcagctttcaaagagattctcttgtctctttccaagacaaatctttcttaattctctcatttttccagatgattaatagtcatcttcttctttatgcttgtgttttgcagccatcactggaagattcttgcctacacttcttcaggcctttcaaacctcttttgtgttgctgctgttttttctttgtttcttattttattggctttacagcccatgcttgttgtattcttgtaagactttattttgtatcttgggctatattttgttggatatgatgagggtgctaaggtggtgtcaaagttgaggtctctgggtgtggctgctgatcctagggtctctttttgtttagctcattgtataaaccttttctactttgagctttattattatcgataaaatcaggtttcctttaaaaaaaaaggcaattagtgaccgaatcccatttgactaaaccaagaaaatggatcctaatcctcaacaagtaggatgaggattaatttcggtgattaattaggattataattttttttttttcaattctctttaaatagacagattgtcttcttttatttataacttttgattaataataaagaccttcatttgatttttggtgaaagctctcttatctcttaggcttcatcataatcattttgtgtgaaattgtgttttcaagaagcaaattgatgatctatgattaaaatactgatttcaagtgtctccttattaggtgtgtcagcttgagcaccagctctttcatcattt

SEQ ID NO: 7895 - DNA, 3648 bp, Cucumis sativus
  Intron number 5 from transcript Cucsa.101430.1 (locus Cucs a.101430) derived from phytozome v7.0 (chr-ID scaffold0092 7; pos 678483 to 682130)
tcactggtaagttgctttgttcattagtagtatacttcagaaagattttacttggtttagagtttcaaatgcgtgttgctctgagttatggttagcattagagctagttcctttcctcttttaaaatgaaaaaactggcgttgtatgaaactcctaaattcttcttaaaggaaacataaactgataaaacatttcactgacatggggaataaggtgcttaaaaatggatatattggatatacccctaaaaaagtccaacaattttgttgcttttttatcatttaggaaatttgaaattttaaccacaataaaccagtagataactcttgagtctgtacagaacgttgtatgcatgtgaagttaagttctgtcattttctttaatatgactacttacggatgtctattgattatgatgttgtctacgtccgtttatttggatggagcttagatatttttgtaattcaggaaacactttgattgatgtggggaaaattaaccaaacaaaaaagtactatatggacatcctacccaatccttccaaaagcgcacatcaaaggtcaatatgatgcagttctaatattcggatggaattcattgaaaacttgcccaattattattgatacaaaagatgaatcattgaaaactttccaaagatgctaaacaaaacgatgatatttgtctattcaaacacacagctattattccttttcaaccaggaacttcatagcgtggatgtgcttttgcataatttcctatggatcatctcatgccatgagcgcttccctacatttcttgtttttattgttgaaccatctgtctcctagacacttctatatattggagaagagagaaactttattgaaagaacgaaccaaaacagcctagtgcccaatgagctgagaaatgccctttgcctaaagtgaagaatcaaacaaacattcccaatttagattttgatgatataagcaaactagttgaacttttcttaaagaaatttctagaacatttcttttcaaatcggattggaaggttgtaatcaaggagaggagtcaaatctcctaaagctttcatagtttcattggacagaggaaatcctcctgtgaaagtccttatccctgtttctcgaagaaatatgtgagcatctataaaataagattgaaaataaaagacctaacctctttaaagttcaaagtcccatccaatatgagtagtctccatagctcaattagttgtagaggttgaaggtcttagttttcaccctttccccattacttttctaaataaaaaggctgtgcctctttcctatttagagttcataagactcgtctcttcttgaatagaggtgccctatcaacatcatttagattatgacaaggctagattatctttacaaaatactttttggtctttggtcttccttctatcttctcggactaaggacagattgtccaagtgtttgcatttatctcatagctctttggctggtttaagcttccttggttgaaatccacttcataaggaagtagttctggaccagtgttttttaaggctcaaggcgcaatggtcctctggagcctaggtgcaagacgcacaaaaaggcgtgggctttttttcataagggtgcatatataaaaagaaaatacacacacacatatgtatctacaaaattgaaaggagttgagcaacaatgtataaaatataagtatgtaaccaaaggggaattgagacttcactctaatgtataaaatattacaaaacacattatcgttatttagaaatctttgaaaaagtcctattttgcttcaaaaaagccgggaaatagcaaggcattgtcctatttgatttgagaaatgaacatagtttgagtttctggcccggagaaagagaggtctattattctcaatattctttgaccctccaggttatgaaagaataattattcttgaattcgagtgaatgagttcattctgctttctcgcaatattctttgcgccttctacgcgaacagaaaactactctttgaaatgtataaagtattctttgaagctgaagcagaaagggaatggaagaggtagatggagacatgcgttgaagaaaagtcgagcgggagaagagttgtttcttatctttcacgtaatagttttaaaaaacctatataataatcttttttattaaagcccaacccattagttataaagaagcccacacttaatgcgacttgagcctaggctcgcataagcctggcgttagtgaaaacgcctcgcttcttcacaaataagccctatctgtgcgatttgagcctaggtgcgggccttagtgagccttttaaaacactgttctggacactgtctgtttatctttaagctaaatggaaaattcttgctggttctttagaaatgccgttgtgatctctgattttcctgacagatgtaagttttcgaggactattgagccacaaatgtaattccatcttccttttgattgtttgttttagcgaggaacaaaaaacctcactagttatcccagctataacatgatagctttcagacattttaccaaaccagaagtttatatcaggtcatttagtgaagccaccacataaattcatgggcttccaaagtccgtagacttgagagagtaacattccttgaatttgtccacccgccacaggcttggtatagcatcaatcatgtcatggttattgttcaccgtctctattggacatttcaatatagcttttctatgatggattttcttatagatgaaacttggaatctaaattcacccccaattactgtgaaactaccatctggtaatcactattttttttctagggacttttcttacgtcctagtcaagctttcttttgagggtaacatcatagcaaaagtcaagagaacttatttatgttttcttccctaatcgctctggatgactgactacagtataagtcaagccatttctttggcttttttcttagagggacccccttgaagttttcaaagaatctgttaatgtggcccgccaactctttccagctttttgattttcacttcaagaaatgatgacaaacttgcctttgttgtttctgcaaaacttcctttattttgtcaatctgttgaatgtaaagaaacctattttcctccgttgtctactattagagaaaattattaagaagagagagcttgggaggaaaggagagactgaatctttgtggatattgaagggttgatgagattttttttataggtgtgttagtactaagtaatttcatttgggaacctacaaagtctcgtataataaacaaccacagtagttcaacatctgcttggatcttgttggagccagaatctcattatcaaagttaaccttgcatgtgaatctttgatgtgcatcaaagcttgaatcacctgtacaaatcaagtaaaccttattcctgctacgtggatcttgccaataaaaatttcaatcttaaatggagtatttatagttctttcagggtgatgctaatttaaataacgcaagatacaattatttgatcgctgccttttttcccacttgttctgcaaaactacatgggtagttgtttacttattaactgatgcttaccaatgtgtaattgttttcaggcgttcttaatcctttc

SEQ ID NO: 7896 - DNA, 3205 bp, Cucumis sativus; identical to SEQ ID NO: 7825
  Intron number 3 from transcript Cucsa.119920.1 (locus Cucs a.119920) derived from phytozome v7.0 (chr-ID scaffold0099 8; pos 1865296 to 1868500 reverse strand)

SEQ ID NO: 7897 - DNA, 3391 bp, Cucumis sativus
  Intron number 2 from transcript Cucsa.363780.1 (locus Cucs a.363780) derived from phytozome v7.0 (chr-ID scaffold0361 1; pos 1383144 to 1386534 reverse strand)
ttcggacattacgaacgtaagtactaacataagttgtttattcattctagttattgtgctaccttttttggtgaggttcattgtcttatcaggtgtatccacgttgaaggcagggtttacaaggaaggcagcataacagtgttctagttggttttattagctttaggaactatagttgacagtaaaagttaataagctaacataaactcttcagtgaggatatggaggtaatgaagaaatggaattctcatgacgtgtgaacactgtgtaaagaaattcaacttgaaacacgcaaaattgagagaaaacatctaaacatgcttctatggaggaaaagaagaaaagactaaccttcgcagaatttctcccaacaacaattatttgaatcttccaagaaaaccacgaaatcttccttgttatcctcaaggtgaaatttaacagagaatttgtggagcttatgtgatttttggtttgatgaaaaaggaaaatatttagggagatttctttttggattttgaacgaagagatcgatatacaaagataaaggtgaaaagagagggaggaggaagctccctctccctcacgttgggagttattctataatttaaaattaatataaatttaaactatattatatctcatataatataaactttatattataccatatataatataaccaatcatttagatctctcatatgatctataattctaatataaatcaaatccatattaattttaatctatagtttatttatgaatcttattcatattattattattatttgaatcgtattcaaacattaacttctctcatacaaactttatatgatacattatattaattatatcatagacaatttattccctttaatcaatttgaacaattcaaattaaaccaaaataaatttgattctcatttatccttattgagctaacaaggagaccttaatgtacctacaaatcgaagctcaaatgatatgaaattaattaatgaaactctttaattaaattaattgctattaattaactatcagtcattccactaaagactaatagttgcactcttcttactataaatatatttttatgttcattagatataaccaatcaatagggcaatgacacttcacaagttgctcgtaagtacaactaggctaaaaatgccgtttcgcccatgtagttacatctaactccttaagtaccattgtttcctctaatgaacaataattatagtctcactataactgaacttctctcggaccaagagagggtgtggcgccacttgttcaagcccttgaatcagcccttaagagagcaatttctttacttactttatccatagacaatgagtgaattccttcttgcgtagctgtgtttccagctctccaatcaggtgaatccccaaaatggtaggcatattgagtcggcgacataggccgctctcacccatgcaaatcaaaggactgccttcataggcagaagttcacaactcattcaggattcaagtcaagtcacgtatggtcatccggtgaaatgtagtctcaacaagtaacggtgttaataggagagactattcattttatggtctagtcttatacaaactcttagtataaaatacccttgctctaatgtctagacatgaatgattaggatcaaatcatttgtatgcactttagaaaaattgtaacaactacaaatcaagctatattcgtagtgtcatcaggatgaggtatccaaccttatccatctactacagaccatttaggttatcacttaaacatgatccacttgtatgtctccacatacatgtttaggttatagaagataaccttggatgttagtttattggtattatgggttaatgcaactaaatgtcaaataaaataaaacactttatttattagataaataaaaagtttgtatgatacaattacaaactacaagatcacaagatctaggacatcaaccccaacaagtacaacatcaaagattttgcaacccatgataataggctgccgaattactgtgcatgcccaagattgtcattctaagggtaaaacaaacagtttaaaattcatcaacatccaatggcgcaaaaatgaacattcacattgaaactgtcctctctataacaattttccatttattgagttgcttcccttcagatttttcatgttagttaacttcctaatacacagttaggtactcaatctaacaaggaaacactcaaagaacagaaagaataaacaaaaacgctaagtgatggaattatatgaaaatatattggaaatatgctataatatggtaaaaacaattaagaagtaaccactagcctttagagggggctaagactctcccaaataccctcacaaggaaatcccacaaaattcttcacccctttccctcaacccaactctttgtttataactaaaaatcgctagccaacttactatctagttactaatatgtcccttctactaatcctgctaatactctattaataaccccatatatctctaactaggacccttacatacacctctctctttttggagctctaaagatagaggagtaataaagggacggtgggttggattttggaatagatggtatttaaatgaagttgtttcagtttcttatttaaaagagagaaaaagaaaaggaaaaaagaaaacagtgcagatgagcaggggctcttccattcatcggagtgagtcccttctttcacctaccaagcttaccagaaattctccctaaatacagtgctggttctgatggttctaaaaaggtctcgtttcattgtcccttgaattctctttccactaatgacatgagaatttggacacagtgcttcatgatcctacttcttaccatgatagaatcattttgggctgacctgaaaagtcttgtaggagtctatgaggacaataggtacttagcaagagattccaataggattcgagctagaaggatttatgagaaatttgtgaagggtgaattgctagaaatatgtgaatgcatgaacttgaatggttcaatcttcttttgcttttaatgtttttgtttcacttcagttttgaatgatgaaagatgccttgggtttgcctttttgagctccgtaacaagactcttgaattattcttggattgctttatttgcactatacatgctaataagaagttttctcccttgagtcgagagtactttgagaaataatgcgtgagatgccagtttgtgtctttgagtttgtgatggcatattatggcctttttttgcttcacttttattttgtcatcaaacgaattctgtaaaagattaaggttactattattttttaaataaccgtttcagactgttgtatccaaccgcattgaccttcattcaga

SEQ ID NO: 7898 - DNA, 2064 bp, Cucumis sativus
  Intron number 2 from transcript Cucsa.327760.1 (locus Cucs a.327760) derived from phytozome v7.0 (chr-ID scaffold0315 9; pos 105155 to 107218 reverse strand)
ggacaaaaggctgtcaaaaacagtcctttccctaggttagttggtataaccctatactcccacttaatttccttaactacgcatatgcttagtttattttagcttgttcaaaaatgttgatgcaaatatcaaataacatgtccatgttgatggtatttctgaaaacagtacttattgaaacaaaagattaaaatatatatataggaacattttcaagtaaaatcaaaatatttaccccatatataagcaaaatttcaaatcaacgatactaataaacttctatatgtgtctatcggttatataatatagatttttttgctattacatgtattttcaacaattttgtcattataataataatatatatatactgtaaattaataataatcttttaaataaattgaaaatatttatcatttatatttatgatattttgttgtttttcagtataacaatttagagtcggagaattgaacctccaaattactaatataatactactaaatccaactcatttttattttcttttacatttcgtaggctttcaaacaaaatatattaaaagtatcaagatgttgggcaaaaatttattaccataggattattgttagagttgttttcatttttatatttactttttttaaaaagaaataatatgtatggggagagaataacattgagatctccaatatgagttatattacaaaattttaaatttgaaaataattataacaatattattattattggtggaaagtgggattccatttttacaattatgttggcatattttgaaaaatgtttttattctgcaactctaggtggaatgataccatcttaaaatcttattactttgtccaacaagaaggtacccttttaaatgggtttggaaaatagtatctatatatatttattagaaaccctattatattgacatccctatatatatatatattggcatcttacaaatatatatagcttttaatttattttgatgtacaattcatttacgtttgttagacttgtggtttaaattgtcggcatggactacctatatgttagtccccaaggatagggacactaaaagaaatgtacaaattaactaacatctatttttggtattctttattttacaaaattgattggagatgaatatttgtgactttttgtattttttttttttgtcccttttaaactcgtcaaatgtatctgtacaataaaaccctaatatgtcattaattaatttaaaaccaatttaatcatacgcaatgtgaaatatatttttattgatatagcacataatctccacataatcattaattagtgagaatacgtgataaattttagattaaaaagcctaatcttacttatgtatatatattatttgcttataaaagcataactaaagaaaaagaagagctaatatgggtagacagataaagattcatatgtcttatctttgtcgcattaaaatataacatatatttcctaaccatttttatttagggtatatttgtatatctttattggacatgatttgatatattttcttcttttttcttttctaattcgctcaactattgatataactaattgttaattaaagtacaaatttaatccactttcgtttacatgatttctaaactttaaattaaatgtttaatatgtatttttagttaaatttgtaagtacaaatttgaattgatttatagatataaattcgaccatttatgtgtaatgaaatcttttaaacttctattttgtgtcttacgtacatattcgtagattttataatatacgaaagcttaatgacaacaattttttatccaaaagaatatattcaaagatgctgataaggctaaatttgtaaatttgaaaataaaaggtttgatggactaatagacacaaaccttgaaattcggagtctttgaatttaaccttttaatattgtatcgtaatagcagaatatattatgtttgagaccatactcgaaaccctataatgtgaaggaagtaaaagtttaaaatatgattgcaggagttactacaggtgcacaaacagcaa

SEQ ID NO: 7899 - DNA, 931 bp, Cucumis sativus
  Intron number 2 from transcript Cucsa.366930.1 (locus Cucs a.366930) derived from phytozome v7.0 (chr-ID scaffold0362 5; pos 416375 to 417305 reverse strand)
ctggagtggtaacaatcatttacttctcttctttccatttctctgtctcatgattccatagctctaggttcaacgcatggttcgttagagcggaaggcgttggtttcagtttttatgcaatcgtattcgatttggtagttttgattgttctttgaagtgattctgcactcactgtttcggataattgtgctattgtactcttttcgtttcaaatttgatcaatactttgcctttgttttatggattttctttagaaaatgttttccaacttctatggtagggatgcctgcttggatctattaactaatctgaaatgttgatggatttttgttatggtgaagaaataagggatggtaatttaagtgtctagcaacattttaaagttattgtaaatataacaaaatatatcctttatagatttctaccagtaatatggtctactactgatctacatttcgctatagttgcagattcttttgcattttactatattttcaaattctttggattttattgctatatttgcaactgcttcaagaaacaatgaaaaaaagtatgcatttttctatctcttgatggtacatttcagctgttatatgttgttattgctgttggattttgttttaccttgtctaaattcttcagctgttactgtccttttctcttcctcgtagtttaaagtgttgtcattgctgttgaatactcactaacttgaattgtatgtgttttctgagctgaaattgtagtttttgagtagtttgatgaataccatgatttcatttcagtcatcctgctactagattctttcttcaattgctggtgcatgttaggtaatctgattatgcagtgacttcatgtcaaattatattgattcattgttatccttactcttataggtccttacctcaaccgcagtgaagaaagggggact

SEQ ID NO: 7900 - DNA, 4329 bp, Cucumis sativus
  Intron number 3 from transcript Cucsa.356720.1 (locus Cucs a.356720) derived from phytozome v7.0 (chr-ID scaffold0357 7; pos 1575756 to 1580084)
ccgaacctgaattgaaaagaaggtgatgatcctactattcataggatattataataaaagaaataaccaaaaatatgttcgttatggactacaaattggttagaataactctatgtatctacgaggggaggggatttgataaaagattgactgtaaatgcatggaactgatgaagtgttatctacagcattattttcatgttcttttctggtgagcagtatctacagtttttgacgccataatgtggatgaatttcataacttcctggttcctaccacttaagagagcgcatgtttgtggatctacttaggtttaaacatattatgaattacagagcttatatttctcaaaaggtattggtaagttaacgacctaacccttcttaatttgattattttcatcattttaattgatgttctttctctatcggatttacctcaagttgttcatgtttgttaaaaactgctgacaaaattcatgatgagttgaaaagtgttaggactcctccacctgccactcagaaaatcccaacaagcctagagaaacagagacagttctctgtaacaatatattgaaatggaaataaagctagtcttcacagtgcttattcaagaacagagaaaataagaacagtgaacaaatagcaaagaaaagcaaagaaaaagatccctagcaaattcgagaaggctggttcttctccaaaaagcattcaacagtttttcccccaaaatgtaacctaacttttagcaatcccaaaacattccttaagtactccaatttcccctggtgggtccctcaacggttattctcctcacttatcaccactggctatgttgtcacctgacgatacccctttttaccccgcgtttgtaagtatgaataatagggggcctacaatacggccgggctcgaagctcaccttgtcgtcaaggtggaatgaaggatattgctggttaatggagtagacagattaccacattgcttccctgtcatgtagccctttccatttcaccaatcattcattagccctatctcactgttccaacggatcccgaaaactatctcgggttcaacttgcaattcaaattcctcagtcaaatctggtggcaagcgctgtacctgttgagtttgccccaactttagtttcagttgggagatatggaacacgttatgaatcattacttcgggagggaggtccaaccggtaagctacttccccaatctcttgtatcatgcggtatgggccatagaattttagggctagcttctcactccactttctggctaatgacctttgtttgtagggcttgaattttaaatataattcatctccagttttgaattttagctcccagcggtgtaaatcagtttgctgcttcatccgattctgagccactactaaatactccttcaaagcaccaatcaccagatctctctccttgaccaactgctctgaactgttatgggtcgttttcctgtctccatatgaaaccagcaggggtgggggtcttccatagaccacttggaatgagtcatcctcgcagataagtggaaagtggtgtaatataccataactcagcccacaatatacacttgtgccacttggttggctgctcgttgcaaaagcatcgcagataggtctcaagacaaaaattcaccctctcggtctggccattcgtttggggatgggaacgcagtacttctctttagtgatgtctccatagctgaaaacagttctctccagaaatgactcaaaaaaatcttatcacggtctgtgataatcgacttcgggatttcatgcttgctaatgacttcttcaatgaatttttacgcaacctgtttagctgtgaatgggtgcttaagggtgataaaatgagccatcttacttaggcagtctaccaccaccataatggcatcaaatccccctgcctttggtagcccttctatgaaattcattttccaatatttgaggattaagtttggtagaggtaagggttgtagaagtcccaccggcgagagagcattcgttttgttcctttgacaaacttcatactgctcaacatattgcttcacatcatttttcatgcccacccaatgtatctctccattcattcttttgtagattctgcgaaatctcgaatgtcctcctaaaatcgagtcatggaaggtatggagtaaggctagaattgaggatgaagttttagattgttccccttctatagcaacctgcctggcaccaattgatagtttgtttttcactcaggatcctgtgtcaaaatactgattattttttggagctcgtcatcattttccatttctctcataaccatgtccacatctactatccctggggatgtcaatgtatttaattccaccgtgtggttcattcggatagggtgtctgactttgttttgaaaactggttggtataaaatctcaaagtcacagcccagcaacttggtcaaccatctctgaaattggggttgtacttccctttgttcgatcaaaaacttcaatgccttttggtctgagagtactgtaaatcttcttcccaacaaatagtgtctccattttctgcattgccatcaccacttccattagttctctctcgtatattggcctgtgcacgaggagatagtttctgactaaaataggcaatgggtcgtgcgttttgagacaagactgctcccagcccaacccccaacgtgtctgtttcaatagtgaagggtaaagaaaaatccggaagatctaaaacggggattgatatcattgcttgctctaacggttcgaatacttcagcgggacccttcgtcctatttaaacccattcttctgcaacaacttggtaagaggcggggcaatattcccagaaccttttacaattcttctatagtagtttgtaaggcccaaaaatctcctcaattcagatatgtctcttggttgtggtcaatttaccatcgttttcacttttttgccgttatcctctactcctttactagagatccaatgtcccaaatattgaatttaggaatgcccaatgacacatttcttctcatttgcaaacaatttgttgtctctcaaaatactaaacaccactcccaaatgtttttcatgttcagtgatgtcagtgctgtagactaggatgttgtcaataaacactagcacaaaatgcctcaggaagggtatgaaaacttgattcattagtgactaaaagggttgatggtgcattggtcaatccaaagggcataacattgaactcatgtcctttgtgggtgcaaaaagttgtcttctcaatgtcctccctcatccgaatttggtgataccctgaacgcaatttcaacttagaaaaaactgcctcaccatgtagttcatcaagaagttcttcaatcacaggaatggaaaatttgtccgcaatatcacctgatttaatttacggtagtccacacaaaaacaccaccctccatctctttttttcacgagcaatacggggcttgaatagggtctgatgattcccgtttgcaacatttcagaaactaatctttcaatctcttccttttggatgtacccatacttgtaaggcctaacgttgatgggtttctatccatccactgtcagcattcgatgatctactgctcttctaggaggtaacttctttggcatcccaaacacctccttatatctctttaacaaattccgaatcatgggcaagtgagactcctcccctgtttcttcactatcacattcatccctgttgccttcctcaatttccacattatgaaattccagcaggaacccttgatcttctacctcccaggtcttggatagtcttcaataagcattcagccttcttgtttggactcctccacttgccactcagaaaatctcaacaaggctagagaaacagagacggtactctgacaatacattgaaatggaaatgaagctagtcttcacagtgtttacacaagaacagagaaaataagaacagtaaacaaatagcaaaggaaagcaaaggaaagcaaagaaaaagatcaccccagcaaattcaagaaggctggttcttctcccaaaagaattcaacagcttttccccaaaatgtaacctaaccttcggcagtcccaaaacattcctttagtactccaattccctctggtcggtccctccacggttattctcctcacttatcatcactgactgtgctgtcacctaaccattccccttcttatccctgtgtttgtaattatgaataataggggcctaacacaaagattgctaatcttcggaatgaattgttgcaggcggaaagaggatagttcaattgagacaaacttgg

SEQ ID NO: 7901 - DNA, 5028 bp, Cucumis sativus
  Intron number 2 from transcript Cucsa.032480.1 (locus Cucs a.032480) derived from phytozome v7.0 (chr-ID scaffold0042 9; pos 1773589 to 1778616 reverse strand)
tggaggaggaattggtaagcctcccaagaaaacggctcaggattcgggtgagagtggaaatgaagcttgtagtggctcttctgcttcagaggaaccaaattatgacaaatgggatggttttggtgatgaacctggatggcttggacgcctcttaggtcctattaatgatcgttatggcattgctggaatatgggtccatcaacactgtgcagtttggagccctgaggtgtgccttctaacctgaactccactgagtttactggactgactgattttattattatggttcctagtttttaataggaaaattgactaattttatttttgttacttaattcatcaagacagcttctggataagaaatagtagctttagattgtaaaaatattcgttcttctccttttgtaatttcttactatataccaatggttttgtttttaaaccaaaaaggaattattaatttggatttgtttatttccatattatttggttatattctaatgccatattgcatatgacctcctgtctgttgatatttaagttattaaacaggtgcattggtgtgctttggtgctctcctctacttagtgtcattgtaggatagttacagatctctttgatttataaatctaaagagtaactaaataaaccagtctcccacccctcttttaggcctttctctatattcaactgcatattgcacatgaactcccttgccactgtaaggtccctataaattttctgttctttcctctgcttcctaaaagcttgtcgtgatcattgcctgactgataactcttagccttctgaagcagagacatgctagttcaaataattgagaaataccaattttagagaagtggtatcttcagctgagcaggggagctacctgaaagatgagaatcaatgctaactactcaacaaaccgtaaaccttaaaccctaaactctagtaaagatgacaccatcctaatgaatgggagttttcgtaactagctcctttgtttaacctaaacattgttgaaatgaacccaaattgaatcttcattcgaaaatgctcccttttgttcatttggtttgctgtgtggtggggaagggagagatactttggggaagatcatttggtggggagagacctctttttgttacgtttccttgtttgtatcacttgtcgtctcttaaagttcattttgtggtttattttcttgtgtggtttgggagtttttattctttctcttttgggttccattctctttctgataaggaagtaacggatatggccactcttctttctttgcttgagggtcacccatttaggtttgggggaagagatgttagattttggaactccaattctttggaagggttcccatacaagtttttctttctttgcttggttgatccttcctctttaggtgagttggtattttcggcgctttggaggattatggtccctagaaaagtgaggtttttacttgggaggttcttcacggttgtgctaaatgcttgtcaggaaaatgcctacgcttattgcgcctttttgctgtattctttgttggaaggcggaggaagacctggaccatattctttgaagttgcgacttagtgagcaatgcttggacttcctttttccaagtgtttggtatgatgagtgcttgccatagagatgtcagtgctatgattgaggagttccttctcaattcaccttttggggagagaggctggtttctttggcttgtcagtgtgtatgtggtgttatgggttttgtggggtgagaggaacaacagggtgtttaggggagtggagagggatcctcgagatctttgggcccttcttcattttcctgttttcctttaggcatcgatttcaaataccttttgtatttgttctataggaatgattttgcatagtcgaagcgatgcacgtccctcctttgtgtgggcttggttttttgtatggctgtgtattctattattttttacttcagtgatttttagtagaaaattggcacgaaggaactcattttcttaccccttttttccctgactttaagaccttgttttaaaggtgaataggagatgggagtcccttcacctacttgttgactgtagcaataggtgcttggctttggcactttttagtcaccttttccatccttccgaagagaaaagctatcttcaagttgattagaccaatgttttcctccgttataattcataaatgttttttcaactttttaaaaggtgctcctcactttacttagagatgctcagtaggttttaagggtggaaaagaatccgtgaagctgaaaaactaaaccttttttgatatgcacttcacttgggagttttcgtaactagctccttaacctaaacattgttgaaatgaacccaaattgaatcttcattcttttaaatcttgtctgtttatttcgcttaaaaagtaattgatgtgtgcctagtcagtgttagaattgtatgcacattgtatgactagtgtttggacaagcactagcgtcataacgtgctatctgaaatagattgactgcttcttagttttcaacctgtcctagagtgtgccaaaagaacatgggttgacaaagttgataaaacctagttgatagtttattttcttaagttatcttttgctttgtcagttgctcttcattctggaggctaataacctttataattatattagggaatttttctcagatatcaattttaatatgacataaacatatttgtaggtttattttgctggattgggatgcttgaaaaatgtaagggctgctctttgcaggggaagagcattaaagtgcactcggtgtgggagacctggtgcaaccattggatgccgtgttgatcgatgccccagaacttaccacttggtctgtctatcactttcatataactagttattttctggcttaggcttctttatgcctcactggatgaaaattttttaaaatatttttttcttgttcctggtattttgttattttcagccatgtgcacgtgctaatggttgcatatttgatcaccgcaaatttctcatagcttgcacagatcatcgtcacatcttccagcctcatggtaatcagtatttagctcgtataaagagattaaaggccaaaaaaatgaaattggaaataaaaaagcaatcaaatgatgcttggcgaagggatattgaggctgaagaaaagtggttggagaactgtggggaggatgaagagtttttgaaaagagagagtaagagacttcatcgagatttggtaagaattgcacctgtatatattggcgggtcaaattcagaaggagaaaacctatttcatggttgggagtcggttgctgggcttcaaggtgtcatccaatgtatgaaagaagtggtattcttaccactcttgtatcctgagctttttgatcgctttgggattacacctcctagaggtgttcttttgcatggatatcctggaactggtaaaacacatgttgttcgagcactgataggttcctgtgctcgtggtgataaacggatagcatattttgctcgtaaaggagccgattgcttagggaaatatgttggcgatgcagaacgtcagttaaggcttctatttcaagttgcagagaaatgccaaccttctattatattttttgatgagatagatgggttggcaccatgtcgtacaaggcagcaagatcaaacgcataattcagttgtgtcgacattgcttgctctattagatggtctaaaatctcgggggtctgttgtagttattggtgccacaaaccgccctgaggcagttgatccagctttaaggcggcctgggagattcgaccgggaaatttattttcctttgccatcggttgaggatagggctgctattctctcccttcacactcaaaagtggcctaagccaattgatggacccttgctccagtggattgccagaagaactgcaggctttgctggtgctgatcttcaggctctctgtacccaagcagccatgagtgctttgaaaagaaattttcctcttaaagaagttctgtcagcttctggagaacaagtttccagagttaaccgtcctcctcttccgtccattttagtggaggagcgagattggttagaagctttattatattctccacctccatgctctcgtagagaagcagggatggctgctaatgatgtgccatcctcccctcttcccttccatctcattccttgtctccttcaaccactgtcaactttacttgtttccctttatcttgatgaacgtatcaccttgccgactaatcttttgaaagctgcaactttaattaaaagtgtgattgttagtgctttggatggaaagaaaattgtaactagttgctggtggtcgcatgttcatgattttgttcaggatgctgatattgcaaatgagatagagataaagctgcagggttctggagtgttagttgaggattctacttttggtagttctggtgttctcaacgttgacacaagcaatgaaagttccaagtttgaaaatctaggtcattgtggtggccgaccctctaccatggtagagcactcatcattcaccttgggaaataaatctggctttcgtattttgattgctgggaatcccagatctggaccaaggcatcttgcttcttgtcttattcactgttatattcaacacgttgaagtccgaaaggttgatatagctacaatttcacaagaaggtcatggtgatttggtacaaggcatttcacaaatactatgtaagttcttcattctctatttgtgttttatgttgccgtacactcttttattttttctcaatgaaatttgtttctacaaaaaatgttgtcatattaattaataatgtacagagttgggaagtttattacgtacccatttgtaatattctttgcaaggctgcagtgacatgctgatttggaataatggaatcaacaatctattgttgttctggtcttctggtgatgggagtttattattttttccttttcatttcattcggcaat

SEQ ID NO: 7902 - DNA, 1005 bp, Cucumis sativus
  Intron number 3 from transcript Cucsa.300610.4 (locus Cucs a.300610) derived from phytozome v7.0 (chr-ID scaffold0293 1; pos 164954 to 165958)
ctcgttcggtttgtatccttacaacttttgagttatactttgagtattttttttgttattgtacatttaaaatattcattgttttcgtctatacggtaaaagaaaaaaattatgagttaaaaacgcatctatattttggtacttttaaaagtgattgtttctatcacaaccattaattaagtagtcatgaataagctaacaaattaatgatggagagtttggggttggggaagagaaataattagtccaattgacaacgacgtgtcatctacttatttgtcttatggaaaattaatataaacatcaaattatattttttcttttgttttttttgaaaattaattaactctacaaatacttcttctatcatttttaaatctacatgttctgatatttattttttattcaaaatcaagtcaatttttttaaaaaaaaatgattaaaaaaaatagaatatttgacaaaatatttaccatttatgtaaaaatcaagtataattaatttttcttgttggtggtttggttttatgaagggtaaatagttggttgatttttctatttttgaaaagatcggtctttaacacgttaaattctgatttaattagatcaaaaataggtgaaaagaaaagccaaaaaaacccaagaccaaatggatttttaattcaaaatcttttagtccaatcatttcattttctttgtttttgttttttgaaaattaaacttgttatctttccctaaatttaaagtaaaataagttttaaaactagttttttagtttaaaaaatttgactgatagtagatgataattcaagaaatttagagtgagtgagtgaaacttaaaaacaaaaagaagacatttacctggttactaaattagaccatattatatagcaagaaaacttaaaagaaaacttaaaattcaaacaaaaaagttatgaactataacaattgttataattgaaataatttcctggtattttttttctaatttttatatttcaaacag

SEQ ID NO: 7903 - DNA, 733 bp, Cucumis sativus
  Intron number 1 from transcript Cucsa.264770.2 (locus Cucs a.264770) derived from phytozome v7.0 (chr-ID scaffold0233 7; pos 29259 to 29991 reverse strand)
gagggtttgctttcttcggtgagtattgctctgtgttgctcttcttatgttcttcgtaaaccctgtctcaagttcatgtattctttgttcatcaagcgatattgagttgtttggaacaaacttgaggatttttcaaatagccccctgatacatggttctttaccattacttggcttgttgagcaaatgtgcatgtagttttagctcaaatcactgtaccttgatgttcgattttttttagtataagaaaccaatcttataaaagacattaaaaaaatatactcatacatcctccaagaatggctgcattcgaaagaatgatactaagctgataattacgagaagtttgacaaacggatgcccataaggaggctttaaatctcgccccctccatatttcttctaaggaattcaaattggaagttttcgttttcgttttcgttatttgtttttaggatttcgaatttgaatttcgtataattggataaagatatgaatgaacaagaaggaaactactctggctactgtggcatcaaattgaaccaaagccaacttaagtcgtaaatgtatagatctatttttttctatatggtagatttgatgtatgtatactcatgaaccaaggacatatgctttaatttttattggagactgtagtagtatcactgactgtacctcctttattatctttaataaataggctgcagtccaaattggaagatatattgttacaat

SEQ ID NO: 7904 - DNA, 2678 bp, Cucumis sativus
  Intron number 3 from transcript Cucsa.034580.1 (locus Cucs a.034580) derived from phytozome v7.0 (chr-ID scaffold0044 4; pos 399038 to 401715 reverse strand)
gatctatcactttacttggttagttgttgctttattttctttttctttataagttgctttactttttttttctatataaattgctttattgtatatatatatatgatgtaatgaagaagttgttgcttattataaatatgtacgttcatgaaaatgttcatatatataaatgttaatggtgatcaaaactgtagatgtagagtgtgagtttaccatgacgatggtttagaatttggcactactgagtaattcttatgcgttctggaggccaaagcatgagtaactatcagcctcagcatagcttcgagttcaaagtcctgtaaacgaagggaacatgatgagagggtactttatcaatatcgaaaatggcgaaaaatagtccaaaaacataggagttaagagtgctttaggattcttaggtatatgaaatgactaacattcccttcacatattaaaaaagtttgggtaatcataacggatagcaattttagaaatattaattaagtgtatagcaacttttttagaaaattataaatatagcagaatctattggtgatagatttctatcgttgatggtctatcagatagaccaatattttcaacatagtccatatcagtgatagacctctatctttggtagactttgacagattttgttatatttgcaatttttttaaatgttgctatatgtatgctaatattttgaatctaatttctatattcgcaactatcccttttctaaaacgtccgattttcatgggaaacttgcttcttttggaggcccaaatgaaatttggctcgtctatcaaattctaatgaaggtggcctttgatgacgtcagccacctgcgagtttacaaaaaaaaaaaactcacatgcacgtgaagttggtccgctttgacaatattctcacttctctttcttgttctcgtcctcatttggtgttacgcgttctccctcaacctaattttgcccatttgaaaagtttaagttgaaacaaatttcccgtctatttcttttttgtctcattttgcccttgttcgttttctcgttcattcctcccattctttctcgttcattagagttccaatcgtccatttgtctcataaacataccttccacaagcatctattgaagctattagtgaagataacatgtttcccactttacacttctaatttccagtgcatgtgtactatttaggttttggcgttagggcttgcatgtgacattagaacacaaacactgaacgaacaagaaatcggagtacctatcgattcacgaacaagatgattagatatgagaaatagaaactgaaataagaaaaagatttaagtgaaactcatcagattaggaaatgaaaaacccaaataagaaataggacctagacacgagaaagagaaatgagaaatatgtagtggaaacgagaaaaccaaacaagaaaacaaactacgaacgagaaaaagacaaaatcgtaaattgaagcctaactctattttattgtatacagactttttttcgtgtaattcttgtaaaaattgcatgaattcgaaattgcggagaaggatcatttgatactgtgagtatgctagttctgtttgggtgttgctcttccagatgttttgtttctttatggctctctagaggggtactaggagtatgatcgaggagttcctcctcaatttgcctcaagggggagaagggttgggttttatggcttgctgggatgtacactattttattgtctttgtggggtgagcagaacaataggatttttagaggcagggaaagggaccctagtgagactttcttcttttttgccattatgtttctttggaggtttcgatttcaaagatcttttataactgcttcatagacaaatcttttataactactcaatagacattcttttgctcagttttttgtatgcccgtagtatgctttaattttttctgaatgaaagtggttgcttttataaaaaaaagtatcttgttgatccttcttctataggtgtgttggtttttggtttttacaatgctttggaggattaagatccttaagaaggtgaggttctttacttgataagttcttcatagtcatgctaacaggatggatcgacttgtgaggaagatgcctttgctggttaggcctttttgttgtattcgttgttggtaggcagaggatttggatcatattctctggcgtagtatctgggagaccttcctttagacgtttgggatgatgtatgctcgtcatagtcatgttagtgctatgatttaggagttcttcctcaatccgtcttctagggagaagggttgtttcttatggtggggggtgggggttgtgattttataggtcttgtgaggggagcagaatagtagggtgtttggaaatggatcctatggagatttggtccctagtttgctttcatgccactttgtgagcttcgatttggaaatccttttgtaactctattggcgctattgtgcatagttggagttcctttaaagggtgcttccatcttttgtgggcttgtttttttgaatgggccgtattccttcattttttcttaagttgaagttgtttttatagaaaaagtcatgcagccgtgttcttcttcttcgtatctttctcaattcttttttattacaggaagagttccgaaaggccatactgcaa

SEQ ID NO: 7905 - DNA, 4872 bp, Cucumis sativus
  Intron number 2 from transcript Cucsa.313610.1 (locus Cucs a.313610) derived from phytozome v7.0 (chr-ID scaffold0299 5; pos 2789801 to 2794672)
ttaaagccggctttcttggatcagtcaaaattaaggtttgtgaaattgttggaactcctctttgaattaagtaagaaatctttattacttcaatagtagaatcgaattacaatgaaagacgaattgagaaggtctcaattcgaagaacaatcctctctctctctgctatcctatctctcaaggaagagcatgagactatgatcacaactcactaactaacttttcttcttcctatctaatttctatttatactaatcatcttatgaaataaccacttctaactctactcctcttcgcacgtgcgccctcctatggtccctttctgttttttcttccttttactatattgatgtatgataggggtctatcattacattccctttccaaactcatcttatcctcaaggtgaaaatctggaaacagttgctgaaactattcacacttttcctaggtggcttcatgaggaggtaggccatgccatttaatcagcacctctcgattcccttctttgttctttgtataaccatatatttcttcctgtatagccaaccattcgtggttctcagtcaaataaggtatcatttcctatcctatgatcacccaccgttttcttgagctgggagatatgaaaaaccggatgaatggatgatgactcaggtaattctaatatgtatgccaccaagccgattctttccacaatcttataaggcccaaagaacctgggagacaatttctcattccttttcttccgcaaagagatttgtctataaggcctaatcttcaaaaacaccatatctccagcagcatactccacatcttgacgcttcaagtttgcactcttttccattttattttggtcaatttgaagatgctcctttaatgcacccaaagcctcatctcttgccttgagctgctcatctaaagctgagttagatgtgtcacgatcaccataaatacaccaatgggggaggcatggatccatacaccgcttggaaaggagtgacccctaaggacctctggaatgtagtattataccaatactcaacctagtgtaaccatcttgtccattttttcggccgttcaccacagaaacaccgtagataggtttccactcccctgttgacctcttcagtttgaccgtttgtctgcgggtgataagctgtacttcgattcaatctagtaccagccattttgcacatctccttccagaaattactcaagaagacattgtttctgtcagagacactattggcttaggataaccatgtagccgaaggatttccttcacaaacaactctgccattgtcttcgctgcgaaaagatgcttcagggctaagaagtgcccatatttactaaacctatccactaccacaaatattacttcaaacccgtttgaagtaacaatagacctgctggatatatcactccaaacactattttgaatttccaatggtaacaatagacctgctggagttagttctaaagacttattcttctagcataccacatactcatcacggtatttcttaatatatgagttcattccttctgagtacagcttactagtttttgtcttatatgtaggtaaaaaaccagaatgtcctcctaacacagagtcgtgataggtattaaatattgttggaataaatgctgaagtcttggacaatactaacctgtacttgtatcttagcgtcccttgccgaatggaaaatttgctttccttgtcttcttccactatttgcagttcaaccataatcttgctcaacttttcatccccttccacttccttcttaaccacctgtatgtccaccaatgttggggttgtcaaactacatagatgaacggtaggaggcattcgtgataaagcatctgctgatttattttctaatcccagcttgtatataacctcaaatgaatagcccaagagcttagctacccacttctgatattggggttgtatcagtctctgttctagcagaaacttcagggacttctgatcagttttgactatgaatttcttcccaagtaggtaaggtctccatcgctatacaaccaaaaccactgccatcaattctctctcatacacgggtttgcctctgtcccttactgataacgtatgactgaagtatgcaataggcctcttggattgagtaagcactgctcctatgccatatccagatgcatctgtatccagttcaaatgtagcattaaaatcaggtaatgatagaacaggcagtgtcatcatggagttttgcaattgctggaaagcctctgtagattcctcagttcatttgaatcctcccttctttactaattgagttaatggtgctgcaatttatctagtgttgaacaaatttacgatagtagctcgttaagcctagaaatccgtagacttctctttcatttgttggcataggccactccttgattgctttaatcttctcatgatcaacttctaccccttggtccgagattatatggcccaagtagtccacatattcctttgcaaaattgcattttttttctgatttgcatataattcattcttcctcaatatttctaatgccaatctgaggtgcttcaagtgtatctccaaatctccactataaatcaatatgtcgtcgaagacactagtataaacttcctcaggtaaggcctgaaaattgagttcatcaaggattgaaatgtggacgcactgcgttagtcaatccaaatggcataaccatgaattatccccctttttttatccaactaaccttatagggactcgggtgtgggtcaattttcaaatttatggcagaaactggttttttagacactaagtttttactactaccactaccaatgataacttgacacactttatagttaatggtgcatcttgttcgaaagagggaattcctttgaggtatttgttcagtcgtaggggtgaaaagaattctctgaactacacaagatagttgatctccttcatccggtgttgaaatctcatagatgttgtcatccgagtcatcatcttcttgtccttctttaattgtcaaagttcttctttgaggtcactcgttggagaggtgtccttgttgtccacacctgaaacatttacccaaagtaggacggttataaacgttgtcaaccttcttctttgtggtattctcacttggtttggtggctggaatcatttgtgggttttcatctttcttagcaggctgtgaagatatagaggaacttccttgctgaaaggttctaaatgaattagttgagtttgctctctgctgtttgtcccaattattctttctttgagaaatcttgtttttcttgatttcttcactgtctccaatcttggaagctaaggagatgacatctgaaagaaaagttaaaggatgtaagtttacaatgtctttaatctcatctcgtagaccatggataaacctggaaattttttggtgttctgttttgggaagattgtttcgggcaccaagaggaaaaccttctttgcgagtgctagtatgcaggatttgtgtggaataacttttttcatgaatttgattttgcacttgctcggcaaagggatgttcattctatgcccggggagttgctcctccatttgcctttcaaagagaaagaccatttttttttggcctgtgggaatctgctttattttgggatttttggagggagaagaaaaacaaagttttttgtggtgtggggagagacctagtgaggtttggtccttggtgaggcttcatgtttctcgttgggctttggtttcaaagatttttttgtaattattccctgggctatattttactttgtcgaatccctttctctgggggtttgaatatttgtatgcctttgtattctttatttttttttctcaatgaaagcatttttttctgcaaaaacaaaatgctactctatttcttcattcttttcgctgccttcactttcctcattggtttgctttgtaaaatgctaatgggaatacaattttctttcggtgtcagcttgccctcatctaaatttcttcccattgtttgaattcttatacgagtcttttttcttggtgcttgattttgagtctgactgcaaaagttgagtgttcttttgctgtctgagtgaaatgctgagttctggatatcccagaatctttttggttttcaagattatccttgagactgggattcagtttcttgacgtaattgaaccttgtagtggtctgagtgagttctcttgtctgcctttcgagctgctgtaatagattcagttagcttgtcaatggacacatctgttttcttttgtgtaaactatctatttgttggcttccaacttgtgctaaggtattgttggtgcttagacaataaattcctgggtggttgacctactgtcttcactatctgttgtgttaaactttagataagaatcaattttattgatggatgaaataatccaaagccgttcgtaactttctggctgaatctgctctctcaaaattctgcacatgtggggcagtcatgaatgagttgcctttccatggctggcacagattgactgcttcagtttattgtattgttttagccatcctccatttccatcattcttgagttagatgcaccattgaatattgtgatcaacatcttgtaaacaagatttgaaatgtcgttgatgaaaatgtgaagctttcaaatttgccgaaatattggtattgatggatattgtaggaaaatatttttatttgttatctttcatttacctttctcggttgagctttactgctacttgaaagagtacttgtcattttgtttcaactttgactttagagctttggagcaacaaggtttttatgtcaataacatgttttccaaaccaggttcc

SEQ ID NO: 7906 - DNA, 1539 bp, Cucumis sativus
  Intron number 1 from transcript Cucsa.084650.1 (locus Cucs a.084650) derived from phytozome v7.0 (chr-ID scaffold0086 2; pos 338357 to 339895)
attccgctgccacttcccttcttgttcgtagtccggtaactcttttttttatttcctttttccttctaccaataattacaattccttcttaattttttattgcttttatttgttttctttctcaattttaacttttcttttcttttttcactttcataactgcaacaaacaatcataaatatttatatcacctctcacatgttaaaaaaagaaatttatcattttttaaaaaaatttcaggtttgttcttcattcttatattaaacaatcgtgtgtcaaatctaaaccacatttttcaaaaaaaaattataaatctaaacaacacttttttttagtcctagatatcaattaatcactaaatattctttgtattttctactgtagacatgtggttatagaacatttgtgataactttcattggtgagcttgtgagtttttctcatttttgaaattgttatatagtgtataagtattttatcgtttggttatatttgataagataccttattttctaaattagacagtttatttaaccattcagtttaattaattaggagagggatttataataattcattcaaatatgccaaaatttgaattttttattattatgttaatttgaaaaaaaaaaaaaattcttgatctacgtagtttgtgtaaaaaatgtatataaactttcaaaattttcaaccatgcccctctcaacatttaaaaggcttcaaaaatgttattacctttgtttaaaataaattaccttgaacttaagaaaataaaaaatactctaatgatccaccaaaataaaaacaaaataaattattttaatcacacaaatttcttctttctaatcttaattacaataatattcttttgaagtttttgtatcactcgtactttgtcctctccaaattaaagaaaaaatatcactaaaaaactattttctttttcattttaccaaaattctttctaaattaattaatgcttttatttgttttcattttttcctaaattaggaaatctagccgttcccgtttaggattgggatttgaaaaaaaatatttgagtccattaaattaaaagctttttttcaaaatggtaaataaaatacgaatcgtcatagtcaatttgactgatcgtaaaaaggtaatctcaataaccaattaacatatcatgggttcaatccatagtgaccatctacttgaaaatttattgcctacgagtttaatctatggtgaccatctatctaagaattaattatcgagtcaggcaagtctcacttgatattagttgaagtggagaccagcgtactcagggatataaaaaaatagtaaataaaatatgtgagattgaacaattcacattttctttaatttttataactacaaaacatttttttttaagaaagtaaataagtcaactatccatgtgatacaaaattgaaaagtttgtggatccatatattattgatttccaaagttgaatgtctttctaccatgttcgtaacagatacatatattgacaagaagattgataaatttgca

SEQ ID NO: 7907 - DNA, 574 bp, Cucumis sativus
  Intron number 2 from transcript Cucsa.125050.2 (locus Cucs a.125050) derived from phytozome v7.0 (chr-ID scaffold0100 1; pos 845852 to 846425 reverse strand)
aggttcggacacattctaaaactattaggaaagactttccttctttgagccttttgtttacacgtttgtttctgttttctgatagaatttagcgatgtagtaaaacatactagtcctaatatgaaagataccatttcggcatgagatgctgcccgttcttacactcttccactttgtcatatactttgcctaagcatacatttaaaccttaatcccttttggttagctaggcttttcttttgcaatgatccattcttgaattctgtgcttaaaaagctaccggtccataaaagatatctcattctcttgttttgttgaatgtgttcaagaagatttgttttgaatctttattttattctttcttgatcattgttagaaaagtaatttaatcaatggtgtgatctgatactcgatgcagtcatagtcattttctgtgtttgtagctgaaatattgtctttatgctgatttagacttttctgaagttgctttcctattaatgagttgtagatacctgccaaggttttcaagctttaaaaacaatatattcttatgccgcaggaccacctagctttg

SEQ ID NO: 7908 - DNA, 3154 bp, Cucumis sativus
  Intron number 8 from transcript Cucsa.108420.1 (locus Cucs a.108420) derived from phytozome v7.0 (chr-ID scaffold0093 1; pos 564335 to 567488 reverse strand)
tttctgagagtgggtgtcggggaaggaattgacaggtatactctactcatatgtcggagtgttgttctcatgtaacgttctttctaaattgaagggtttcacttatcagctatgcctctcttcatttactgaagatggcaagtttagtttaacgtgtcgtactcatcatttgtattagtaacatccaaggtttaggaaatacacaagctcgaaatgttgaagcataagaaggcaaccacaaaggcaaccacaaaggcctaaatctcattcttcaacctcataataaaatgccccagtcttcttggtctttgtgtctacaagctcaggggaaaatggataattttgtagattccctcctactcctttgttgctcggttttcttgtttgtggttcacaaattttacttgcttcttgaatgaagtttatagctgagtaatactgtcgtagaaagcctctttaaactgcaaagaggtaattgggcccctactaacattgataaatttctttgtagacgccccaatgatgcctcctagatgtggtatcagttgcctcaataagaatattgcaggtgttgggaaccaaatcttgagtttcaattgggctggtgccatttgctagatatactcatctgtagggaatcactactacttgacaagaattcatatgctcaaatattgtggtggaagttacactacctattcttcgtcattgtgcatggtgttgttcaactcagcttatactcatttgtttagatttaaatctacctcatttatgaggcaagctaagttagagttgaaaccattaggctacatcttatgtgtttctacaccaagcttaccaagtgttaaagtcttcattgctcttgcttagtgtgttactcgtgatttttggtgtattttgaaagaaaagaatagtaggatgtttgaagataagtttgcttcttttgattctttttgggcttttattcaacatacaacctcttggtgcacaaattacaccaaattattttgtaattattgccttcttatgattatcaacaattggatatctcttttttattaattttgtaggaaggggttcctctacctctggcctggccttaggctgtttttttagctcttttgatgagtatctctgtttcttataaagaaattgtgtcaattctcgtatcatttgttgaatggtcttggatatggatgactgtgtttttattctgaacatggaaattgactaattgattgtcatcagaaggaacttgtgttcaggccatccttgagaactcccttcaaggtttaggggtcaatggcaggccaaagtccttcttaggtggtctctgccttgaaggaaaagaagttgatagaccaaacggcatgggacctattagctagtgcccttgatagtagatgtactgaagttacagtaccctttgtaccaattgtttgggagtttgcaaatgtattccttgaggaccttccaagtttatcactagccctagaggtagatttcaccttagagctcaagtcaagaacaactcccatttctgaatctccctataggcccaacagagttagagccaaaattatagatacaagagctattagacaaagacttcatacgctacggtgtcttgccatgggcacattggttttaattgtgaagaaggatggatccgtacggctattgtgcattgaacacgatgcaacttccattttaggggccaccctagaaaagttaagcctgctgtgagaccaccaaccatccatcagtataagaggaagggtaataatgtaattgtgggaagaagttagttatgtatgggagtgaggaccgagaatattacataaaagggatgagggaaccaggtgagagcggaggggtattttgagtaggaagaggtagtataagtagtaaaggtttgtatttcctttttcattagcgtggaattagtatcagactctcatagtgagaggggagttgtagccttagggctctttcttcatttaataatacttgtttgtaagtagataccttacacgtgctttgactcaaaagaaatactacatttagtggtcgcttaagtattttcttagggagcatgcaagtgaaaacaaaacttgttggaagtacccgtattggtctgtaggggatagttttcactctcgtaagccagtagagacaagtaaggtgatgtgaccgaattgcagggatgcaagagaatgtgaaagttgtgtactaaattcagattttgaatcctaggtttttggtgttacaaatgctatcaaagtagaatctcttccaataggatgtggttcaaggatgggccaaagaaaagttggtgagcactcgacactcgagtggaaaggggcgcatgaatgaattaatactacacccgtatgggagagatcctgaggatacaccgtatggttaagaaagaatttaggggcttgctgtgtgttgaaatcacaagggtatttatgtaatttactgtaccctagtttttctttccttttctgttaaggctcatgttgcctatttatgctttctttttgtgtctttatcatttgtagaaaataataagaaaagtctccattgtggtttttctccttgtactttccacctatctcggtgtgttttttctttgtctctttcaatagttactattatcaacaaggtgaatttttctttttggtgtctaaatcatagaaactctagaattaagcttgtttggcttggagcaattgtatgttgggtgaccccataaatttttctaaaaatcatgtcggtgaggacaaagttgttgaaatggattgcatcagtcaatagagaaaattcacccttgcaagtcgttcaagacgattgatgtgccatggctaggttgtagggaatgcagggaatgtaggacacaataaaaacccaatacccactttctggaattgatgatctatttgattggttaggggagtagctgtattctttaagattgactagtaactaggttaccaccagttgaggatatttccacgacttgaggtctaggcatgaccgtatgagcattacagatttgttgtagtgtgtggacctgattggtctaatcatattgttttcactgtaaattgcaggctagaaacatcggattcacctgaacctgttgctc

SEQ ID NO: 7909 - DNA, 1359 bp, Cucumis sativus
  Intron number 3 from transcript Cucsa.054170.1 (locus Cucs a.054170) derived from phytozome v7.0 (chr-ID scaffold0058 2; pos 473530 to 474888)
gcacccaagatcttctgtccaggtaaccaactacataaatcatcaaatcatatattcataatattatttaacatatgcattcttttcatttttttcttttggagaaatcagttctcacacgcttatatatttacataatgtagaaagtagattgatgggtattttcatagatcagttctacgtttgattttaaactttcgttaaaaatatatattcaaaaattggattgtgttattaataaccattttcccgtaaaatatttaaatataagtatctacgccataattttagttcacaaactaatataatttgtgatatattttaagttttatatatttattaaacacaaaattaaaaaatttatgttgtctattagatctaattcaccaagtcatacatggtagatcaattaattttcaaatgtgtcagagcttgtttgttaaaaacctatacaaaattggatatttaaagacacattgcattcttctcaaagtctaaacatcaacttccttttacaaaaagaaaaaaaaaagtcttaaacatcaaattttaaaaaccccatatttcctttattaaactaataacttctcttaaaaaaacacaactagtataaatattaataatcaatttaaaaaaataaaaagtaatctacttttctttaggagggtgataactatattttcttttagtacaaatttaagagcacataagacgataactatattttcttttagtacaaatttgaagtagaaaaatttcaatgtgaaacaatttagtcttgaactatatttatatataagtgttagttttggtacaacaactatttatatttattattggtattattattgttttatttgagcaggaataagttattgtcatcaaacttccttttgttttcttaaatagtaatttttttaaaaagatgcaataaatctcaagtgagaatcagacagaacttcccagggttaaaattccctccaagtttagttgtcaatttcatcattattttggtaatgaaacttgttttcgtttcaaaattcaaaaaataacttactaataataatactcccctttctcataaaaggaaggtttcaatgcttaaacaataataaaaagattattttaaagaagaacactcacaaaaaatttacaaatataataaaataatactttcaattgatatatacggatgtgtctagttgagttatgtgatctattactaatcaaaattaacattttttatatttataaacatttccaacagtttgtgaacaatcctcaatcctaaatattaagcatgatggaatgatgaacaaaattttcactaagacaggttgatcaaaaccgggcacgacg

SEQ ID NO: 7910 - DNA, 1948 bp, Cucumis sativus
  Intron number 2 from transcript Cucsa.358470.1 (locus Cucs a.358470) derived from phytozome v7.0 (chr-ID scaffold0358 6; pos 2341 to 4288)
ctggtttaagaggtaagtgcatttatttagagatgaagaagaggaccttacaaactttccttttttttttttatttgtttaattataatatttaattaggtgtgagaattgaatatttgagtttgaggcaagtaatacaaattattgctatgaggtagatatatatgttacgatttgagtctattgttgtaaaagccaatttatgttgctttcaattgaacaacttttttggttcgaaaggtaagagtaaacaattttatccttaaaacatcatactttactctctcaactttcataaatcaaccaaataaaaataattgtgtttttatttctcgttttattttcaattgagctcttcctcgctaagtaaaaaataaagggaaatcatatatatatatatattatgaaattttaagaatagaaaaaaatagttgaacttttttttaaatatagcaaatatgtcattgatagatgtacatcaatccatttataaaaataaatttttgtactatatttaaaaatattttgattaatttttgttacatttgacaacatccttttaaacaatgtaccaattttgatctttagattttaaaattataacattacaagaagtgtgtaggtgtcttagttttctggtaagcagtacaccaaaaagaaactcaaaccccgttaatctatctaaagattcatcttattttttgatatattaattacaaaaaaaatcacgttttgttagggatattttgtaatgatcactatgctaagcttacttgggttgcttggctaggaattttcaatcaactcttggccactaatatacaatgtttggtagttaagctatatgatcaatttattatctaacattggctttaatcaaagacatagtagcacttcaaaagtatgtcaaatcttaacttcctaaacatatgttgcaattttaaccctaaataagcatttcccacttcaaatatctttgaaaaaagtttctaaattacacattcaatagtttataaaatatgcatataagataccaattaatacaattttaaagaaaaaaatgacattagagagcacagttatttagttgtccacttgtactgcatcagtcaaacttattttatgcaaaagaaaaaattattttattgaaggaaataattgtgagtttacaattttttttttttgtcaaatcacttattgacctaaaaatgaacgtaagagaagaagagatacattgtagtaaatttagttagtaaaattgtaacattaattaaattaagggtcgaatttataaaagtttaattagggttaaaattaaaacaacttaaaatttgtaataatatatttatttggatttgtttttctctaaacgtttggtgtggattattgatgatgaattttcaataaaagggaaagcttcttaatgtatggcatatttcattagcttgttggatttttcaaccttggtgtttgatttaatacaaaagaaaaatattttatgaaaaatcacacacatgtatatatatatttgttagaataagttgatgtgaggtttttatcttttgaaaaactctaactttattattatcttaaatcaatcattcaaccacaaacatggctaaaaaattgctatgctaaactcactttgataaaaagaaaatcaacattgagaatttgaaagttggtttactatttatgtattacgctcatttgttagggtaacataaaagtagttacacttgtgttaaaataatactttcacacatgtgcgcgggtagttgtcgctcatctaatatgtaaaactcaaactatttaacaccaaagacatgtcgaaaatcaaagtcaattttccctacaaataaaatgatattctttcaattgacaattttattatataatgttattgcttatagggagtgtaaagtctccacttgaattgagtgagaaa

SEQ ID NO: 7911 - DNA, 1069 bp, Cucumis sativus
  Intron number 1 from transcript Cucsa.048030.1 (locus Cucs a.048030) derived from phytozome v7.0 (chr-ID scaffold0054 2; pos 2893477 to 2894545)
ttcccaatcatacaggttagttttcgatcctccgtttgtaatttgattgtttattttctgcctggttgctagactagtggaaacttaggaggttataatgactatggagaaatagctagttctgtgaatttttcagaattggagtggttctgggggttttatttgaattggaaactggtgttctgatacgcttacatctaatgatatataagggtttgaatgcaaagagaagacactgaattagtctatgccttatttccaaaatttacagatgggccttagttccaattggggctcattgttgaatatcatggcaatgctgcaatacataaattttgattgtttgactgtatttattgatttcaacttagaagatgtagtttgatactttcttattgaaaacagattatacttgtaagatgttctgtgcagaaggaaaatgtctttggatcttagtagttttgacagcagctttgagaactatgtcgaataagaagtaattcttaggatgcataagaaaatgactttgaagatttcgagtactataatatgccttgctgcgtctttggatatcatttatggttaaatttgggaggatgctttcaagatgacaacgtgttacataatgtttgttatttgtaaaaggcattcttcaattttaacccttttctagatttttaatattattctacaattagtgattttgtcattggttaagtttctgctttagttagagattgatgagacatcctttgtcgaatgtctaaacacaatttttacctattggttcattttggagacttttcaatacaatcattaactcaccgttataatgtggaagccagttatttttaatattgaatttattactttttttttaattagttaattaattaaaatttcttttctttttatgtgccttatttcaggagaattttaagctaccgtatttacttcacatatctttgatatttgtgttcttgcatgtttcatggtcaagatttgaagtttctggtttactgattgcaaatacttttatcaacagcgtcccccctttttcagcttcaag

SEQ ID NO: 7912 - DNA, 1532 bp, Cucumis sativus
  Intron number 2 from transcript Cucsa.189560.1 (locus Cucs a.189560) derived from phytozome v7.0 (chr-ID scaffold0130 5; pos 400608 to 402139 reverse strand)
tcatcaggtatgtatgatgcttttgatttgatatgtcgactacaatattattaattttaaaatttttgcaatttttgaatttcaaataaatgtataatataatctttatactttagcttgcgtgcaagttaccctgttagtatcctcttttggaactcatagctccttgagttttgaaaaatgtaggttttacattgggaattcaaaattttcattattcttggttacatgcataaaagtgcgtggatgcttaagaggggcatctcttctacctctaaaaggcatgcacctgatggggttttatttttaatcataaatgagatgtatagtgtatgcctcccaatttcgtcatattgtatattggaaatgtatcattcatgttgggcacttgaaaacgaaagggagaaaaccatatgcttcataatttgttttggttgctgacttgctggtgtaggggaaaactataaaagtcgagaaagagaatttgctactctagaaaccccaaggatgaagagacttttgccctttttcttctctgtaaatttgtctctactctggaccaatctcttttgtctaagctctccaagccctgctttctttgatacattcatctctgagaaaaccataacagtggtttagtataatagctcacacaatgatctgttttttttggtcaatggggtgcattcttttttcgatagtttgagtgtatcatcacagaagattgttacaacactgggaggagaaaaagatgagcagcacgtgcagaggtgcattcctccctccaaatgctttaaccagaagtaaatatgggatactggtttgaatgtgctatgtttggtgcaagcttgtttgggattattgttagacttggtggacgtaaggggtggctgctatgaagatgcaggttctttaatgtgactgtgatggtggatgaggcattagtagctagagaggcgttggtgtatgctcagacttcagtcttaggacattagtagctatgtttgctcagacttcaggcgttggtgaaacgttggttcaatgaattaatcttacctatcttttagcatgggacttttggttaggatgttggactcttctcccctcacgtataattctttctattttattcttgttattgtaaccttgatcctgtagctcattccttgtgaagtctggaactttttgggattggatgtttgttgggcttcccgccttcctagttctggttggatgccttctttatttcacacagtgcattgtctatgattgtaatgccttctttcctctaaagaaatacaattggaaaatatttatctgctgtattcttggggtattgactttttttctgaataaaatgacttgctcttttggtctggatgtgtttcatgtcatgttgaatggtatcatgagttttttatttacagattcttttctgatgatatttttcttgttttgattcttcaatgacgccggtatgttttattctattgccagccttatcaacctggatatactgcaccacctcgttc

SEQ ID NO: 7913 - DNA, 4607 bp, Cucumis sativus
  Intron number 3 from transcript Cucsa.169910.5 (locus Cucs a.169910) derived from phytozome v7.0 (chr-ID scaffold0117 4; pos 140209 to 144815)
agtttacacaggttctggttttttttctgtttttatttctttattgttgatacttttgtatgatcaaaagcctaatgagtgcattaaaaattgtaataataaaaaagagcctaacgagtattgatgatttgttgttccaaattatttgcttcaacctaattgtctttcattgactactttgctggtatatatttggtttttcatcaatccttgttgaggccagctggtggttcttcccttatccctattgggcttccttcacatattagatcagatttagaaatgttcttggcttgaagctggcttgacttcatttgctctggacattttgattttatcccatgggctgcaagagcacaagatgatcctgaaatcacttgacgtcctttaccatcaattcccatccaccttggagaactagctgaaattttgggtagtaagagttgtggtcacctgtggatttagtataggctgggggcgaatgactttcaactttatgttctttatataatatatatgaaaaaactgaaatgttctttatataatatatatgaaaaaactgaaacaatttcagtgccagtagttagcctagtggtaacactgtggtgtgtgtctgaattattagacagaaacacgtaaagaaggctaaagtctttgttttggaaaattttctattattctcgtaaaatgacgaactagggatttttatactaaacccaatagtcaactaatatatcaggaaaatatagaacattacagcagaaacacgtaaagaagactgaagtctttgttctggaaaattttctattattctcataaaatgacaaactaggggtttttatactaaacccaatagtcaataaaatatcaggaaattataaaacattacagcttctaagatatcaagggaatataaaaccaacagtcaactaattactaacaacacagtgagcatagggagcataatacatcacattcctccccttaagaagagcaaactcgtccttgagttttaggttgaaagacgtagctggtcgggagggaaatactcgaatatatccgccacattgaagataggattgatgtgtatgatcagggagatcaatcttgtatgcattatctccaaatctcttgattattggatacggtcctatcttctttggctgtattttgctgtattttccagccggtagtcttgcctttcgaaggtgtatcattactagatctccttccttgaattctttaaatctttgatgtttatcggcttgagttttgtatgcttggttcatcttttcaatttgggtggttacgtctttatggagctttgttattctttttgccatattttcagcttgggagctaagatcaacattagaaggtatgttagtaagatcatagttagtttaggtaacttagtatacacgatttcaaatggtgacttccctgttgttcggtttttcatatgattgtacgcaaattctgcttgggctaggacaaggtcccatatcttaggttaatcacctccaatgcattttatgagattggcaagcatcctatttgtaaccttggtttgcccatcggtttgggggtgactagtggtgctaaacttgagagttgtgttgaattttttccaaagtgtcttccaaaagtgacttaggaacttgatgtcacggtcggaaactatggacttggggattccatgcaaccgtaccacttctttaaacggcatccgatgttttcctacaaggcaagaactgagatattttgctaaattgatcaacaataacaaggacaaaatcataccccctttgtgtttttggaaggcctagaataaaatccatggacaagtcttcccaaatgccttcgggaataggtgaaggtgtatacagtttggtattctgctgctgtccttcgacagttttgcacgtaaaacagtgcttaccagtctttgtaatgtctcggcggagttgaggccaatgaaacctagcactcaataactggtaagttttgtctatgccaaaatgccctgcaagaccattgctatgaaactctttaatttaggcttcacgaagagatgttctagggatgcaaagaagattattcttaaagagaaaatcgttagttagatggaagtcattacaattgacatgatcaacacaaagagaccaaatttgaccaaaatcggggtcgtctttataaagagtgggcaaacaatcaaatgcaactacttgagatacaacttgccttacatgctccaaagttagatcatgcatgtttatcactcaatgaatgaataagataggtatctcaaattcattgacaggtcttgccttcttttattttttgtatttcaatatatttgggggttctaatgtgatttttatctacgtagtagacaccctgtccatttggctgctgcacggtgcttgtgcttatgcttatgccctccttcatcatgttgggtgcaactgttgttcaccacacaccgctactgttggtgattatagtcaattaactgatagtcactcaacccatatagtaccaaattttttaggctaaaagtcaaatttttagggtgttagacttgaccttgaggattgggttatgttaatttttttattgaatgaatgtagtaaaaaacgaaataaagaagagtgagcagaaaaaaggaagaataaaggaagaaacaaaaagaagtgaagaggacagaaaagagataggatatgctttccctctacattgtttatatctcttgcaagcaaacctattgtttaactagacaaggcaaggcgtgtttcaagggcagataatgacagaaatgttatcagagtaattgggaacattgttaaacttcgagggttagtcttttttcttcattttagcaatgaatgtcgtcttcttttagacaaagaaggaacattgtgtaagatccctagttatggaataaaggagtattagtagaaaattaatatggttattagttgggggcatattagtaaatagctaataagttagttaggtctttttggagggaaaggggtaaagaattttgtagtgggatttccttgcaagggaatttgggagagtctatccctctcaaaaggctaggggttactttgttacttgttcttatagtattctagcatatatttcatatattttcatatttgattgtttttaattgttcttgagttcatcttttgttcttgagataattcttgttaggggtcctaacacattgttaaggtatcaagtcttaagacaggcaattaatagttttcctgtattcatactgaaaatcagaaccaaatgagcttttacccttgggcaattaatactttaattgattctcacttaaaagggcttctaggtacctcaaatactagggggtcattttactactttatcttacctatctgtctatatataagaaggttgaaacatctttaaagccaaagcctcaactgttgttgtcaaatgcggtcaaagcaatccttgctgaaatttggttagaaaggaatcagactcttccaagataaaccacttgtatggagggatcgttttgaaatcgctaggattactgcttcttcttggtgctctaagcccaagttttatgcagatttttctattcaagatttatgcttaggttagaatgcctttgtcttcccagcttagtctttatgtgttgtcgatggcttttgtctttttgtttttactatggaatttccggcaatatcatccttacttgtcttgaatgcttctatgagtgaaagttgtccccacaaaccatcatggattctttcagcatgcgttgtcacatgcatcctaggaaaattcacaggaggtcacataacatagaattgctttaagctaagtacacttaactttagagttcttatgattgtgccaccaaaatggaagagacactttgttggtatagctgtatagatagtaatttccaattcttttaggcttttcttaaccatactttcatgtcctcaagatccctctcattcagacatgatatcagttcattcacatcctcctcctaatatcaatgtgttacatgaaaaagttcatggttacaaaagggttaagaacgaggagagaagatgaatgtatgtcttatagaaatttcgagcgaatgccatgtcatcgtgctagactaaaggattttagcccatccatgaaaaggaatactctcatcaccttatcatccaaaatatttcgtgtacattcatagctcatagtcatgaaatattgaagtgaatttataatggatttgtgaactttaaatattttttgaaatggaaacgagcctcttaattgataaaatgaaataagactaatgcttactatacaagagaagcatctatgaaaaaatgtggtaaggcaatgatttgacctcatggttcttctgtggcttatagtttctgattgaaacttgaaattgcatacgtcatttgctttaatgatctaaagatccaccttgacctttctacttctttgttataaatgctttattcaacaacattgaaataataaagaataaaagaaatctatatgcttcaggaattcaagcgtatcaaaggaaacattaattcaat

SEQ ID NO: 7914 - DNA, 1482 bp, Cucumis sativus
  Intron number 1 from transcript Cucsa.355850.1 (locus Cucs a.355850) derived from phytozome v7.0 (chr-ID scaffold0357 7; pos 386674 to 388155 reverse strand)
catcaccgttattgtcgtcttcgagttttctgttggtaagttagcatataatgcacacagttgttcaatcttcattttgttgagagttttggttcagaggactatgaaggcctcccaaggcatactagtagtcttctatgattcttcctctttacctttgcctttttcttccttgaactgctttcccattattttctcctctgattcctttgttttcttcctatattctagaactctactaaaaggtgggggaaaaaaaggctgaatttctaaattttcaaaaaaatttaagtagttcaattactttttcaactttaaaataaatttattatagaacattactaatcccaaccattctgcttttgctatctactttctaccaatattttaaaataatgacttctataacttgttatgttataaaaatttgttaatatttgaagtgtttacttgaaaatttcatgtcccttccaaagaaacgatgagcaaatacggaaaaatttgaaatagttagtgcatagaaatttacagttttcaaaattatatttgcatagtgttttgttttagaaaaatgacatccatacatagaagccgatcgacaaagaaagcaacaagtcaaaagaataacatccaaaatccatctcaaatagttagaagtccaactatatcgatcgaatgtctttcaaaatagaagaattacataatcaaccaaatttaaaatccacctacatataaatattcgatgtttcaatatttcaatatttatccaacacttttcatcttcttctccacctacaaggttttgaacccataacttaagcagttggatcaaatttcaatccaaactcttaaactatgctacgaaacggttgggtatatatttatacaacagttatactatatatatatatatatatagtatatgtatgtataataaatatgtcatgttttgggaatttaataagtatatatcattaaccagtgaattttagtttacacattgtagtcctataatataatttaaaatccaaggtcttattaattatttttttattgaaacaaatattataaaatgctagtatagaaacacaacccatgacttaattgatctataaagtattggtcgactcttcggaaaagtaaatatgtagggagattaaatagaaattaatatggacaaaagcaaagagtgaggaaatatatatataatttataaacatgtttttcttttttttgaaaaggaaaacatactttttttagttattctacctacaattttatcatttattacctacatgctaagaactatgtcaacttttaaaattttaataactaaaagcaacatgtttaaaatataattttttaataattttggaaaacaaagtatagttaattactaaacagatgttacatcccacgtattgatgggttgttttggaataaacaggagcaacgcttggaaaagggttgaatagaacgaca

SEQ ID NO: 7915 - DNA, 2523 bp, Cucumis sativus
  Intron number 12 from transcript Cucsa.196910.3 (locus Cuc sa.196910) derived from phytozome v7.0 (chr-ID scaffold013 57; pos 473452 to 475974 reverse strand)
caacaaggtaaatcttgtactgatgctttgatgagagctttggttgtgtctttataaaatggcctaagcagaaagaaggtagcttttaaggaatcagttaggaattaagaaaataataatagtaatgaaaagaaaggaagaaaccacagctcaaaactataaatcaattgtgatattacagtttatgggggaaatgaaggtgaaattgattttatgggataagtgaaaggccattcgtttttcatttttaaggttaaaaagtctattgtacagaatacataattgtttgtttgaggaacaagtgaaaataataggaggtcttaaggttaattgataaatgcagaaaaagtaaacttttccattaaagaaaattaaaattattttactggacaattttttttaatatttatatatacaacaaaacatcacaatcaaccatatcttagttgatgactatattttaactcattttgttatgttaaaaatagcttttattttttaatttttgtcctttgttgagatgaaaattaaattccatttttctcaattattacatatttaaaaaagattatataacaaaacttataacaacaattagacatatagcagaattttatcatcgtttatagtggtagagtgaaagtgatagacacatctatcaaacagtaacaatttgaggagctttataatttagtaaaaatattatatatatacattaactttcataactattattacttttttaaaaaacatttccaaacatttccaaccagtttaattaagattcctaaattattttaagaataaataaaatgaatataaaacaaatgaactataaaataaattaaacttataaattagacttaccgaagttaagagacattgaataagaaattttcaaaactaaaaaaaaagaaaaagaaaaagaaaaaagttaaaatattaaaatgaaggtctataaataaaataacttacaaacaaaaagaaaaacaaataagttacaaacaaaaagaaaaacaaataaatgaaaacttaccttccatgttttgagaagatgttgaagaagcagaaaaaatcgttgaagttttataaaaataaaaaataataaaataaatatagttgaatagatttatggtaggtgcataaaatgtataattattatttcttgatggaaatcgaaaagttgtaaagttgtaatttgaatagaaaagaaagttttgaaaaataaattatacaaatattaagaattaaatagtttatatatttatatatattataaaaacgatagagttgagaggatctcgagtctataccaaatcttgtgtctatcaatactactatcaatactatatgatagtaatttattagtgtctattagcatctactaatgatattttactatatttgaaaacatggtatattcattttcaaacaactcccaaacatgtataaaatgaccaatcaagacaaataagcaaagctattagtaatctccatgataacaaaaaatttctaatcatggtctcaattcaaccccacccccaccttttataacgtggtaaagtgctaaaaatataataataataatagtaaaagattattgtcaaagtgattagtagtatttcagtttcttcttccttgacgtgttaggaggtttccttattaaaatattttgtaataaaattaacaataacttgcattaggcaccaatgcagttttgaaatagcaatttccttcattgatcttttatgaaaaaagaaatttaggaatctcttaatctaatcctaagactaaaaacaagcatttcttttcccttctttttagttttcaaaacttgcttttgtttttgtaaaggtagactacaaaaaggactatcaaacaagttttaattcaaaatttaaaccacacaattccactttctgttgaatatcactagtaggaaaaaagaaaggaagaaaaccatcaaatactagttgaacagtaaaaagaatagaatatcaaaacatagaaatattagaaaaggtcaaaaaaaaaaaaaggattcagataaaaggaaatattctgctgagtctgaaagtatggctacttagctttatatttataatatctaatctaacactaacacacccactcaagttcttaacaagcaacttttcccactacaaaaggtaagaatttctaaatcaaaattcttccctccaatttttctctcttcttttttccctaaaaatcccatttgctcatttctctttcttttttgtgaaatgttgttctaaagcatgacacctggcccaatcatttcctgaatttccattacaaagtataagatgaaggaataattataaactacttggtattgatatcaaacaatatcttgatagggattaagcagtatcttttttgtgaaatattctaaagcataacacctagaccaatcatttcctaaatttctttttgatttctttttgttcttttacaaaacatattatgaagggaatattgtccaaaaagtgctcgagtcca

SEQ ID NO: 7916 - DNA, 813 bp, Cucumis sativus
  Intron number 1 from transcript Cucsa.158250.2 (locus Cucs a.158250) derived from phytozome v7.0 (chr-ID scaffold0114 2; pos 390836 to 391648)
ggagttgttcttgtggagactattggtgatgctggtaaatctatattgcttactcttccattcatcattcaatttcatgcctaaccttctgttttggtttttctatggaggcttgaaatatgatgagaatgcaagtatttattgatctcattgtattgttacggtagcttggtattgttactttcttttctcaaatgtatgcctaatgcataaaaacgtttttgaggcttgtgcatttgggagcaaccctcaaggtacggtacgattgtaaggtttcaaggcaaaagctcatgcttcaatacaagattagaggttcgatagttacatgatgacaaatagttagatgattgatgcttgaacaggatttgttctctaggttgtacaactgtgtctttgaatttcaaatagttatacgatgggtggaatagtacaactaacaaatagttatatgatggcaaataggatctgttctttaagtacaacttatgtgtccttaagtttcaaatagttatatgatgcgtgtaatcaactaatagttgtctgcttcaaatgtggtcgtccaattttgaatgcattgggacatacaacgctggttgtggtaatggatggatatttgatttttttctttttggtagtttcgtaaaatcaaaattttctaattaacttgaggattatgcttcagcactggcccttactctttagaattgttgggtatgcttttaaataagcagaatttttctttttccttactacattgtttggagttactcagttgcgttcttctatcatcaggtttttggcctgttctaattg

SEQ ID NO: 7917 - DNA, 3003 bp, Cucumis sativus
  Intron number 2 from transcript Cucsa.042200.2 (locus Cucs a.042200) derived from phytozome v7.0 (chr-ID scaffold0054 0; pos 685870 to 688872 reverse strand)
agagatatcgcttctcatacgaccttgaaacccaggtgcgtgtatttaagagatgttgttacctgtattgggaagatgggggcagagggggtatttattatagcttgatggtcatgttttttcattgacttcttctttggttgagttctttataccgagttctctgtttcttacttgtttataattttctgtttcttagttgtttataatcctctgtgctttgtgacttctgagggataataatcgcacgtccacacaggaattcattgtggtggtggtggggggttgtctgtgatgtgcgttgggttttctagtgggtgtggagttcttaactggaattctaaaaactgaactggattacgggtaggctggaatcttctttctaataactgagttggttttcaatgtggatgcgatctgttggacaaaatcttcattcagctctccttgatcttagcttaggtgaacttggttttgataatctggtataaacggctcaacttcttacattatgtaaatggtccatacccactaattctcgagaaactttgctcactcagaaaaacaaagtttttaatacattaacccttccacttcttgcttgaactcaaaactttggacaatgtcttgaacataccaagtccttagctccttacctttgattactgtgtgtatttagggtgtgtggaacttagaatgattttaattaattgggcattcactgcagttcatcatcgtttttttttattcacaagaataatgatcatttaatatctaattaattttcctagtcacacatcttgtgggttaggaaggttagctcatgaaaagtcatgctctgcattttctttttgtattgatctggctctaaaagaattgaactgttcctaccactttttttttggataaaaaatatatttatcgatgaatgaaatatccaaatggaatgcaaaaaggacctttcatagagagtaggaatacaaaagatgtttccattttgcaactaagaaatttaagttgtgatcttttagagtgtgtagctttttacaccaacaaagagaaaaatgtttcattcaccacacacctttaggtggaggctaggccctagggaggccaactcatgaaaagtcatgggctgtgctttctttctatatcgatcagacttcaaaagaattggactgttcctacaactttgaatgaagtatccgaaaggaatactaaaagggcctttcaaagggagtaggaatacaaaagatgtttccaatttgcaactaagaaatttaatttgtgatcttttggagggtgtagccggttacaccaataaagagaaaaatagatgtgtcagtgattttattagttctctgtgaaattgtctctttaagacctttggagccgcattggtgtgtaatagtggatgttgttcaatatttgaggaggtgctcttgaatcatcttttccatgaaaaaggaagagttcttcaacgatatttcttttttgccatttgtgcaacatttggcttaatttctctagaattttttatggggtaaggaagttgcgggaggagctttaggagttgaggttttatttctctttatgggagcgttcacaggactttttgtaattattagcttggccttattcttttcgattgtacctcttctgtaattgggcatagggtttgttttttggacttggttttttgtatgtcgttgtcctttttatcattcttaatggaagcttggtttttttataaaagaacaatatttcaatgaaagttggccaaggaaaaaaaagctgtagttggccaatggccacgtcttgtattctccacctactaataattgataagaaactttttttccaatgaaaaaatgaaaccttgaatgtcatctagaaattgtaaccaatcaccctattctatattcaacaagttggtgaagcactcaaagtgatcaatatgcttaaaaatcattttgctgtctcaaaatttattacttttgttaaacttgtgtctatttagtatacttaactagtgttggatgcatgtctaagtctaactatagaacccaaatatattgaaatataaacaaaattagaaatacaaattaaagtgtttaaggtacttggactctccctttcttgatatctctcccaagccctgaatcactaaccaacgtatagcttcccttcctcattcctcttctatccatttataaccaaatttcatagaaaaaactctagcaaatcactaacatacctttactacctattaatatccctgtttcttaacctaatattgtttttataaaaatgtcagacctactttctctttgtaatatggtgtccaacacattaattgcactaactagtgttcgatatgtgtcaccaacacatggacacgtgccacgctacccaaactaaactgtttcttcccttcttcattccccttctatctattttataaccaaatttcatagaaagctctagctaattactaacatgtccttagcacctacaatatccctatttcttatcctaatatcatttctattgaaatgctggacctacttaactttgtaaatatggtatcttaacacatttattgcactaactgtattcggtatgtttccattggccaacgtgtcacgctatcctaactaaagtgcccctggtttcttagtttataattgggggacccataatttttatttaagaattcagtcaaccctccagaaacatcatgaatagctgagtctctacatacgagaagagagtgccatcaacaagtttctacaattatagttactgagtactttaacctagaatcacagatgtgctatatcagccctgttcttctctcaaaacgagcatccactactctatttgttgttggcaaatggctattttctttcttttatgtttccttcgatatattcttccaagattcagatctctaaacacttgtcattaatcatgtatgtagaaaggaaggacaagataccc

SEQ ID NO: 7918 - DNA, 2417 bp, Cucumis sativus
  Intron number 2 from transcript Cucsa.118860.1 (locus Cucs a.118860) derived from phytozome v7.0 (chr-ID scaffold0099 8; pos 723706 to 726122 reverse strand)
tgtcccaggaggcagcttgtcgtcactcttgcgtatgcgttcattatttctgtttgatttacttatctactctataattctcaattacagtaacctttttctctaccttaattttgtataagtcgttttgtttgtagtttaatactaactttaacaagactgttgtgtggcagtgcaactcatcaaacatcccctttgacaaattatcctaaaaaagaactgtggaccaagtgggaagtacaacgcatataacatcattttaaacaaattatcatcaacaaatttgtggaccaaaagaaatgtaatagtatcaaaagggagaatgtaatttaagctactggattggcgatgataaatctgctatctgctacttaaggtcatatattgtttttgaaggagtaaaaactctcatgcttttgttaagaaaaataaaagaatacaagagggcacacaaaaatataaaaaacaagcttgaacaaaaggagcctaggactaattattgaaaacaaaaaggattccaattcaaaagaacaaaaccaatatcaaaattatacaaggcttagtgattaaagcccaaaggaaggcattagagacctaaccacctcccaaacttccacactcgatctctctatctctccaagaattctattgttcccttccaacttaataccccacgaaatggcaaactagctaacttaccctagggacttggtcattttcccttaaagcttcttgagcaccacacacatcaaacaaggttctcgagtgaccacaaataaactaagcaaattgccaatcccacaataaatgatcaagatcctcctcatgacttttgctaagagtgcaccattgcggaaacaggacacaatccaaggtcattcggatatacttttttgatttactggggaatgtctggctaacatgaggatctgttcttatttttttcattttgataggaaacaaaacttccatgaaccaaaaaataagttcagagtgatgagatatcacaacttccactaaccgaaaatgaagttcaaatcagtttcatcactgacggaggaataagatggaaggcgtttgattaaagactccttgatgcgtttaacacaactatcgttgcaagatatctcaagaactaactcctctcttttaagtatccttacattcttgacgtccagatatatcccaaatggttgccaaagtactgttgacccatagattttggaccttttattcacatggatgagtagccaacataatgataatttataaggcattctctcatagtttcttagataggcatttgaacatccaacaaccatggctagttcggtgttgggactgtatatatactctggccaccccactaatccttaaggaagttttatttttgtgcgtgtcatcattgtgcaggggccttgctaatccttaaggaagttttatagagaatgcataagcatatggtttcggacttcatcttcttgcatgaacaaataacctaatttgggtttcttttctgaatcttatcatgtgtatgtaaggtaaaaagaattgaggacaatcagaaactctttatgcttagggtaattggcttcctaaatagcagtctctgttcccctttggattctagaatccctcggctgattcagcctatagctcaagtcacaacactgattgctacaaaatagcccattctttcacaaaactgatatgtttttgttgtagattattctgtgcattcaagttactatacacctgtggatcgtaaattgtcaaccatactgtatggtttctgttagaatgccttgaattcgttacgtgacactacaaacaacgtagcaagggggtctcgccaataatattgttcttcctttgtcccgtagatatagctaacacactattagtgaatcacgtatatctgtgtgtctatttttatacatgtatttcttaattgttgattttgtaacaacctccatacaaaagcaagaaattcccttgctgcaaacatcctcccagaatgtgatagtgttttcaccaccaaacttgttattatcgttgtctttacaaactccagttcaaaaagtagggtgttatggacacatggttctattcattgttcccttcaacttttggtcaattatgttataagtttgagaacaactaaagttaataacaaaagttcattgtgttggtattttcgactttgatcagagtaaaaatttgttttctaatacttgtagtcaacttgagctgattgatctttacagcatatctataatcacgagaaacttcaaaaatttaaatatgctagttacctaccaactcatggaatgccatgaaccatgttcatatatctcatgttagctatatattttataacaggaaacagaggaggggaaagaactccacttgactgg

SEQ ID NO: 7919 - DNA, 9212 bp, Cucumis sativus
  Intron number 11 from transcript Cucsa.241910.1 (locus Cuc sa.241910) derived from phytozome v7.0 (chr-ID scaffold020 47; pos 1762732 to 1771943 reverse strand)
gccaggccttgcttgctctgacatactttcctgaggtaatagaggccggttggattcaaatttcaggaaattaaagtagatagtttacagtttttatgtttcgtaacctagttttatttatattaaacaaaacttttctacttttaagtgaaaagctaaaaagttacaatgataagaaccaattgcatacataaactccaaaacacagtaatactaaaccattgtggattagccttgtggcaaaaagggagacattgcctcaataaatggctaagaggtcatggattcatccatggtggtcacctacctaagaattaatatcttaagagtttccttgacacccaaatgttgtgagttgtctcgtgagagattagttgaagtgtgcgtaagcttgcctaatcattcacggatatcaaaaagaaaaaaaacacactaatactacaacctcctaacttgactacgaatatttgaatttcattaaaaataaatatcagaagatactcatgaattgtcttgattcaaattttcaggactttttggctctgtgtagtgggtttttttaaaaacatttttagggagtatttcctttacgtgttttcaattgtaaatttgcaacatcaattcccatgtctgtttcttagcaaaaaaaggttagacaatgagtcaactgtgaagagtttggaaggccaccccaaggagctgaagataatttaaattttaataaaatcgaactctacaaacttcactagacaccaacaataaattgataactcgtattcctttgataattataatgacattttaactcgtacacactaataactcaattgattgatcgataatttttcactgctttgcctctattttatttattactttatttttgtgtgaatcgaacaattattattacctatataatagaccaacaattatggttacttcaaaagtttacaggtggcttaattgtcaatttttttccaggccattgtcattttgattgagtccttacgattggtcaaagaaccagagtcagcaagcaggaatagtggtaatctcatttttatgggcaacagtagttttttgtagtttttgcaacttctttacttcttttgttggaaatgtttatttctcccacctctggtgttattcaggtgctttgcctcttaatcttgcaatatctcacgctgctgctgagatctttgaagttatcgtaactgactccactgcatcttctcttggttcttggattgtgcatgccatggagctttacaaggctttgcattcttctcctccagggtctaatagaaaagatgctcccactcgattgttggaatggatagacgctggtgttgttttccataagagtggagctgttggtcttctacgatatgctgctgtattagcatctggaggcgatgctaactcaaatttagctaatactttagtgtcagagttaacagatttagataatactgcagaacctgatgttaatgtaatggacaatcttggtaaaaccatttccgaaaagacatttgatggaattactcttcgtgacccttctatagcacaactgacaactgcattccagattttggcatatatttcagagaactcagtatgtttcttttttattatttatttataatcattttattactttcttaaaaacaattctttaagcttgtgcttgaaatttctttgtcaagagcctaagctatttttgatgtagactgttgctgctgctctgtatgacgaaggtgcagtagcggttatctatgcagtactagttgactctcgatatatgatggagaggtgctcaaacaattatggttagttgtttaaatcgatcatatgtaatatggctctggtaattggtaaattcaagttgttcttttaaaaaccacttttgcctttcaaaacttaagtatataagatgaaataattttgtgagccttggagaggaaagacatctgatattatgcactgaaatgaagccaagaagcttgttgtctcgtagttcagaatgcttatgcctattgtatctatttctagaagctaaccaccagaagcttacacttcggcttttggtttgttgctatatgtaaggcccccaattgttaatactaagtttatttgaataagattgttagtacttatgttggaagggttagaaaaggaatttcacctcctgacatgattgattaggttaattgtcagttaatatattggaaaatttagctgtaagttgtaagggacgtgtgtatttagtaaggaattctaaggatagtggggaagatttcagcttgtcctctctaaaggccgtgactttactgatttgactgagtaggcaacctcaatttttggtggggattgatctcacatggttggatgccctcgtccctcacctctaatagaaagttagatcgacaggtggtttttcttaccttcttatgggaaataataacagaggaatgggtggaagccaattgctggctgagctgccttcttcagacagtatttctactgggagccccttggtgccaagtgccattagtatttagatgcactgtggtagccaattgtaatcttcttctataattgtatttgtttatgaatcatgttataaccgtccaacaaattacgcagtctgctttatcatgaatatccttttttgtgattggctatctttttaacagattatctggtcgatgagggcacagaatgcaattctacatcagatttactcttggaacgtaatcgagagcaaagcctggtcaatcttttggtaccatgcttggtgctgcttctcaatctcttgcaaacattgcaggttatttatattttatttctattagttttaatgtttagccagagtttcaaattttacaattactgagcaacggtacttggtttttatctatctatctattaatttatttttatatgattgatatctccgaattattattattattttacatgaagaatactgggatacttcctcaaactggattaatctctgatagtgttgcacgcccgcatgtccaaatactttggccacttttatttttctgcgtcggaaaggagccttatttgtaaacattacatgcaattttcagaataatatatggcatgtttgcatgtgtatcaaatatggaaaagctgtcagaacctcaatctttttaaagaacctccctagccaaataataccatagagcaagcatttaatttaatgctttgttattctgtattgtttatcctctttcattagaactaatttttttcatttgcaatcatatgcaggttgctaaagaggagcatagaaattcaaaattaatgaatgctcttgtaagattgcatcgagaagtaaggtacgaaagaatttcttgttgtcagatggctgaagtttttcactcaggaatcatgatttaccctgtgtcattgcagtccaaaacttgctgcatgtacatttgatttatccacttcatttcccaattctgctcttggctttggagctgtctgccatctactggtgtctgtacttgcttgttggcctgtatatggctggtctcctgggcttttcagctcgctcctggatagtgttcaagctacctccttacaggttttgggcccaaaagaaacttgcagcttgctttgtctgttggtaagcaagccttctgattcataaataatgtgtttgtatccatagaaataacatttttagacgctaatcagtattttatggtgtagtgttttcattcatgctagtacattagaaactacttcagcctttgcacatccagaagtagttaactgttatgacctcgttatctgtccttggttgatatcaataccctttcatagtagacctggtagttgtgtgctttgttgagatgacaaaagttcatcattagatgctttttttgggtgatattttcacttcgtaatggaatcaaaatttccaattcttcaattctaactacaaaaaaggaattgcacccaaaagaacaagaccgattccataattttaaaaaaggggttgaggtagagcaatgtttcatcatcatttgttattttattttatttttttaatgaaatcaacaaccaataaatggaagaatacaagggcatactaaaaaaccagcccaccaaaacactccaactaaacgaaggggcttcaactaagtaataatttatacaatttacacctcaatgaagataacatgctctaaaaaaaggtcgaattgttgagctttgccattgaaaatacagaggaaaaatgagagctcttctctggatttatcacctgatgcaaaggctggttctgctagaattttgttttaaagtcatttttatcttcttaatttgctgttcgtccgaaggggaacatcctgtggagatgcgccactcgatctcttttgtggagcatttggcatgagagaaataatagaatttttatgataaatatgattcttttaattccttttggactgttgtttaacacacaacttcttggtggagtaccaattacaccgaacacttttgtaattgtagcctttctatgcttttcaacaattggaaggccgttatttgctagttttcttgggaagggtcccctcgtcccttgcccttaggctgttcttattttgttccctgtaacatatttgtttcttatccaaaaaaaaggtcattttttataatttaatttaattttgtttttgtttaatgattttttatgcaagaaaaagttttagttagcatcaattgttttaaatttgcatttgccgcttttatgtctcctcactcttcatctatcattgttatggtgctagaacgatttatttcctgatgaaggaatctggctttggaggaatggtatgcctttgatgagtgctgttaaaaagcttggtatcaagacaatattgggacctcaaatggaggatgtggtcaattggtatttggagccttgccatcaagagaaactgttgggtcaactgtcgctacaacttgaaaaaatttcccaagttgtccaacattatgccatttcggtcagtggtttctttcctatttcaagtgcttatcatgtatatgtttcaaaaatgctttcttgattattatttatgtttcatgtcaacagacattggtggtcatccaagatatgcttcggatatttataattcgcctttgttgtcttaaagctgacagtgcttctattcttctgcgaccaatattctcgtggatccgtgctcgtgtttctgatttgtcttctctgtcagacatagatgcttacaaagtaaaaacttctatatttccacgatagtctctaatccttatctttgcatttagattcatcagaatagatatatgaagtaggggttgaaacggtttggtttgagggcaaaaccgaactaaatcgatttattggttcaaaccgaaccgaaccgtatttatgcggttcggtttcaaattcgattttgtatttttaaaaaattaattcagttcggtttggtttcaaattccatttcattctttaaattaaaagtggttcggtttaaattcggttttgttttttaaattcgttttttttaaaattaaaagtggttttcttttaaattcggttttctttttttcttaatatatgaatataaaaatatataaaagaaaaatacagtagttaaaaacagtttggtttggtttctcttctgtttcaagtttctttaaacgaggctgaactgaatttttcagcttaattgagttttcggtttggttttagaagacggttcggtttttgtgatttgaatggccacccctatatgaagcaaacactctttagtttggttaccatgcttgtttttttacgtatattggacactggcacttgtcgggcacatgttatatacttacaaatgagaaggttaacattgctaccagatacaaaaataaatatattagacacatgcagattcagatattaaacaataaacattcatatacatgtgcatgtttgtgtgatacattgttgacctaaatgagctttatggatgttgctcattattagattgaagaactttggatgacaaattgcataacaaattgaattcgttcagttaggcatgtgttttagacctttggttttgaatttcttattgattggttttataagctgcaattcatttaggaatttgtcagatatattatatttatgatttttttcttaaaaaaaaattctttactcaaaattttcaagaatgaatataacaatgaaactgtccccaaatatgtttgcaatattttttctccgtagttttattcgaccatttcttatgttttatgggacagtggttttgttaagtgagtgtgtgtttgtgtaatcataaaaaaagtagttgtagcttttttgggatttcgattcttagttattaaccttaaatggttattgaagtcaatgtatcttatcttggtattttgatcttgttgaaagtcaaatattccaactgtttatcctggtaaacgttgattgtgtcattgtcattttctttgcagatatgtaggtatcttgatttttttgctagcttactagagcatcctcgtgccaaggtattgcagtgttgtaacccttttgctctcttgaaataaaaaggtttgaagtgtcagttagagattttcttacgttgactacctcttaatcaggctctattgttgaacgaggatgttatccagttgctaattgaagtatcacatagatgtttagatgacttagatacagatgaaaagctgattgcggggtgtagattttctactaaatgtggcttttctttactcaactggtgcctccctgttttcaagtcatgttcactactttgctactccagaccatctcttaagcacattggaaaacacaatctgtaagtaaactgtttttatgttgattaattttattcatttctttattacttttttctataggtaattcacaatctaatatctgctgattttgtttcgttataggcgtcattttggattgttaagtgcagaagactattcattgattttacacagtgtcctagtgttttgtcaggtaaattattgtccctttctgaagtaatttggtaatgggtctttttccccttctattatgagagcttcagaatttagtcacaagatgaattcaatcatttcctcataattttgatcaatcaaggcttggggtttatttattgatttttttatgtcaactgtcactattggatattaaggaccatgtgctctggctgctacttcatgatgtctcaggcttaggttatatgttaatacctctaaattctatttgccttagttgaagggcatgtttgtaactccctttttatttactctatggattgatgcaattggtaattgttctttgattttacaagggaagtgaaatgttattaagttagatgccaatcttcaattttgaacgtgagtttcatcatgttatataaagtgcttcttgttgattgactttccatgtattctcgttttatcaaaagcttcatcaagtagaagaatgtgtttcctcctttctattttagattaactagcgtgtactgattctcaggtgctccctgttggaaaagaactagttgcctgtcttgctgctttcagagccttgggatcttgtagtgaaggaaaaactgctttagcatctattttgattgatatttttaacggtgatgagcgtggatctcaaggacataaaaagggtagtgactgtacttttaacgtatcaagttggaggatgaatcctcctctgctctgttgctggaaaaagttattaatatcaatcgattcaaatgattacatgccaacgtatgcaattcaggcagttgatgctttatcttcgggatcactaagtttctgcctcgatggatcaaggttaggtttcttctggagctactgtttggtgtgtataaatggaagtcataattcatatcaatcatttaacggttttgaaatttctttttgtctatactctaagcatgtttgttaatttctaaataaatgttgggacacacgtgtatgcccatgagaaaatgaacacttctcaactttgagctgctgggtcacttttctaagtattggtagtggtgggttagaggaccaaatgatgccagaaaactttactatgacaacatgggttgtcaagagggagaggtagtaggcatagctggtcaaatctataatgcttatttgtcaagatggtagttggagtcagtttctctcttgggattctccctcatctaagattcttaggaacaagatcaaattagatgtgcaattcttcacgtgtaaccatggacttcttgatagttcaactcaagtcttgtttatagttctagggtttgcctttccggtatttggtgtcctgtccatttattttctgaagagtttggaattttttgtggaatttccatatggctaggatattgttctattcatttgaaattggaagatcagttacctatgggcctgcgtgaagtattgtgttaatcagaatcagaattttcagttttgtcacacatgtttggaaggtcttgttgtgtttatgttattcagcttttaaacacaaaatctgcttagttgtgattatgttattcagcttttattcagcattatgtatttaacatgaaatctgcttagtatatatggaagtacactgaaattgttttaccccccaaaagtaagcatctttttccttctacgttctctctgtagatggttattctgtttagcaactttgaaaaaattttacttgtttcaaatccagaaatatatgattattttctggaaaccaattgaccttttctgaggaaatttctggtgtctttggcttgtgtaaatggttggctaactgtttgctgttgtgtagtttggtcttggacaggattggagaaattaaatttctctttggcttttctgatgctgtagatggtgtaaatgattcttcccccaaagacgttataggttatatacaagaaatgattgatgtttttaaattaaaactgagacttggtgattatccagaagactccaacatgccgacttttatgcataaggtacaaaatatttagaatcacactcttcattttactctgaatttaaagttaaagttgtcgaccttggcatgaattgcaggttttagagagtgcagaatcattatcattgttgtt

SEQ ID NO: 7920 - DNA, 2031 bp, Cucumis sativus
  Intron number 6 from transcript Cucsa.101960.1 (locus Cucs a.101960) derived from phytozome v7.0 (chr-ID scaffold0092 7; pos 1093558 to 1095588 reverse strand)
aggtaagtgtgtggtgtactagtcaatgttgtattccttgctcgtgatcaatatggatgacttcaagttgactatgctagtaatatctcatacaactacagaccttgaatacagttcgtagttcttttatattttaaagaaaatagctcaattctcaagatatgtttttggattattttcccctttaattgcataatcaatcatcacacgatacccttacatcttttttattttcattgtgcactcatgaaacatgatatatagttctctgttatattatggatgaaattacactttgtaatttatcagcttcgttgctctcccagtgataatcaccaaaggaaaacctgacagtttcttcagaagagagtgagcaagtattgcgtattagactagagaaatttcaccatggatccaacaaaagaaatgtcatctttgtccaaaagccaagaaagatggtcttgtatgtaagagagtagtgaaggagctcactgcatccctctctggttgggcacctaaaggaaatggcccatgcgcttccttctttgttcaactgattacatgttctactttcttgctgacttgataaggcaaaatgtcatggaaatttttgcttaaagcatcttggtccttgtcatttgtcatgccaaaagaaagccagtaccatcccctgttttatgggttgtgaggatagagaaaatgttcttgaacttgacaatgctgaaccttgggcctttagaatttcaatggttaacctcataacctgctcaattctatcctcgtcctcaatcacaactcttacaaactgattcttcttccttcattctgtttccctgggtttgttagctttaattttcttcccaaagattgggatcagagatcaaagagccactattctagtgtgtttccaaagcacgatatgtcataggagatgccagggatttttactctcctaaagaatgagatgtaaaattgtaaaacttaaacccggcggagacaaaaaattactgaaggtacttccaacaaccagataaactgggaggagcacgaaaggtttacatacatacatatatatgataccacatccacacacgcacacacatatatatggtatcatatatcagtcaggtacacaaaggttgagccagcttggctatttactttgtatattcattactaaactcaataatataaatatatcaatacatgaattactcactaagtgaattgatttgtaccattagttatggtagatctgaatgaaatagaatattttgtattccaataatcaaactataagatgcaaccttatataggataaaggctcaatacataaaagaaaagaataataacgagaataaaataaaatcatggataattttacaatgaaataactttttgttaagtaaatacatgcagagtgaggatttaaaccgtctaaccttttggtccaagatattgaattatgttcgcgggtgaaaatatacatattatttgcaaaaagattaatgtattttcttgtaattattgacatctacagaagtctaacaaagtataatttaccggaggaaaaaaaaacaaaatagaaaggaaaaccatatgtaacacgtggtagtaaactagtataattaaaatattacatcacactgacatcattgcagtgtaatgttggaaagaagaagaaatataacttctttatcttcaggttgtggatttaataggtaatatggttttgttagaattagtggcccttggagtatttttggaaagaatatggaagatttttcctatttcctaaatcttttcctttttcctttttgttgtattctatttattctccctctttgtacctattgtattattcttcagaaaaataataaaactaaaagcatgtggtttttctcctggttctcaggtttccacataagccttgatttcgtgtttattgttttcaataggtttatttatagttgaacaacggtttcctgttttttatggctgcagttatatattgaaggatacctgcaagct

SEQ ID NO: 7921 - DNA, 2618 bp, Cucumis sativus
  Intron number 3 from transcript Cucsa.321960.1 (locus Cucs a.321960) derived from phytozome v7.0 (chr-ID scaffold0308 0; pos 1779035 to 1781652 reverse strand)
aaaaccaactggctgataaggtacgatttcaaggtcttccaacttctcttgtctgagtgaggaaaggagaggggatggtatggctagggtgtttcggttgccaatcatatgataaactagaatctgtattgggtaggatcatagggatatttgtccgtgcgttgttttgggttgtggaaacttgattgaggctgaagctcggttccctaaaatggaaatgattcttgaaattttagcaatgtgatagaaacataaagcttgtgaccgagacccatgggtggagtcaattttttttataaggaataattttagtcttagatacccatgggagcaatttagagggaaacttctaaaagcttaattttcttttaaaaaaaattattaatattttcttaacatatatataattaaaaaataataaagaaagaatacgaggacaaaataagatggcacagttgtctcctccttcattccttgttttacctctgttttaacctatctctagtacagagaaaagtttggctcttgctttgcacattgttcatttcgttctgtcttgagtgtgaacaggcttgatactgttctagaaacatacttacatagatcgaagccagagggaatttacctgtttaaggataaacatatcatctagtttttaaccagaggataaaagtattatctccttgagatgaagatcgaaagtttaatccaccactgataggagataagagataaaatgcacatacattaggtgttgataatgagaattctcaaccttgtttctaaaacgactaaaagttctgtatcttgttaaagaaaaagttttgctactacatggatgcttaaaagacttcaaagacttgataggatttaaactttacgtagaaatgaactgaactaattttttgtgaaataatcctttttacttgggatctgaaaacgatcaaaatacaggaaactcacattttaaacttcaaggagaaaaagaaacatcaagaccattcactagtcttaaaaccaaagttgcattcaacaaaacaatgaagtaagtgtaataagaaatggaaagcgtaagtgaaaaataaattgtgctattctaagtctctcatggccctttccaacaaatattgttcgtggccggactgttctgagtaagctcatctcaaagcatcactttggtgttcatcgtttggacggattctcaccaacaagataataatttgaattgtaatactctcgtatttcctttgggatcattttatgttttttttaatgcattgtaatcatttttttttctctcacttctttagaagtttgtacctttctcttttcattaattccacaaaaagtgttgtctttgttccaagaaggtaggacctgaacttcaatcttgatcatattatcaatcactaaaatggacagatggaagacactgactgatccttgagaaccataacttggattctggatagtaggaccttagcttcaaattcaatctagatcatattatcaatcactaacaaatgaacagatggaagagttagatagatccttgagaactatacttaaattctggtgaaaaaaattgttcaatgactgtagagttcactctacctaggaattgatgatattctatgaatcacacacaaaccacgtgtttttctcttaaaagcaagttacacgaataaaataataagcatatttggtagttgtgtttaatttaggaccactccttggccagaggaatatgtggctatgaaataaagaataagtagaataggacgagtgtgaatttattagctaggtaataagtttctagactagcagttcctcgaaatcttaagttgaaggatcagtcagcttgtttaagaagatttatgataatggctacgaagttagcttcaggtgattttggagtttttacgactttcggtggcttacacaaggattttctactagacccagaggcaaaatcttctcaactagggaaaaatactgcatgtcagaagcacacgttgaatacaaaataaccagtaatagcccattcaaagtaaattctcttgcagattgggtccacaaacttgaatggactcagttggacttctgttgcttgagttcaacttcaacttaggctgctcaaagtctgacagcattgtacgtacacttggtctgggaaaacagcatcaactatgaaacactttgagctagtttgttttctttatataagttagcatctccccttattctcagcttccgggaaaccatacctgaaactacgatagataaatcagttgatctgcaattttaaaaattctttgtttttctttcaattcaatgtttttttcttgtattctcttatagatcgtcatcaaacaaaaaacacaaaaagtcaactgaatactatggatgttgccatcggcaatattatggttatcacttctttctctctcttttgagtacagcaaatatgtgctatagatatttaaacctccaaaacttaagaaaagtgatgtcaattaccgttaacttatgtcgggatgttttgtttcattttctctcatttcatataatttacaagttctgctatatttttttcttgaattggcgcttattgcaga

SEQ ID NO: 7922 - DNA, 1607 bp, Cucumis sativus
  Intron number 1 from transcript Cucsa.273700.1 (locus Cucs a.273700) derived from phytozome v7.0 (chr-ID scaffold0251 1; pos 755150 to 756756)
cctatctccgacgaccatacattcactagaggaaggttcatactatttatctctcaaatcccccttttcatttttatatcttcatttttcctcttccttctttcttctctcccccccccctcccttttcgtatcttctaactctctttctttctatatatatatatatatttaagtcttgcccgttgtgacttgttctttatgttgatcgcttcgtaattttggaattcccaggaaagaaaaaaaatataaatataaataataaaacctattcttctttattctatatttcgcagatcgatcgattgcattattttgtatttcaaagaaaacagaatttgaattactgtttttaggatgattgttatatatgtatggttgttggggattgtttttacagagtaggcaaaaaaggaggctctgtgtttctctctggattacggtgtggtttcgattaagagatatcgaaacgaggggtggagattttgtggaatttaattaagaggtacgtttaatactttgttgataatttggaacaaaagtatattatatattgtgtttaatgatatatacccacacggttttagaattataattgaattggaaccgacttaaaggggttatctcttgggtgtgcgacggagcatggggctactctgctttcctttcttatttgctgactttctgggatgggaatgggagtcacattttgattcaatacataatttcatttctgggaagcttacttcctttaatgctcttttcattttctcatatatacccaaactatttcctgattttctagtctttttttttctcattttttggaaagttgtttttactatcaactttccaaatgcccaattttttcttccaacaaaactgactttaaaaaaaaaatttgaattatttagttgcattaaattatagttactatgcacttttgaattgaatttgatttttagggaatggtttgttaaattatggtcccattgcttccatatttcttttcatttgcctaaaaaattgaaacaacataattaccctacaaaatatatatacataatatattttttttttttctgagtggagattatttaaactccaaatatcttgcttttccatctattatttggaaacaaatttctaataggggacccatttagaaaataattttaggcccaatctaggatatctcaaaataaaattaaaaatgtccaaaatttttattttttgatgttgatttgtgagttatgtttggaacacatggaaagaaaaaaacaattactttttttttcttttttttttgttttattggggggttgtaatattttgaaaaaacaatttatgcttatttgtttagatatttgtagagttctttttcatattataaagagagaaaaagaaattaaagagagaaatgggaaaaagagctctccttctcccatcaatggtcttggtctaagtgcaaaagcaaatacctttttttcctcctctctttgctttcattttaacatactttcatctttctcatctcaattttgcattgcataccaaaattttctccttttttcgagtttgagatctttggtgacctctgttatgcag

SEQ ID NO: 7923 - DNA, 6084 bp, Cucumis sativus
  Intron number 1 from transcript Cucsa.169090.1 (locus Cucs a.169090) derived from phytozome v7.0 (chr-ID scaffold0116 3; pos 75270 to 81353 reverse strand)
ccagtggttggagcgctaggggtggccaaggcaaggtgtgtaacttttccaacttcaataattgtctgtttctgaaagaggaagattatcactttagataacgcggagtttcatttcaaaatcaattgatgataatgagcaacttacaacttagtttatctatcttaaaaatatttcgaggttctttcatttttccaggaaatacacaatatatctattaagatggagtcacttttgagtgttggagatataaagaatcccatgttaaaaaaaccaagaaaattttcactccatataatatagatgagctactctttttgcattgagtgttcttggactggataccaagttttatttttagaccatgtcaagtcacctattgatcacctaaaagcttacacatgataaattcaattataccaatacttatatatctctcacgattgaataaaagaagattttgagctgttgacatactcagattcagcaaacagatggtgatttaagttcaaaatatctctaagtaagctagactgtccaattaaaagaaaagagatttgttttgaatcaacaacaaactaaagatcacccatatgcgccatatgtttgcagaatccttacacaatgggagaaccgtgtggctccagcagcggctctgccatatctgttgcagcaaatatggttacagtttcactgggaaccgaaactgatggatcaatattatgcccttctactctcaactcagtagttggcattaaacccacagtaggtctcaccagtagagcaggggtcgttccgatctcttcgaggcaggacactgtcgggtaatcaatttgtcatcattgaaattttcccatttatatttgtatccaaaggaagtactttctgctgaatgagtgatgatgaaacaggcctatttgtagaacagtgtcagatgcggcttatgttctagaagccattgtaggagcggatagatatgacaattcaacaattgaagcatcaaaatacattccaaaaggaggatatggccaatttctaagggctggtgggctgaaaggaaagagaataggaattgtgagggaattctatgattttggtcctgatgacactttctacactcaagcttatgagaaagtcgtcaaaaccttgaagtaagaaagcaatctcacttttcataaaccatctttttttatataattatgttagaggtttttatctgaccctttgtcatcaataacatgaaaggaaaggaggagcaatattggtggacaatctgatgatagacaacctagagcaaatctttgacggttcaagtggggaacagattgcattgcttgccgaattcaaaatatccttaaatgcctatctcaaagagctagttgcttctccaattcgatccttgtcagatgcaatagaattcaacaaaaagaactcaaaacttgtgagcgactatcatctattctgttctaattttacaaaatccgcacaacacaaaaggcaaactatcataacaatgaaatcttatcactatgtaggaaaatctagagtatggtcaggaggaatttctaaaagcagaagccacaaatggaatcggagatgcagaaaaggcagcattagccagattagcaaaactgtcaaaagatggatttgagagactgatgattaagaataagcttgatgcagtagcagctcctggttcgctaatatctcctgtttttgcaattggaggttttcctggagttagtgtaccagctggatatgaccctcaagggaatccctatggtatctgctttggaggattaaaaggattcgagccaaggctgatagagattgcatatggatttgagcgtttgactaagagtagaaagcccccttcaattaagagacaataaattatccacctatggatgaaatcttaaggtttgccagaagctattagacttgtaatgtttaatccttgtgatgaaactacatgtttcaacaagtaataaaatgatttccttaatttaaatacaaaacttctaagatattaactgacaatatttaacgtaggtgtagaaagaaagccctgctgctaaacctgtttgttgagaaaatgaaatcgatggaaaaatatagatgttagggaagaaagtcaatgtctcaatgtttgtttaacgttaaacaaagagaatgtgagagcgaaatccaaaggttgtgttactcaaaatgcggtacccaaaattgtgatacacaaaatgttgtataacaaatgtgatactaaaaaatgttgaactaaaggcattcactctactatgaatttccatcctattgatatgaattcacttttaacgcattgcattggtaaattggattcaaagactgggttggaattatcttcaatggtatagtgatataacaatcttcatgaaaggcagaccagtggtgaatccaagttgtgattaactttccagttcaatacaaactgtaatggaacctaacccagattacaaatctgatacataacgagatttcattataccattcctaattagaagagacaattaaattgcaagaacaatgggcttcaatgatgcaatatgagaatcaagaacaaagtcgacaatagcctatatcagggaattgataataatactgtttcagagagaaatgaaaaagaagctggaaattaccaggacgatatatcaatattatccttctttatgattttttctctcttttgtccaaccagtcttcgtcattctctctggcttcctcttctttcgtcttcacgcacgagctctctccaacttcctcttctactccagcacagcatgcatgggcaagaaacttcttcgagagagacttaaagatgggtggtgggagagtgagaccaactgaagatgggcgagagtgacaccaagcgagagagaccgagagaagagtgacaccaacatgcaagactaagagagattgagccagacggagacaaaggagattgcttcttccccatgcacgtgagtgtattttggtcattcaacattttaaaaaataaaaatgaattattttccttccaatttttggatcatcacaaattcgactcttttttcatttcacttctaattgctcactttattttacttaaaaatcatttcaagatcctaccattagcaaaaatgttatcatgataacattagaaacgtgaagtttcgaatttaaaaaaatatgaatattggtgaaaattttaaaaagactgcaggaaagttcatgaaaatttgttagttgtagcaaatatagatttagattgtagttcaagaacaacttttaattatcctttctttatctattttgatggttatagacccatagaacatgtcaaataatttcacatttaatcattagataaaaaacaattatgtgaagtgagattttagcttcttattgaattttcacatatagaaaaactagagaactacttaaaaactaaagaactacgtaatggttagttgaattatgtaattaaactatgacgacttttattatttaaaaaaaaaatcgtagttagaggcttgtcattagcttactcttaattcacaacctaaatctatcgatgattgacaattagatttcgatcacaatacactactaacataacatgtattctatgatatatttcaaatgtctttttcttacttcagttttgttttctcaatgactcaagaaaatattaaaaataattccatgcaattttttttcaaagtaactataaaaattagcgtggaaaactctttactaaaatagttatgtgtaaaagaaatatagctgaatttgttaattttaacttctgatttaactaaagttttaactaagagtcataggaaagtctataaataccgtgtattactttgatatttgatgatgacaaaaactgaacttaaataatatcttgttcccaaacacaatggacataggcacttgccaaaacactttaaaatcatgtgtgttcatcttctccttctacttctcttcatctcaccatctcctaaaagaaactcaaacaactaaacctagaaaaatacaggaaagaaagaaaggagaagaaagcttggagaactcttattaatcttctgtaatccaaaatcacacacaaagtgaaaagcaagagaaattgaaagaccatggagagagaatccataattacatgaaaataggtggcttctttgtgtccacacacgtgacttccactacaactataaataattaaactacttcatgggacccaaaaatgatatattggaagaatcttttggctcttccaatatcagtaggttgattgttttgctcatgtatcttccaactagtttcgttcaagtaacggattctagccaattgaaaagatcttctgatcaacgatatataactgaagcttaaaacatacctagtaatagatttctacactattttattattagtgttatcaatgatatgaagatagagtatcaaatatatactctatcatccaaacaatctatgaatgatataattttaccaacgatagatttacatattgtgtcatattaaatctatcaatcaaaaaagtttattactactaataacaaaatctattattttatatactcttggagataaatgtaaattgtattatatctctaattttttagattttactatatttttatatttgcaaatgccctaatttttcttctattttcaaaagttttggttaattatctcataaaagcatttttcttttcttttttataatctatctctaagaaaaaaaaaaaaaaaaaaaccctaaataaaaatgatttgtaatagtagtagtgagtgtagttatcaatataaaccaaggatagaagcaattcctaatcaaagactcgagagtcaaaacatactttttctagaatttcatttgggtctcttgaagaaaaaatcatttttggtcattgctaacactacaaattttagataaatgatatttttaaaaatggcacacatatattagcatacttcaacttgacatgaatcttcttattaggccatgaatcttcaactcaaagttaaaagttttgatctccataaaaaaaaatgggtctaagaattaaagtgttcttgattctcaaaaagatatttccacaaaggagtggagcatactccacttgatcgttgactgataaaataaacagattcacgaactaagctcccatggctgcccaaagctttcccatttacatatccatgcttctgggtttgttggcaattttatcatcatatgggagttgtagctttgacaccaacttttccattgaagaagcaactttgaaagacctccaacttgctttctaccaaaacaaactcacctcaacgcaacttgttgagttttacctcgaacaagtgcgtagatttaaccccatcctgaatgggatcatagaagtgaatccagatgctttaaaccaagcctctcaagccgaccttgagcgcaagagaagctcaccgagatctttgtctccacttcatggcattcctgtacttgtaaaagataacattgcaaccaaggatcagctcaacacaacggctggctcttttgctctgcttggctctattgttcctcgtgatgcaggtgtggtgactaagttaaggaaggcaggtgcaattatctttgggaaagcgagcctgagtgagtggtccgatttcaggtcctatgaacagcccaatggttggagcgctaggggtggccaagggaaggtgtgcaacttttccaaattcttcaataattgtctgcttctaagtgaaatcacacaaaaacgaatctgtagcacacagtaggacgttacatgtcaaaatatattttaaataataggatgattacagaagattttgaaagtgtagaactactcagattctgccaataaacaatcctttcaagtttttaactaaaaatatctcgttaatatcagcctctaagctatctttttctaaaaaaatcaatcaattagagagtccaattaaaaaacagcaaaaattagatttaaatccacaacaaactaagagcagtacatatgtttgcagaatccttacaca

SEQ ID NO: 7924 - DNA, 960 bp, Cucumis sativus
  Intron number 1 from transcript Cucsa.220170.2 (locus Cucs a.220170) derived from phytozome v7.0 (chr-ID scaffold0165 8; pos 1686194 to 1687153)
gaggatcgccataatccacccagaccttggtataggtaacaacatcagttttctccactgtttcaattgctgaatttcgatcaacatctctctttttgttagaattctctgtattggttagaattctgattcattgaagatgattaagtatttacacggtgttggatggcctggcctgtaagcgcattaggatatttttatcgatttttaaaaaccggcggattgcaccggcacattatgtgaatttggttcttgttttgtgttgattcgtgttgtcactcttttctcctaataatttaaattgccgatttatttatttgtagtttacgtgtttgattcttccgatggtaatttgttagtaatacattggaaaaggtggtatgacttttttgagcaggttaatcttccagttaccgattgagaatacattgaatggattaaacgtcacacaatctcaaattttaaattttgatttccgtggtaatttaacacacattttgacggaatttcaccaaagaagctataatcagtcatattttctagttgtcatctccccgtctgtttctatacaataatagctgaaaacaatgaagggtattaatttctcaacgattatccggaaaacagaagaaaactaagaatggatttcttaattcttagcatgcaacttaggcaataaattttccaactgactgaaagtcgagtcatgcaaataataattctgagattcaatcctaagtttttatttttgatttcttaatatatatattttttatatttttgttcaactttcatctattaagatagaagatatttaaaattagaatcaatggacgacaaagtttcttcttgttctaattttgtatccatgaatatattttctaaccttccgagttcattgccatagaagtttgtaactgagtatagtgtttacaggtggagctgagagattgattgtag

SEQ ID NO: 7925 - DNA, 2985 bp, Cucumis sativus
  Intron number 3 from transcript Cucsa.291890.1 (locus Cucs a.291890) derived from phytozome v7.0 (chr-ID scaffold0276 6; pos 491031 to 494015 reverse strand)
tcaagagaagtttaattaggtcatttttacttctatgaagtactgtactgtttggttttttgtttcagtgaagtatgtttttaaaactgctaggcaccctggacggacaaaaggaattgccaatttacttgtgctattttggatattctttggggcacttggtggtagatatatgcaaaacagttggggggatatgtctaaatggaatgctttaatttctcctgtgtaatctttttgtaacttgttgggatatgatgaggatgttatggttgtgtcagcctagttgagatagtttggtgcatctggtgatccctatctttttgtttccatggattaatatatcttattgtattttgaattttcctttcatcttatcaataaaatgtctcgtttccgtttcaagaaaaaatttaagaggtgtggaatttttttttacaaaaactagtctcttcactgaattaatgaaatgagattaatgctcaaagtacaaagggaatataaagagcaaaagaaataaaagcatagtggatcaggaggttgttttttcctggaacactctttgattcctctcaaaccacaattcaaaaagcagttccttgacaacattactttagagaattcttggccctgaatacagcaaaggttgcatcagaagttgcaaaatattttcctggaataatctgccaaaaactcaatttagcccaaaaactttgaataacttctgccaacactttacagcatacgagcagttgagcactcaatgaatagatgctggagtgtttcacttgctgccttacaaaggggacaaattgagggagacaaactgtgggatgggagcttttgttgaagaactttgaagcagtttaaagagccaaggtgcattatccatactactatgttgcctcttcgagggctcttagatttccgaagtgccttctctgaatttttttctagtgaacaagggaaggtgagtaacagctgattttactgtgtatgatcccctactttccagcgaccaagtcttttatatggacttgcctccaccctcctgcttgataataaaccaggaagggcctgaaattctgtgatttcatcctcctttaagagccttctaaagaaaattacccatgatgaagtggaaaactcccagtgttcagctactgttctttggggattgattgtgaattgtgatcttgaagagtttgggaaacatctcttttataggtttcttatctaacgaaggatgcatctagaaaccaattctactcccattccccaacttgaagagtgcttgggctctgtattcaggcgcttcttgaagcttatctagcagagtattgattctttcctgtatttttcaccttgtctgtgtagctggattcttgaagcttgtagggaaactcttttgcttctgcttctgttgtctgatgagatttgttgatggaagaatggacatttgccagaccctgtattcttgattcatctgaaaactttttagcattttggtgtactcaagcgtgataaagagttttaattgcgatagaatagaaatgttagttaagaaagtaagatagaagggtagtttggatcttgtacttatattttcctataaatataacacttctcgcctcatttgagaggataatcattttgatgaaaaattagactttttggatttttttggaaacggaaacaagcctggtttacaccacatttttagaaacaaatgtcaaccctgcttagagtcccccgaatacacataaatgaacgatctacctcctgtgcctggccaaatgacacatcttagaacccaacctgatacatgcaatttcgacactcttgtagctctggtgtcatcccttccatcctttaggaagaagtttctttttggttcttgttctagacctgaaatagcttcaatagacaaactcaactgggactttgatgatatcaaaatttcgttgctttcatctgtaccttagggtgtgtttggggtggggatttagggggattaggaaaagggtttgcatttttgggaattagggttaaataaccctacttcattttctcataaccctacaaatttccctacttcatcttattatcataatactacactcataacccttcccccaaacacaagatataataacactatgattataaaccttcctaaacgcatattatcataatactacaacaataatccttccccaaacacatattatcataacacgaccattcatattcttttccccaaacacatattaccataacactacaaataataactttaaccccaaacacatattattacaatcctaggattatcataatccttttcccccataactctttccctccccaaacgcacccttagagtttcaagtttttactttgaagcttttttggttggaaggatcttttgcttcaaaatttctaaatcagtgtgtaagtctcagtctgttgatttttgaagttctggttcttttcactactttccatcgtccatgctacacatggttgttcacagagcttcagacttagtagtttctcaggagccaatttaatctgttatgtgttgtatttgctttacttttctggctttgtctagttaagggcttcttatagttgtattttcattattttgcttattctgtttctttgtattttgagcattaggttcatctcatttctttcatgaaaagccatgtttccttttcagaaaattaattgtatcaggtggagtttttgtgttttgattgtttatttttttagaaataaccatggcttcacattttgttccaaaaaatctattcaactatttctttttgttcattaattgtgcagcaattctgaatttgatttttgtgttgttatttgttaagcagttctgaacttatttgtatagaaatatttatcttcttttaatgaaggatttatagataaatatgttgcattcaacatgcagtttctgtctgtgct

SEQ ID NO: 7926 - DNA, 4051 bp, Cucumis sativus
  Intron number 1 from transcript Cucsa.217940.1 (locus Cucs a.217940) derived from phytozome v7.0 (chr-ID scaffold0165 8; pos 146278 to 150328)
ggaccgtggatcttacggcttggctcctcgtttaggtcagatttcaattatccttctttgtttctctcttttttatttttgatggctttctttctgctcttcttcttcgcctacttctgttacttcttcaattctacgattgattctttcttttctttgatttcatgtgggtttttcgtgggttgggtaaaatgggttgtttttcttttatttgggcctgggatttacagggaagctgttattgaatggatgattgggtttggaactggggatgaatcggggctaatgtgattccgtgttctcggtttgtttcagcaattattgggtgtttcaaatttggtctcatttgttctaaaggttattattctgggtttttagttttactaagcaggcgcttggactggttttctttagctgaagttacatctgaatcatttttttttttggtggggtggaggtggggtgagggtgggggtgggggtgggggtgggaggttcttttgtgctactgacttggttggaatttaaattttcgatgaggagttcaagttttatcattatgcagacggaatagattttggcatgaaacatatgctccgtttgtgagaaagaacttgggggattgtatatttgacggatcttgttagttaaatacctttctatgacctcagtggttacttgcgagtatttccgtgggaattgaagcttccttcgacaaacaaacaattcaagagctcctttgatgttggatcttggacttgcaactgtatttgttaatcgtttctgaaaaactcaagagaattcagttttccacgttgatggtagctataggccgcataaccctatgatttctcttgtcccacataacccacataactgcacaaacacaagcacgccaaagtagtttcctattgattaacagttgtgaacaattcattggtttcaaggccaatgctaaatttaatggggtcgtagatttgaatttcccaggaaatgtataaaaaaaagcctattcagtaggcatgtattcaatggggaatgatttcacaatgttgtagtttgtttgcctagtaatcaacgaataaaccatgtatgattacatagaaatttctattttgagcatacaaaatcaagttctttcttattaaattccctctcaagtattgagaactacattaattctcaaaatcttaacattggcaataaagggatgattggtgacgtgttgaacgtgaatatggaaattggtgcacttgcatcagttttaataagaaatgtagaattcctaccaccaagtataagtgagaaccgacgaataatggaaaatgttcatggttttcttcatttccaattctcactgtggatgcattatttaagtgaaggtttggttcaaattcaccttttgtattttatcacaaatcctcatatttgtaagggcttaaactttctccaagacatgggctagcatggttctttcttagggatctttataagcagcttgatagattctatctactggttcaggaaaatacagaaaaaacctatgatattggtcaaattggttggtttgaattatagttgttgattaggtaaattttctaaatataacatgaaaagacgtaggctgcattttgtgtagtatattttggtagttttctttcaatttgatttggtgcttggcggaggtggagtagttggttagggttagtaaaacaatggtttcaaaattggttttggccaaaatccctcttgaaccaattacacccgtacttcctttcgtttatcacctcatcatgcatgtgaagataagattgctcacaagttctttggcttgatgtttctaagattttttagtggaagatttggtgtgaagggattagagaattatagtgaaacagaaggaatacatgcaaatgcttacatcactcttttcttcatccatgccaattgagatatattttgctagttcctttggattttagtttaaaaaatggcctatctttcttatcaactattttaatgagaaatccattttctttgagaaaaatgaaagattataaaagggcacaccacatacataaacacacttcaacaaaagaagcaaaaaaaaaagcacataatgggctggcctaatggtaaacaagagcaatggattaataaagtagggtcaatcaggttgtttggtgagagcagttgaggtgtttgtatgctggtctcaacactcacggatatattaaaaagaagtctagctatacacccaagggcttcatccaagaaaaacaaatcgagggacagttacaaaattcctaggaactagacatttgaaacctttttaaaccactacaattttttctatttctcttaaacttaatctttgtgaggtagcaaaaaagcgaagcgccaagaaaaacaaaatgaaagaatacaaggataagcaaagagacgttaatagagttggtttacgtttttatttctatcttcattttttattttaaaactcgaggacaagtttttttaggaggaatagaatatgatgtaataggttttaggataacttggtttaatcatgtacaattcctcttttcctactttagaaattagtttccttttagttatccttataagacttttccttgcctctttatatctagagaatccctcttcttgtatgggacaactttcataagtaacagatttgattggatttttggagagaattctccttatatctctttaggctacattagatgcacacaaaaagagaaggaaaactgcaaagagggcctccaatcaagcaaaataagacaatcctaatggataatacaaaaggtatcgccaccaaagcccacaaagttaggagaatgctcaagccctttaagaactctatcgttcatttcaccccaacaaacctagtatagataacctctccactacgataacacacaacccatccactacaaatctattatagatactagtctagtccttgtgttgttgaattgattgatgcatattaatttttcccttttggttctacactgaaaggatgccaaaaattgatttcaaatcgtactaaaaaactttcatttccaaagaatgtggtccaagccctttgaggcaccccaacgaagagtttgccatggtggccctaacaaaagaagtaatgcctggtgtatatctcattcttgctaaaataatatcttgtgtatgtgcaatataccctctcccatgtccaatcacatgaaagagagagaagcttggagtcaaaaacctgagagcctatgttttattcgtgaaaaggaaacagacctttaaattttttgtttttgggatagaagacaagaatatgtattaacaaagaggagcatacaaaaagggggagatgagataatctcattgcaccaaaagggttaccaagaagatttctagtttcttacccgataaagaaaggctcctagttggcataaatgctaggttttggtagtttgatcttcggtaagtttttattatttaaaaaaaaattgttcgttgtttattggactgttaaaactattttgtgagaagaaagattacatgttgatattttgttttgtttttggtttttggataagaaatggttttgttgaataaatggaatatccaaggcaacactgttgatattttgttaatgtgcgcatatatgctttatgggaaatattttaaccaacccgttcttgttgtatgtactgttttttaaaaattaaacgttcatatcttgtttggttttgtctgcactctggcttttagttctcgaagctccaagtttgccatacacttgctcacttttcacagccgttaaaacttctgtattgagcattggcttttattgaacaattttagtaggccataaagcgtagtcttaatatctaccattggccatcatttctacttgcaaaacacatgtactttttgggtttgtgaagtgaactactgtttgcattttttctttcatggctgacacagcctatattcatgcagatatcgagcagttattggtagaagcaaaacatcgt

SEQ ID NO: 7927 - DNA, 3283 bp, Cucumis sativus
  Intron number 3 from transcript Cucsa.114370.1 (locus Cucs a.114370) derived from phytozome v7.0 (chr-ID scaffold0096 2; pos 203271 to 206553)
gagtggaggattccaaggtgaaagagggtaaattgctagatcatcacattttatatagatgattgtcagatgggatgcttcctgattaaagtcagtgaagatattaaatgactgtacagactaattatagcaacatggcttatatggctctgcattctctctccttattgctttaattctcttctactttttaaatgtctatacttcttcgttgataaatgtagtggagtcatggaaaaagtaggagccctcgctctactttacaattgaaaattttgaaatcgtaacacatcctaagagttgccaacccaacggtgagggattggaaggagagacaggctgtctctagagcagccggacaagagagggcgacgtcaaacactgtggaaatgggaagaagatgaaaggagtgagagcgatagcatgggggaggggaagtttctaggaatggtctctagttggaagcacacatgactttgatctcacttttcaaattctaacgactaatgaacttatgctcttgtgctgaagtcaaagggaaagagaaaacattctaattgaatgacagggagatcaaattagaggaaagagaaatgaactggaagattaaaaaaagttattttgtaattatttgaaatattttatttttaatttatttttttccacctcagctgaattttaagtttaatttaatagcaatgaccatttttttagctttgtgaaaagtacccggactgaaactggattattaaaagttcaaagacctaaatgggtcaaacttcgaagtacaaggactcatacaatattttaacctaaaatttatcgtatgtggtagagattggtacacaacattaaaacattgtgtagccataaaatattatgtaagttctaaagtgtagcctatagaactctgttattaaatatagcagacaatatattgaggcaagtgatagatgaaactacagctgatgatgtgtggaaatgattacgagccttatatgtaaggaatgatgtttctaacaaggtttatcaaaaagaaaaactattctcattcaagatgattgctgcaaaaacaatggatgagaatctatatgaatttaaaagatttgacttccgagatcattaaaaaaaaagtagaagttagggaaagaaagtgaagctactatccttctaaattatctgccagatacttgtaaagatgtaaaaattgctatgaagtaaggaaaagatagtttatctacaaactcagtaattattgtcatgaagtgtaaagaactagaattaaaatcagaaaacaagacaacagtgagaccttgttttcaaaaggaaaaagcagtcacttcaagaagaataaatttatcaagggggcagaggtttcacgaacaaaaaccagcatttaaatgttatcattgccataaaagaagaccacgttaaaagaaactaaccttataaaaagatctttagatcaagggaacatggaaaggcaaatttctctaccggagataatacatttgcttattcagaaaccctagctacaactgatgagaaaaccatgaataagacaatcgaggatcaggaaaactgggtaattgactcagattgtacctttcatataacttctaacaagaagtggttcatatcttataaaaaatgagatgaaagctctgtgttcatggaaaataatcatggatgatgtaaagttatgggaataggaattgtgatgataaaattacaagacaaaaaagaaatattttgctgaagagtgtaagacatgtttcagagatgagaagaaacttaatttttgtgggaatgcttgatgatgtttgttgtatagttactgtgaacgttgtcttagagttctaagaaaatcaagaacaataattaaaacaccaaattgtaatggctcgtacattgtgaagattgttcatcctctagaccatgctttgttagctcgatgtagagaagatgaagggctagagttatggcataaaagactgtctcatatcagtgaaatgactttaaagaacttctaaagcaaagagtaatcaaaactagaggtacaaagagactcaacttttgtgaacaccgtgttaaagtcagaaggttgaaattcacaaaaggagaacataccaccaagaacatcttggaatatgtgcatgcttacttgtcgaggccctctagaactcctcttgtccttaattaatgattattcaaggaaagtatggacttatatacttaaatcaaaggatcaaactattgaaagattcaaagactgaaaaataaaaatagaaaattagatagaaaaagggtgaaacaactcagaatagataacgagttttagttccttggtggctcatttaatcagttttgtactgaaaatggaattagtagacacataataacttcttccgcataaaggagtgtctgaaagatgaacaaaacaatattagaaagagtaagatgcatgttatcaaaaaccaacttgccttgtgacttttgggcagaagctgtagctactgcaacatacacgatcaatggacactacaaaaagatgagtatttttcaacgtacagcacaaacgtttggataaaagacgtcgaaagaaaaagcttcttccgacgttatagaagcttcatcgaaaaaggttgacaattctgacgccatgcataacggcgtcgtgaaacatttaaaattaaaaaaatttcaaccttttcccgatgccattagtgaaacatcgggaatggaggatactttttctgacgttgtactttacaacgttggaaataagtagatcatttgacattcacgaagtgcttcggaagataccctacgtatgtgagttttgtattcacaaaacacagaactcaagttgaaagaaaaagaggaaaaaatcgagaaagagagagattgtccgctctgtccgccgtcgccactccctccgtcttcatctctttcacaacttcttggttggaggtaattcaaagttccaaattttacatataaacccctttgaattttttcttaatttccttttctatcgttgggtttcttttattcaagtatccgaatatttcttgttgatttctgtttttgttatattcaaccgtttgtaatgtgttgtaattgctctttatgttcttggcaaccatggtgagtttagaaggtaaaatatgattttatttttcttattgtttacttactgtttagtgtgttttcatggttttaacttttgcatatgtttgtttgcactcagcagctgcaaaagaggaggaagttgaagaag
